United States Patent Application Publication US 2024/0301379 A1 - sequence listing, part 3

SEQ ID NO: 3094 - protein, 1532 aa, unidentified
  REGION 1..1532: note = Description of Unknown: Cas Enzyme sequence
MPNVSREICTFVAEIIKKLKIMKKILGLDLGTNSIGWAIVERDDNKGRIIKSGSRIIPMDAATLGDFASGNTKSQTAERTSKRTARRMRERFLLRRERLHRLLRILGFLPKHYEEKIGWDLDNDCKHYGTFLDGEKPKIAWIKNDDKKFEFVFQSSFQEMLEDFKKYHPDIVSDEKKIPYDWTLYYLRQKALTHPISKEELAWIILNFNQKRGYNQQRDEILEASDDKKEEYMCLTVSSVTPDEDAKGKDIWYNIRFENSDIIYRRKSKYPLNWVGKKRNIIVTTKLDEEGNPKLKKDGSIDYSVKSPNDDDWALLKIKTEQDLKASHQTVGQYIYAALLANPSEKIRGGLVRTIERDFYKDELEKILQKQSEFHAELKDRSLYEQCIKELYRNNETHRNNIAKNDFTYLILEDVLFYQRPLKSKKSLIDDCPYESHQGIDKETGEICTYPLKCIAKSNPYFQEYRVWKFLSDLRIIANTKEINGHIHTDVDITNELLPDNNSWSHLFAWLNDKGHITQNDLLTYLGIKKKEQSKFRWNYVADKHYPMNATRHAILNRMKEGEVLSREMEQTIWHLLYSTTSKAEIDKSLSPSDNSNGIYKKLIQAGISVESIEKIKAIKLPDEGYGAYSEKAIKKLLPLMRCGEFWDEGNIHPATLQRIKEFQKGNGMEDLSERVKQLISTMNDIHLYQRLSEWLVCYVVYGKHSEANEIVKWKTPEDINVYLNHFKQHSLRNPIVESVILETLRVVRDIWKRYGDIDEIHIEMGRDLKNPSDKRAQITQRVLQNENTNIRIKTLLAEFLAEEYKIDNVRPHSPSQQDLLRIYEEDVLAHNEPDDEIQDIINNLSNPTKQPSRTQVLRYKCWLDQKYCSPYTGQPIPLSRLFTSDYEIEHIIPQSRYFDDSFSNKVICESEVNKLKDNQLGYEFIKRHHGQTVQLPSGRMVRVLEVDQYEQLVKDNFAQSKRRKLLMDDIPAEFIQRQLNDSRYISKVVKGLLSNIVRTTDEDGNLEREAISKNVITCNGSVTTRLKRDWGLGEVWNAIVLPRFQRLNEITGRDCFTALNSHGQEIPAMPLELQKGFSIKRIDHRHHALDAIVIACTTRDHVNLLNNESALPENQANKHALSHKLRHCEEIIINGKKRTVYKEFLMPWDAFKSDTFNSLQEIVVSFKQNLRVLTQATNLYTKYMDGEKKQQAQHSSDHFAIRKSLHKDTVFGHVNLQRITTVKLKDALKDVNRIVDKRLKMKIKELLSKHYNEKQVLIYFKDYAYEWKGYDFNKIKVFYYTDEKEMMVATRFCNDLVSVFSGKTKKQDVEKTIEQITDTGIQRILTNYLNANLEQIEYAFSADGLEKMNENIAAYNNGKQHKPIYKVRMIETLGQKFQVGYTGNKSTKYVEAAKGTNLFFAVYKNDEGNRTFSSIPLNIAIERIKQQLSPVPEQNGKGETLLFYLSPGDLVYLPNIDDDNITTALNPERIYKLVSGSGRQAFYVPFNIANPIIPTTELGSNNKSERAWTGEMIKEFCVPLIINRLGEIKIK

SEQ ID NO: 3095 - protein, 1395 aa, unidentified
  REGION 1..1395: note = Description of Unknown: Cas Enzyme sequence
MKKILGLDFGTTSIGWALVNEKENDDEKSSIIRLGVRVNPLTVDEKTNFEKGKSITTNADRRMKRSMHRNLQRYKLRRNNLIECLKEHGIITDETPLFEHGNQSTFTTYRARAKAVEEEISLEDFARVLLMINKKRGYKSNRKIKDTEEGELVDGMEIAKRLYEENLTPGQLLLDLLQKGKKNKPTFYRSDLQAEFDKIWEVQSAYYSEVLTDDFKKQISRFNKTQTSGAFYAFYKIATAKNSGKEGYGQALLWRVAALTKKLDIEEVAYVLCDINGAINNSSKRLAMISDRSKELYFSHQTVGQYLMQSIEQNPNASLKNIIFYRQDYMDEFETIWEKQAQFHSELTPELKKEIRDIVIFYQRDLKSCKNLVNYCEFERAEREVVVDGKEKTIVTGFKVCPKSSPLFQDFKIWQILNNLQVSVTGHQRKRIKKDESQLSLFADTEGEPLQRFLDQEEKDILFKELSVREKMTKKEILKLLFDNPQKLDLNYKEVEGNRTMATLFKAYQEIISLTGNGEYDFSKMPADKVLTVTSEIFTGLGYKADFLVFNPLLEGKEMEKQPAYRLWHLLYSYTGDNSTTGNEALLMRILDICGFEREYATILANVAMPLDYGSLSAKAIRKILPFMMKGYEYSKACEMAGYKHSARSLTKEELDNKEYKSRLDGLKRNSLRNPVVEKILNQMINVVNEISATYGKPDEIRIELARDLKKSQEERELLDQAIRKNTTEGEKLRKELEEEFGIQHVTKNDILRYKLYNELKMNGYKTLYSNTYIPREELFSKRFDIEHIIPKARLFDDSFSNKTLEVRDINIEKGDMTAYDYVANRYDEKGLADYESRVEELYVQKVISKTKRNNLLMKEADIPSDFLQRDLRDSQFIARKAREILEDMVPFVVTTTGSVTSRLREDWQLVHLMQELNWEKYDALGLTESYTDKNGNIVRRIRDWTKRNDHRHHAMDALTIAFTKRSIVQYLSNLNARSDKSSSIYGIEQKELNRDNKEHKLVFNAPMPLNEFRAEARKHLESILVSIKAKNKVVTKNINRAKKKDGHQQKIQLTPRGALHNETVYGRITNFEAEYKKVDGKFTEETILRVSNQRYREALLKRLAAFDNDSKKAFTGKNSLEKNPIWLNADHSYCVPLKIKLYKKVDVFTIKKVVDKDLKIDKVIDNKVREILQQRLDEYGGDAAKAFSNLDDNPIWLNKEKGIAIKRVKIRGIANGEPVRYKRNVKGEIIQDEKGNPVPNDYVNTANNHHVAVFRDSEGKLQEHVVSFYEATTRAIMGYPIVDKEYKRSDGWQFLFSMKQNEYFVFPNEKTGFNPQEMDLLDADNYAIISPNLYRVQKFTDGDYFFRHHLETSVENENSLKGVTWKRITSVHNLSGIIKVRVNHIGRIVSVGEY

SEQ ID NO: 3096 - protein, 1248 aa, unidentified
  REGION 1..1248: note = Description of Unknown: Cas Enzyme sequence
MKNILGLDLGTTSIGWALIKTDDKNNPHEILRMGVRRVPLAENEDNKFVKGQSITTNADRTTARGIRRNNDRYKLRRQALSKELSLLGMAPSDALMKLHLLELWQLRAKAVTDEVSLTELGRILYLLNKKRGYKHSSIDEDKSKRDFVKKVNGRYAELHQTNMTIGQYVAWKISETAITKEGKTYYVYRVKDRVFPRRAYEEEFDAIMQCQQMYHPDVLTNEVIDRIRNNIIFYQRDLRSCKHLVSVCDFEKRHFYDKDGKLKRNKKDEIIYDGPKVAPRTSPLFQMYKIWQSANNIRFHNRNKEYLDITREQRREIALYMDNNEIIKLEDVKRILELNDDSRWYCDNAIKNGIKGNTTKHAIVTALSSLSQDKIAEITRFNLEMEPTEMVDAETGEVLVRIKKTYQREPLYRLWHIVYSIKKDEERKSAVAKFLQSFGIDNKEMVQRLSDIDFRTPGYGNISAKAICKILPYMTEGIEYSEACEYVGINHSNSLSKEDNEKRELMSEIPILKKNSLRQPTVEKILNQTINVFNGINAELRKKGERIDEVRVELARELKQSKEERHKTSEEMKALDDKNNEYKKILEKEYHLNATRKNLLRYRLWIESNMSCFYCGQPIGFTPFANEPEEEREHILPKSLHYDDSFANQVCSCRKCNSEKGGRTALDYMRTTSHLQDYLDRVNQLHQAHKISGKKYTHLLTSYDDYMERKKNGKETKEDIQIWENPIDRQLRLSQYISRKAMEILSYACRDVVATSGTVTAIIRHAWGYDTLLEELNMPIYRDANLTEFVEIESKGQKLEKEVVKNWTKRLDNRHHAIDALVVACTSRSFIQKINTLHASKQEMRSEIASARKKWDENNILIQWLHEKNPFNRQDVLQHVSSIFVSMKAGKKVTVPGKRKEFKHGKPEIKQEGLRIPRGPLHEEGLYGSIMVNGKREIVIRYKLGKGAIGYLFRGKEKCEVKKNKTGEYILKDGIGDVLDSIVDKHIRSLVEVRLNRKFPKGETYRSKAEKAKKEGRKYDGEKRCKTALEQFKGLDKDPIYFDDDKTRVVKYVRCKTGLNAVRPLRYNDNNEPITYALPKNNHHVAIYRDKQGNAVESVCTFWEAVERNNHHIPSIIRNPGQVWDDIQRRETNGEELPAVLKKNLPKSDWTFVESMQQNEMFVLDMDRETLEQHIATGNYSAISPHLYRVQSLSDGDYMFRLHTDPKSERTLDANTSRRFIRLKFKKFIESEHHKVDISILGKISIAP

SEQ ID NO: 3097 - protein, 1151 aa, unidentified
  REGION 1..1151: note = Description of Unknown: Cas Enzyme sequence
SSKAAERTGYRSARRRIFRRRLRKIETLKVLVDLGWCPYLSVEQLSDWRYRNIYPKIDEFMLWQRTNDNEQKNPYYYRHLALTQKLDLSKKEDKYILGRVMYHLSQRRGFLSNRKENTKESNGKVKDDISALNKALEESGCKYIGEYFYTIYGKERIRAHYTSRQHYKDEFDAICKIQGISDSIKKQLERAIFFQRPLKSQKGSVGHCKFETKKTRCPVSHPRFEEFRMWSFLNNIKVKTPYEEDMRPLNGEEIIKILPLFFRKSKKQFPFEDIAKALSARGQYAFYKDPDEKPYRFNYKMFTSVSGCPVIAGLKEIFGDNWEEGIISRYTDKKQKTKEQIVNDVWHSLFFFSDDEKLRAWAKEKLQLSEEEALKFSKISIGNDYSSLSLNAINKILVFLRRGFKYSHAVFLANISSIVPKEIISNPENRKIIEREIGVIVDNPSPTKETIEQRIKEFLMDNFDLGAAHYERLYHPSMIDVYAKSNTGFLGSPRTNSFKNPMAMRALFRLRALVNDLIKNGEIDKDTKIHIEYSRSLNDANRRKALERYQRDREKKNNEFREEIIKHFREHGIDAQPTLTDIEKYRLWEEQGHICIYTGERIALSQFLGSNPQYDIEHTIPRSLGGEDALENKTLCNNKFNRDVKKNKIPSQLSNYQEILIRLEPVKERIEELRKQIEKLKGGSAATKEVRDAIIQKRRLLEYERNYLSDKYGKFLMKEVPSDYRKNQDVDNSIISKYARPYLRTIFTHIYTVKGLTTSQFRKMWGLQEDEKKDRSTFLNHTVDAIVIACIGPKEYSEMAHYYKADEEFRWFGKNRPTMPKPWATFTEDVQNISKEVLVSHYTPDNLKKRTYKLLRKRGEIQKGPDGKPLMTKGDTARGALHLETFYGAIQRDDEIKYVVRKPLSSLEKTDITKIVDDVVRQKVEQAIEEKGFKEAMAGTIWMNEQKGIQIKKVRIFTPSVTNPIHLKDLRDKSRFEYKQQLNVANDRNYCMGIYEGTDKKGKVKRSFKLVNNLNAVGAVNEGVSSNMVPVEDSNGFKLRYVLKIGTMVLLYENTPDEIYEANQEELTRRLYKVMGLSYTVISGIYEYGLATFLYNQESRPSKELTGKKGVFKQGEEIRPVVIMNHNQLNALVEGYDFTLSPSGKIHFIRR

SEQ ID NO: 3098 - protein, 1176 aa, unidentified
  REGION 1..1176: note = Description of Unknown: Cas Enzyme sequence
GFRGRDEEEAKTIMEGSKDSGTVGVDAIVPYLQKHVTLGAALYFLQKETGERIRKRYNLRSDYEQELKTICQHQHMTDELYKTFWKAIIWQRPLRSQKGLVGVCTFESNKTRCPISHPLYEEYRTWIAITNLKIKFDEDVSPEQLLTEKVYPLFYNASRDFKLISVAKALRKINGRITSRTGSDEDQGKEKYKLENTKLVSATLLYQFEFLLGPDWKEKYGWCEALHNQPKTCPYTIEDIWHVLFTFDDREKLKAFAKEKLQLEEEAAEKFSKTKLTQGYATLSLSAIKKILPYLRQGFLYSRAIYLANVHKVLGKQHITKGEADAIGASLEKIFHQSDNEKKLTATVNELINDRLNGGLRFGMDAAYQLDEDDKKDIYSKLEDTFGAKTWTKKSDDEKREGYDFVARHYLSFLQKPIQYSKQPLFLKSIRQHDRIFQHLQETYGVPEKNKKYLWHPSEQEIYRRGKQINGIPQLGSPIPISNGFKNPMALKTLHKLKRLINFLLVTGKIDEDTRIVVEIARELNDANKRKAIEKWQRDREKENDEYKARIKEIADEYYPGLDINKNVIDKYRLWLEQNKTCLYTGEIINCKDLFDGSKYDFEHTIPASMSFDNELKNLTIANGIYNKQVKGKKLPTELPNYTGDVPGYTAITPRLEFMEEKVAVLRTMLDEWSNKTKFASDKNIKDACIQRRHLISFELEYWSHKLHTLTMKEYKAGWRNSQLRDTQVVTKFALPYLKTVFQKVDVEKGSVVADFRNIYGIYPRRSKKDRDKHSHHAIDAAVLTLIPPAAIRDKILLKYNNAIDEDINATFHEPVRNWNSFHPGMIISIEDDVLINFQSQQRTLTPTYKNVRKRGHQQYLREKAANGQWKYKIDENGQQIKLTAKGDSIRGQLHKESMFGMIHRNGEKWLVERYSISSFTSINDCRHIVDDAVRDIVQKELEARMAQGDSFDKAKFLPISFPNGKAEIKKVRCRVAAGRGYLSPEKALEVSRRDSPSKHPYKQVVYAQNEENTLCLYYEGTLDGKIERGFRIIGLYDLAQLKMKSIRDIEKEKYYKTLETGKGKNKVEIPLEHVIYAGMKVILLDKGKEELKGLLPQDLFGRLYRVYKFNEKPSASIYLQNHIEARNNDKLGDGDSHIDLSKYQARIVLVASKFNCAMEGKDFCIDIDGQIRYNF

SEQ ID NO: 3099 - protein, 319 aa, unidentified
  REGION 1..319: note = Description of Unknown: Cas Enzyme sequence
MKRILGLDLGTNSIGWALVNEAENTDEKSSIVKLGVRVNPLTVDEQKNFEIGKSIPTNAARTLKRNARRNLQRYKLRRDYLIKCLREYGWIDSDTMLYEWGNHTTFETYRLRAKAVTEEISLEELGRVLLMINKKRGYKSCRKVKSSDEGQLIDSMEIAMDLYHNDMTPGEYVYSLLSKGKKYVPAFYRSDLLNEFDRIWNCQSVYYPDILTPQFKELVRGKNAQGTSKLFKQQYNLFTADNKEKDKRLQAYRRRTDALKKRLDIEDVAAALCDVNKDVNASSGYLGAISDRSKKLFFNKQTVGQFLMSKLDKDSHFSV

SEQ ID NO: 3100 - protein, 1016 aa, unidentified
  REGION 1..1016: note = Description of Unknown: Cas Enzyme sequence
MLRDVIIFYQRPLKSQKELVACCELEKHCIEVIKDGKTRSIEIGAKVCPKSSPLFQEFKIWHVLNNLKVKDKTTGDERFLELDEKETLFSELTIKSKLSKTEALKLLYQKPKGLDLNYDSIEGNVTQATLFTAFQTIIAMTGHGEYVFSKMPSSEVMSIVEGVFEGLGFNTSVLHFDSGLEGKALEKQDAYRLWHLLYSYEGDNSVTGTDGLVSKIANLLHCEKEYAKVLSGITFQPDYGNLSAKAIRRILPHMRAGNEYSLSCEYAGYKHSRRSLTKEELEQKIFKNHLELLPRNSLRNPVVEKILNQMINVVNAVINEYGKPDEIRIEMARELKKSAKEREEMTAAINKATSEHERIKEILNKEFGIQHVSRNDIVRYKLYCELKNNGYKTLYSDTYIPREKLFSKEVDIEHILPQARLFDDSFSNKTLEYRSINIEKSNQTAWDYVVTKQGENGAAQYKKRVDKLLIIGAISKSKHDKLLMKQEDIPKDFINRDLRDTQYIARKAREILEDIVPMVVSTTGSVTDRLREDWQLVDVMQELNWNKYAQQGLTEEWNDKDGRKIRRIKEWTKRNDHRHHAMDALTIAFTKHSFIQYLNNLNARSDKSGSIYAIEQKELYRDSHGKLRFVMPFEEFRNEAKRQLENILVSIKAKNKVVTRNVNKARRGSGHQAKVQLTPRGQLHNETIYGSIHRYVTKLEKVGGNFNSEQIAKVANLRYREALQARLEAFGGDAKKAFTGKNALDKNPLYLKNTRTEVPLKVKTVVTETLYTIRKAVAPDLNVDKVIDAKVRKVLEKRLQEYGGDPKKAFVNLDENPIYLNKVKGITIKRVAITGVSNAIALHDKKNVGGHIMLDASGRKQPVDFVNTGNNHHVAIYRDTEGNLQEVVVSFYEAVARTSLGLPVIDREYRKEDGWQFLFTMKQNEYFVFPNPVTGFNPEEIDLTDESNYALISPNLFRVQKFTIKDYFFRHHLETTVEDRKDLKDMTWKRCGLGGIVGIVKVRVNHIGRIVSVGEY

SEQ ID NO: 3101 - protein, 1400 aa, unidentified
  REGION 1..1400: note = Description of Unknown: Cas Enzyme sequence
MFNFNLSVKIYRSIVCSFVVISFLTRLNFAMKRILGLDLGTNSIGWALVKEAENTDEKSSIVRLGVRVNPLTVDEQKNFELGKSIPTNAARTLKRSARRNLQRYKLRRDYLIKCLKEYGWITSDTMLYEWGNHTTFETYRLRAKAVIEKISLEELGRVLLMINKKRGYKSSRKAKSSDEGQLIDSMDIAMDLYHNDMTPGEYVYSSLSKGGKYVPAFYRSDLLAEFDRIWNYQSVYYPEILTPQFKELVRGKTSQGTSKLFKQQYNLFTADNKEKDKRLQAYHRRADALKKRLDIEDVAAALCDVNKDINASSGYLGAISDRSKKLFFNKQTVGQFLMSELDKDSHFSVKNKVFYRQDYLNEFEAIWERQALYHPELTKDRKKTLRDVIIFYQRPLKSQKGLVACCELEKRCIEVIKDGKTRSIEIGAKVCPKSSPLFQEFKIWQILNNLKVKDKATGDERFLELDEKEILFSELTIKSKLSKSEALKLLYQKPKGLDLNYDSIEGNETQATLFTAFQTIIAMTGHGEYVFSKMPSSEVMSIVEGVFEGLGFNTSVLHFDSGLEGKAFEKQDAYRLWHLLYSYEGDNSVTGTDGLVSKIANLLHCEKEYAKVLSAITFQPDYGSLSAKAIRRILPHMRAGNEYSLSCEYAGYKHSRRSLTKEELEQKVFKNQLELLPRNSLRNPVVEKILNQMINVVNAIINEYGKPDEIRIEMARELKKSAKEREEMTAAINKATSEHERIKEILNKEFGIQHVSRNDIVRYKLYCELKNNGYKTLYSDTYIPREKLFSKEVDIEHILPQARLFDDSFSNKTLEYRSINIEKSNQTAWDYVVTKWGEDGAAQYKKRVDELLIAGAISKSKHDKLLMKQEDIPTDFINRDLRDTQYIARKAREILEDIVPMVVSTTGAVTDRLREDWQLVDVMQELNWDKYAQQGLTEEWNDKDGRKIRRIKEWTKRNDHRHHAMDALTIAFTKHSFIQYLNNLNARSDKSGSIYAIEQKELCRDSHGKLHFVMPFEGFRSEAKRQLENILVSIKAKNKVVTRNVNKARRGSGNQAKVQLTPRGQLHNETIYGSIYRYVTKLEKVGGNFNSEQIAKVANHRYREALQARLEAFGGDAKKAFTGKNALDKNPLYLKDTQTEVPLKVKTVATETLYTIRKAVAPDLNVDKVIDAKVRKVLEERLQEYGGDPKKAFVNLDENPIYLNKAKGITIKRVAITGVNNAIALHDKKNVGGHIVLDASGRKQPVDFVNTGNNHHVAIYRDVEGNLQEVVVSFYEAVARVSLGLPVIDREYRKEDGWQFLFTMKQNEYFVFPNPVTGFNPEEIDLTDESNYALISPNLFRVQKLASKYYVFRHHLETTVEDVASLRDITWKRIQATNYLNNIIKVRVNHIGRIVSVGEY

SEQ ID NO: 3102 - protein, 1560 aa, unidentified
  REGION 1..1560: note = Description of Unknown: Cas Enzyme sequence
MCKKQYILGLDLGTSSLGWAVIVREGDSARSILNTGSSVFPSGKTMVGSKERSNNEERRNSRQARRQLARRRLRKQHLLRLLIEKDMCPLTQKELDGWVKWDKSKPSAERRRFPESPRFREWLALDPYRLRAEAVDTPLEDDPNGGFTAREKLGRILYSIIQHRGFLSSRSGKEDGSIYTSTMEKDGKVGIDETRAALGDRTLGQYLYSIAPKEGDPFSDQAERVRSRYTLREMYVEEFDRIWTRQAPLLGLDREQVETVHYRYFTGKSDSYEARRRLERYQAKDPSAVIETLSGDEHRFVYKTTTSLKEHLAGKIWYDKDGTIRFVSKESTLFWQRPLRSQKSMLDKCSLESHKVKDRGTNRFITQGPTVVSASHPYYELYRVLQTLLNMRIRDRKLDLMMLQSMLDKLLTYGKNTKVSKLKKDLRLTVELNFADDYELPGCPTISGITKLLDSKKMPSRKGDASPSDRLVIPFDLNLYTRIWEKLFFYDDNHLLAQGLRGIEGAAFVEALEDKLAKLHLSEDYGNLSLHALRNILPYLLRGEELYSAVLLGGIRNAVRDDALVDDHDDALRSWIHTQGPLARGEMIDRIVTLLQDPYGPFHLSTPELKLRQRLYHPSQGTAKHRLMDQLPPVENLRNPMVEQALWAMRRLVNYLLNNYRSTIRPDFTFDEIHVELARDLKLSTQKRVEMRKHQKKAEENNDMARDYLRSQGLSTSRENLQKYKLYMELAGRSMGVVTCPYTGKVIRGLSAALDGNSMFQIEHIVPRTMTYDDSFANKTLCDADFNRKKGNLTPWQFYQRDPSPKLWGADSWEEVEHRAFRLLPYRKATRFVSKTIEDQLSGDQLVDTAYISRKAKEYLSYICPQDHIRLYPGRVTARLRQLWGLNSILSQGPSITKGQLPAELSLSGDQIPAIVIGKKKSGVLSRILPKYTSRPEREVSDAVLLVRVQKGKLYSARYSELPLSWDKAASLADGTYYFVLRRSEVVRVERMFADEPRLTEDQLRARVTIELNRDGQPKLSSREVDVRILKDIPLPTAPGNYWLTIPLVSVPEVTPERPRAKVAPDTIKVTGSVEQGVFVSKVYRQGGVAMEDGLAQVILTPDLSEVSFTKIKLDAPVITSGEVVLTGAIDRRDLFVCDQDDELRVQIDSFDEPGKYYAVFSFDPMASYILSYDQTPKLSSDEVVLEGDLIYNDKDDRVHFSPAKNRDDHRHHALDAIVIACTGQRVLTAMSTYNAHADNYERGTGTRPTFASPWEGFRDDVRESIKAVLVKHKQSTKILNKVTKQITKDGRTHRSKGLAVRGKLHDQTFYGLRQSPQESVSSLHKREKIQSIDTPSALSRVADVTIRDLMLSRLQDIGIDTTKKEYSMPKGSHAFVDEEGNYTIHLPNKRKGGAPIPVKKVRLCERVSSPIQIAEYNKWVKPENNEHLLVYINNDNEIKYLCVSFFEEVNKKTRGVDGWKYPADLREVLLVLRINDMILWGLNATEARTVLQRGDYKEVSKYLYRVNAISGGEFELRHHSDARTDKNSRIRITPAALKKRGLPLKVELSIMGELSVVRR

SEQ ID NO: 3103 - protein, 1214 aa, unidentified
  REGION 1..1214: note = Description of Unknown: Cas Enzyme sequence
MTKKRILGLDTGTNSLGWAVVDQEESGQYTLIDKGVVIFQEGVKMEQNGTDSSKAADRTKYRALRRQYFRRRLRKIEVLRALMKYNLCPALTEEDLRLWKLRKIYPKKDEFMLWQRTNDNDDINPYHCRHLCLNEVLNLDRQQDRYTLGRAFYHMAQRRGFLSNRLDATEEDENGAVKSSIANLNKEIEENGCKYLGEYFYKLYKEKGNTVRIRTRYTDREQHYKKEFFAICEKQNLPKEMVEELTRALYFQRPLKSQRQNVGNCTFEKGKPRCSDSHPMYEEFRMLSLLNNVRIQGPWDDELRPLNEEELNKIEPLFYRKSKPNFDFEDIAKKIAGKGKYQWKGDAKTDLPYKFNYRMSQGVPGCPTIAQLKEVFGGDWKEGIAETYTLNTKKDGTQKSVDEMVSDIWNVLFFFDSKDKVKEFGLKHLQLDEEQAEKFSKIRLSRNYASLSLKAIRNILPFLQMGMLYSDAVFFAKVPAIVGQSLWQERQSEIQEDLTYTIHMAMKEKRRIDKTVKDYLQDNFDLKPGAAELLYHPSMIETYPDAKPNKDGVVLLGSPRTNAVKNPMAMRSLHEVRKVVNTLIKEGKIGPDTEVHIEYARALNNANMRAAINDLQREKDKKHKEYAEEIRKLYKEATGKDIEPTDTDILKFQLWEEQKHICLYTGEEIGIADFIGAGPSYDIEHTIPRSVGGDSTQMNMTLCSTHYNRFVKKAKLPTDLAEHEFIMTRIEPWKEHIEELRKQVDRDKKGNEWDKAARDTRIRRRNRHIEELKYWEGKYNRFTMTKVPEGFALRQGAGIGMISKYAALYLKSYFHDALHPERRQVYSVKGTLTSEFRQMWGIQKKDEKKSRDNHTHHCIDAIVIACIGKNEFNQMGQYYYLLEKLEREEGQKPEFPKPWPTFTQDLKQIAEELLVVHDTPDNMPKKASRKMEVNGRKVVAKGDCARGSLHNDMYYGAIERNGQIKYVIRKELRTIKENDIENIVDDVVKEKVKRAIAEKGFKKAMEEDIYMNKDKGIKIKKVRCITPSVTNPLHIRTHRDKSRKEYKQQFHVTPDGNYCMAIYEGEVKGKTKRTYEIVNMIDAASYFKKSTNLMKQGSIVPESKNGLKYRCIVRTGTQILLLQSDDEKINLADKEKIARRFYHVAVIRSDGRIVLRYNQDARKATTLKKERKSGAYKVGEQYRSEIMLSLSDFHALVEGVDFMITPLGEIKLKH

SEQ ID NO: 3104 - protein, 1104 aa, unidentified
  REGION 1..1104: note = Description of Unknown: Cas Enzyme sequence
MFSYRMGLDIGTNSIGWSVLELKAGKPCAARDAGVRIFSDGRVDQSKATLKADRRAARSARRCHDHYKQRRAFLLDELTKAGLFPESPEERHKLQTRDPLKLRANALTEKLEPHEIGRALFHLNQRRGFKSNRKDRSKETTSGIVSNSVTALLRAMGLMEEGYSAEAFKDLSKEAKKAAREKEQRQKKGALEKLGQQNALTFGLFLWQRRDKGEPTRARQNSDGKLYDLYPTRDMLEHEFDAIWTAQARYHPELLTDQKRERIRTVIFTQRHLKPQKVGKCTYLPNEDRTFQAMPSFQRYRIYQEVNNLEWTTSRGKNRLIAYPEARDAIVDMLEHPTNKKGDVTFNKMKKVLKSRRLAEGDFQFNFETLKRKGLDGNHTSNLMQDESRVGPEWHDWPLEKQDKFVSVIMNDELDDQNVHDDLMRNYGLSDAAATACVEAPLKDGTASLSSKAARLLLAKMRDDKLVQTDAVQTVAKEETDFVNPFKRAGAGTLLDRLPYYGMAVQGHIIPGKGDEKDEQARIGMVANPTVHIALNQIRHVVNELIARYGHPASIAIELGRELPAGQEGRAKINKEQKANQDNNERLDKILHEQVQASTPDNRLRLRLWEELDGDPNGRCCPFSGQKIGIADLFNGQAEIEHLIPFSKSLDDSRANKVICTRQANRDKGNQTPYQAFGFSPDGYNWDKIFERRTKLPQSKQWRFQKDALEIWYRKHADFTERHLNDTRYIGRLAREYLENICPFNKIDVLTGRLTALLRGHWGLNSVLGDHNQTQGTKKNRNDHRHHAVDAIVIGMTSRSMLQKVAAAANRVEKLHLGRLFERSANGKNPIDPWSGFRNHVKEIVNKIVVSHKPKRKTLGKNTTDGQLHNDTAYGIISGPDNQGCYRVVVRCPIKEFEKRSDVEAIRDKHLQHEFLQAFDAEGTAGVARLARDKKIRRLRRTETLSVIPIRDKFGRTYKAYKGDSNWGMEIYEYPKGHEKAGKWRGEVISRYEANQEGFRTGQTQKPHPAARLVMRVQKEDCVEIEQDGIKQIMLVHKLSKPGRLDLAPHNEANVAARHRDKNDPFKYLNIPASGLKSSNARKVHISPAGRLSYENRRNPRRKQ

SEQ ID NO: 3105 - protein, 1209 aa, unidentified
  REGION 1..1209: note = Description of Unknown: Cas Enzyme sequence
MKRILGVDTGTNSLGWAVVDKVDDKTYSLVRKGSLIFQEGVKVEKGIESSKAAERTSHRALRKQYFRRRLRKIEVLKTLVEFDWCPYLSPEALHLWHVKKQYPMSETFIAWQRTNDNTEDNPYYYRHLCLHEKLDMSNQANRYMLGRAMYHLAQRRGFLSNRLEQGNDDETGKVKEAISSLSQSMQEAGCEYLGDYFYRIYKEKGNTERIRTRYTDREEHYKKEFYAICECQELTEEQISKLERALYFQRPLKSQRQGVGKCTFESKKPRVSDSHPAYEMFRMLSFVNNIKVKGPQDVELRPLSAEEYEKAKPMFFRKSKPQFDFEDIAKAIAGKGKYQHIRDAGDKGYKFNYRMSQSVTGCPTIASLMSVFGDDYMSAIAERYTLSEGKTPEQMVNDVWNVLYSFKDKENVKQWGREKLQLDDDEAEKFSKIRLTHSFASLSLAAVNKILPWLERGLIYSHAVLMAKVPDIVGRDVWENRSEEITKELLSLIYNFNPKDISMQGTLDFCIKDVLKDMCELKPGATEVLYHPSMIDTYPDAKKNEQGVYQLGSPRTNAVRNPMAMRSLHQLRKVINALLKDGTINSDTEVHIEYARELNDANRRKAIAQWNKDRETKRKKYAEDIRTLYKEETGREIEPTEDDILKFQLWEEQGRICLYTGNQIGIAEFVGANPSYDIEHTIPRSVGGDSTLENMTLCSCKFNRDVKKAKLPTQLFNHDEIMTRLDEWREKIEKLRKDVDHVKTHSGMDKAVKDRLIQKRHLLKLELDYWVGKYKRFQMEEVPEGFARRQGAGIGLVGKYAGLYLKSLFHKTDDRSKSNVRVVKGATTAEYRKMWGIQDEYEKKSRDNHVHHCIDAITIACIDPGEYNATAKYYQQLEEYERNNANKPTFPKPWPTFTEDIKSIQQEMLVVHSTPDNMPKRARKYVRTANGKKLAQGDSARGSLHNDTYYGAIERDGEIRYVVRKELRSIKENDVENIVDETVKEKVKQAIAEKGFKKAMEEDIFMNEAKGIKIKKVRCFTPSVTNPLHIRSHRDMSLREYKRQYHVTLDGNYCMAIYEDEVKGKMKRTYEIVNMIDAANYFKDSSGLTKNYPIAPETKNGLKYRCSVRTGTQIILLQSDDEEINLNDLEDIARRFYYVAVMCSDGRIVLRYSQDARDATSLKKERKSGAYKVGEQYRSEIMLSLSNFHALVEGVDFKIDALGEIKRLK

SEQ ID NO: 3106 - protein, 1209 aa, unidentified
  REGION 1..1209: note = Description of Unknown: Cas Enzyme sequence
MKRILGLDTGTNSLGWAVVDRFDDGKYNLVRRGTLIFQEGVKIEKGIESSKAAERTEYRSSRRHYFRRRLRKIETLKVLIKYRLCPALTEEELKLWHLKKKYPMNEAFLQWQRTNDNTDVNPYHCRHIFLHEKLNLEKESDRFILGRAFYHLAQRRGFLSNRLDQTKENDDGMVKTSISQLGKDMQEAGCEYLGDYFYKLYQEKSNTIRIRKNYTSRKDHYIKEFNAICDCQNLPDDMRKALYDALYFQRPLKSQRYSVGKCTFEKNKPRCAVSHPLYEEFRKLSFINNIRVRVDFFGKGEERPLNEEEIKKIDKLFYRKSKNFDFEDIAKAIAGKDNYQWLKAEGDKQYKFNYRMDQGVSGCPTQTELKDLFGDDWMNGIAERYTCNKHQDGTPKTQEEMATDIWNVLFSFDDDGKVKEFGRKKLQMSEEEAEKFANIKLQQGYASLSLKAIHKILPFLRQGDIYTYAVFLAKVPDIVGHGIWERDKDEIIADLKYNIDLAIKEHRRIDEAVRGYLENNFELRPGILDDLYHPSINDVYEDAKPNKDGILQLGSPKTNAVRNPMAMRSLHQVRKVVNQLLLEGVIDRNTEVHIEYARDLNDANMRQAISSYQGDQKNEHNKAAKEIRKLYNEETGMDIEPTDDDILKFQLWNEQEHKCIYTGATIGIADFVGADSKFDIEHTIPQSVGGDSTRMNLTLCDAKFNREVKKAQLPSQLSDYDNIMEHIKPWKDKIEDLTRQIKKIRTYSGMDKREKDSKIQKRNRLKIELDYWKGKYERFTMKDVPEGFARRQGAGIGLISKYAGLYLRSLFHDPANPDKRQIYIVKGPMTAEFRKMWGVQEEYEKKSRDNHAHHCIDAIVIACIGKAEYDRLAFYYTQVEKGVKPEFEKPWNTFTQDVKKIADELLVVHDTPDNMPKHTRKRVRISGRGIKMAQGDSARGKLHEETYYGAIKKDDEINYVSRRSLEKLKETDVDNIVDDVVRQKIKDAVSSKGFKEAIKGPIFMNEEKGILIKKVRCYAKMVKNPLIIRQQRDVSAKDYKQQFYVTTDTNYCMAIYEGMLNGKLKRSYEIVDMIEASKYYKESNDTKNVYPIVPENRKELKYKCMVKTGTQVILLQNSEEKLDLDDEKSLSKRLYHVAGMFKDGRLVLRSNKEAREAGKLSKETQAGVYKESDDYRSQIRISLSDFHALIEGYDFKFTPLGDIKLINHA

SEQ ID NO: 3107 - protein, 1416 aa, unidentified
  REGION 1..1416: note = Description of Unknown: Cas Enzyme sequence
MKKILGLDLGTTSIGWALVNEQESEKEKSTIIKTGVRIIQMDNFVSTSSGKESKDPLKDFISGNGISPNAGRTLKRGARRSLQRYKLRRIELIKLLKANKLITDNSILAEEGNESTHSLWKLRAKAATEKISLKDFARILLAINKKRGYKSNRKAKGDENEGMAIDGMDVANIMYEKQITPGQYAYDLLNQDKKHIPEFYRSDLQDEFNKVWEFQQQFYSDILTDKLKEELKDKKKTQSWAICQKPFNIDGKIQKGTSKEKKEEQYKWRVEGLSEKLDLEHLAIVLQEINNQLSNSSGYLGEISDRSKKLIIEKLTVGQYLYEQIKENSHTRLKNQVFYRQDYLNEFNKIWEIQVQFHSELTDELKKEISDVVIFYQRRLKSQKGLISICEFEGKEIELIDKEGKPVLNAKGEQKKKIVGPKVIPRSSPLFQEFKIWSILNNLKFTELKTKITHEVNTLDGDLEIRKKMFEVLSVKGRMSSTEILKAVFNKPKEWELANYQEIEGNNTNQILFKAYKSILELAGYEKVDFHDKNTVAEIFESLGIKKEILDFDAELEGKEFEQQLSYQLWHLLYSYEGDNSNTGNDKLYTHLKEKFGFEKEYANALVNVTFQDDYGSLSAKAIKNIIHYLKEGNDYSESCSLAGYNHSNSLTKEENEKRELKDILELLPKNSLRNPVVEKILNQMVNVINAIIKEYGKPDEIRIELARELKKSSKERAEATSGIAKATKINYGIREKLEGIYPFNSGVRITKNDILKYKLYQELEATGYKTIYTNTYVELGKLFSKEFDIEHIIPKAVLFDDSFSNKTLSVRDFNRFKSSKTGIDAIVEKYGKNSDDFNRYTSTIEKLYKDKKIGKAKYNKLLMKGSEIPDGFIERDLRNTQYISKKAKEMLQEVFRTVVPITGIVTSRLREEWQLINVLQELNWDKYDKLGLTKYETNKLNQKIPRITDWTKRNDYRHHAMDALTVAFTQHNHIQYYNFLNARRDESHKEYGKIVKIEKSIKETIKNKKGKDKTVMKPPMPIDEFRTEAKKHLENTLISFKAKNKVVTRNKNKIKGQNKPQETLTPRGQLHKETVYGKSQKYETKLEKVGAKFDIEKIKTVAKKTHREALLNRLSEFDNEPKKAFGGKNSLSKNSIYLDDDKTIELPEKVKIVRVVNQFTIRKDITHELKIEKVIDKGVQSVLQNRLNEFNGDAKKAFVNLEENPIWLNKEKGIQLKRVTITGVSNAEALHHKKDHFGNEILDENGNPIPTDYVSTGNNHHVAIYKDEKGNLQEEVVSFYEAVMRKNEGLEVVFKKHPDHPEWGFLFTMKQNEYFIFPNEETGFNPNEIDLMDVNNYTKISPNLFRVQKIQSKEYVFRHHLETVVQRKTSQGEKVNETDLRNLIWKRHKSMGALENDFPVKVRINHIGQITKIGE

SEQ ID NO: 3108 - protein, 902 aa, unidentified
  REGION 1..902: note = Description of Unknown: Cas Enzyme sequence
MAAFVKACQTIIVMSGHNEYDFAKLSYETVVSTINQIFNALGIKSGFLNFDPCLEGKAFEHQPAYQLWHLLYSYAGDNSATGNEKLITRIAETFGMEHNYAVVFAAITFMPDYGNLSAKAMRRILPYMMDGNEYSVACEYAGYRHSRRSLTKEELDKKPLVDTLPLLPRNSLRNPVVEKILNQMINVVNKLSAQYGKPDEIRIEMARELKKSAKEREQMTADITRATAQQEEYRRILQDEFGMPHVSRNDIIRYRLWLELKDNGYKTLYSQTYIPREKLFSKEFDVEHIIPQARLFDDSFSNKTLEARQANLEKSNATAFDYVQSKYGEEGAKEYKERIDYLYADGVISKTKHDKLLMKEADIPEGFINRDLRDSQYIARKAREILESMVRVVVPTTGAVTDRLRDDWQLVDIMKELNWDKYDKLGLTETFKDHDGRQIKRIKDWTKRNDHRHHAMDALTIAFTKHSFIQYLNNLNARSNKAGSIYAIEQTCLYRDAHGKLRFMPPMPLDVFRAEARRQLQDILVSTKAKNKVVTRNINSIKRRGEKKQTVQLTPRCQLHNETVYGSMRCCVVKEEKISSSFTEEKIATVASPRYREALLKRLGEYGGNAKKAFTGRNSLEKNPLYLNDDHTLSMPAKVKTVTYETIFTQRKPIDKDLKVDKVIDEHVKEILEARLKEFGGDAKKAFSNLDENPIWLNRERGIQIKRVTIRGVSNAVALHDKHDVQGKPMCDSEGRRMPSDYVSTSSNHHVAIFRDANGNLQEHVVSYFEATARAIQHLPIVDRDYNKDEGWQFLFTMKRNEYFVFPNEKTGFDPKEVDLLDPKNYAEISENLFRVQTMSKLQYGNSFVRDYKFRHHLETTLNDNKELRDITYKQFKSLNFADTIVKVRVNNIGQIVAVGEY

SEQ ID NO: 3109 - protein, 1245 aa, unidentified
  REGION 1..1245: note = Description of Unknown: Cas Enzyme sequence
MYFFWKYQIKVVLLHKISIIMKKRILGLDTGTNSLGWAVVDKLDDNSYQLVRRGVLLFQEGVKIEKGIESSKASERTAHRSLRKQYFRRRLRKIRVLEVLVKNNLCPYLSPESLHEWHVHKKYPKVDEFMLWQRTNDNEGKNPYYYRHLCLTEKLDMDCIGDRYVLGRAMYHLAQRRGFLSNRLDSSQDDKESGAVKTGITELSKEMEAAGYEYLGEYFYHLYAEQGNTVRIRTRYTDREQHYLKEFDAICEKQEIGSELKKELEKALYFQRPLKSQRHGVGKCTFEPHKPRCAESHPAYEEFRMLSFLNIIKVKGPYDVDLRPLSSEEKEKIEPLFYRKALVKSSHFDFEDIAKTIAGRNKYSHIKDADDKPYKFNFRMTQGVAGCPFTAQMRGIFGDDWKSAIAESYTLMQKQDGIKTIDEAVNDIWNVLYSFSSEEKLKEFAIDKLQLDEEKAEKFSKVKMNSGFAAISLNAINKILPFLREGYIYSHAVSLANIPAIVSKAVWNNAEQRSFILQNLNRLIENFDPKDKTLEGTLDFCIKDFLMNNFELAAGAADKLYHPSMIETYQDAKPNKQGVYQLGSPRVSAIRNPMAMRSLHELRKVVNQLLKEGVIDNTTEVHVEYARELNDANKRKAIADYQRALDNNRKKYQDEILQFYQEQGSAQQPTDDDILKFQLWEEQDHVCLYTGDQIGMADFLGKNPLYDIEHTVPRSVGGDSTKENLTLCQRRFNRETKKGQLPSQLANHEEILVRLAGWKEKVEKLSKDIDKIHTFSGMAKDMKDRLIQRRHRLIMERDYWRGKYNRFTMTEVPEGFSRRQGAGIGLVSKYAGLYLKSLFHNPKDRNKSNVFVVKGATTAEFRKMWGLQSDYEKKSRDNHVHHCIDAITIACIGKYDSNLMSRYYHDVEAFEAGVGKKPQFPKPWPTFTEDVLNIQNELLVVGDMPDNMPKKARRRIRLENPARVVVAQGDSARGSLHNDTYYGAIERDGDIRYVVRRPLSSFDKASDLESIVDEAVKQTIKDAVAGRNFKEAIAEGIWMNKQKGIRINKVRCYADSVKNPLKIRQQRDVSKKEYKQQFNVMNDSNYLMAIYEGEEKGRKKFAVEVINMLDAAKYYKKSADRDVYSSIVPIDKNGFPLKVCLRVGLHVLLYDESVEEIDFGNKRDLKSRLYKIVGLNAPSEAYPYGKIVLRHHQEARQSKELKAKNGVFKMGEDYRASIALLHTQFKGLVEGQDFDINVLGEIILK

SEQ ID NO: 3110 - protein, 1520 aa, unidentified
  REGION 1..1520: note = Description of Unknown: Cas Enzyme sequence
MRVLGLDLGTNSIGWAVVDEEAEQIIDTGVRIFPEGVQPKTIGMGDKEVSKNAARRGHRQTRRQFYRKRLRKIKLLEVLIEQEMCPLSEEELSKWKRWSVEDKSTGRQFPSSVAFMEWIRLNPYKLRARALTEKLTMMELGRVFYHLIQRRGFRSSRKGTDDPKILFEKGKPDENILSINESVAKMKGSTLGSYLNKVVPVDGAKYKPIVDDDTGKEIRVRGRYTTRNMYVEEFELVWDSQSRFLDLNERKVEKPKVRKYRGALTNKRNTKNLKYIRDKFGSENVKIEESKSGFGGKIMTLELMPLKKMLGGNIEWLVGEEGEKKIKFKSDESVLFWQRPLRSQKGLLGNCTFESEMPVIKKNGCIAIDGKGEVKTCSKKPCPISHPECELFRAYQFINNISYGTGIPLTEEQRNIVLGLIVSKDKSFDFKAIPKKLSLIYEKFNYEDTFKVSGCPTIRKLSSLFDKKVWDEKKNDIWQCFYFYEDSERLFEKIKKAFGFKKSLSDVEKFKLQEGYGNVSLKAIRNITSFLEAGYKYDRAVILGGVKNAFGGRWSLFESSHDEIVRDIIAILKEQNKDGEAIEKVKAYLCKPENKLGFSMDDPWFTHLYHHSQKIERKDELQSRLPLVENLRNPIVQQSLNEMRRLVNCLLDTYKGKYGANFVFDSVHVEMGRDLRNSKKRRQEMTFNNSVNRKKNEAARVRLAEYGLRPSRANMQKYLMYMEISDKAGQTQCPYTGKIINISSLLGRDNRIQVEHIIPYSVSLDDSFGNKTLCDAKFNGLKGNRTPYQFYQENRDKDLWGVDSWESVVRRAYRLLPYPKAKRFTAKKDFNGEDFISRQLNDSRYIAKKAAELLFEICEDVHVMPGQLTAELRHLWGLNNILHSIKSINCEKVNVASNSIDDYYVILDSENNVNSVHLKNNQRPSVPGDTLVVTGMVEKDKFKSKLLNLEQTRPDLAAGKYWAQVRVEETMTLIRKYIDMPQTDESQICFRGKVEKGKFVNESCGNMATDKQDGTYWSELNVLKKQFVKADSKVRPVAKRNQVLLFGAVKEGVFESYIYKCGCGENSGKYWLILTVDMAEAEFIKAVVEKPEVREGEFVLTTTVNKEGVLSTDIDPFFFRDGVSNEEGVYYAIIKLKDSEFELTKVAKDKPQLAAGEKLVEGCIWVDKNTNEVKLDLKKNREDHRHHAIDALVIALTKREYLQCLSTYNSQRKSADPRRVNSTDRFPLPWPCFFRDVQSVIDSILVSHRKSNKVLSKSRKGFSVRGQLHKENVFGERQAPQAHKAYHRRCKIMDLKNNKQISKVVDDAIRKLIERHLRDNCGVDTSAKKYDVPKDAFFKDGKPLLFLRNTKGGDPVPIKKVRIKEEFSNAKQLKSGLNQYVNPRNNHHALIYKDANGELKEVIVQFWNVVELSKAGEALYKLPEEGKEIVTVLEINDMFILGFTDEKFKECVKDNKQELLNEHLYRVQKTSSMYYTFRLHNASTILEEGAEWRIQSFPAWKTANPIKVLIDELGRIRRFE

SEQ ID NO: 3111 - protein, 1279 aa, unidentified
  REGION 1..1279: note = Description of Unknown: Cas Enzyme sequence
MKKIIYGLDLGVASIGWAVISIDDSGNYKIEGMGSRIIPYSDKEGDEFGKGVGESANQQRTKDRTARKGLDRYQLRRTLLTKVLKDHQLYPDADTFNLSATELYGLRSKVANEQITLKELGRLLMHLNQRRGYKHGAEDEGDAVEKKQRDWVETINNRYTLIKGKQTIGEFFFQELKEHVQQSKYYRIKEQIFPRDAYIEEFNKIWNTQQKFYPEKLTEELKLNIRDRIIYYQRPLKSQKGLVSVCEFEGFQIKYDDGIKDKEIFVGPKVAPRSSPLFQLAKIWESINTITIKRITSDGKKHPVLDIAPYKEKIFLHLNENVSLSEAELFQILNISKRDGYYSDQNVRKKGIQGNLTISALSKALNGYPNIDELLRFNLKTETANHLDKSTAELIPIEQISADCEKEPLYQLWHTCYSIKDKQEKIKALKKRFDLSDDYAQALSKIDFSAGNFGNKSAKAIRKILPNLMKGYVYSTAMELVGYNHSFSETKQDKENKELKDKLSLLPKNALRQPIVEKILNQMINVVNSINEQYGKPDEIRVELARELKQSKEERNDFFKAINQRTQQSEKISERLQTEYGIKANRKNIEKWRLWHEVDGRCLYCNKQITVEQFLKGIESDVEHIIPKAILFDDSFANKTISHIRCNSTKGNATAFDFMNAKGDDVLDNYLQTINSLFKSDRADKVKTDEGVFCLTGKISKSKFERLQWRKEDIPENFINRQLQETRYIARKAKQILNIVCKDVTSTSGNITEKLRKLWGWEDVLMNLTLPKFRKQGLTEEIVIGSNGQSQTKEIITGWSKRDDHRHHAIDALIVACTKQGFIQRLNTLNSEHTRNEILADIKGKEYSEKLSSLEKYLVGNRPFNTAQVQEVVSGILVSYKAGKKIATIGKRKIKRNGKKEVAQEGIIIPRGALSEQSVYGKIKTIAKDFKKNEIIKFPVKYLFENPHLIFKSKIKALVEERLNQFEGDGKKALASLKKDPIFLDKEKVIKLEWATCWEERYVIKYKLDQNFDKVERIIDPNIKFIIEERIRNGKNQKEAFKDLEKNPIWLNQEKGIPILSVRCFAALTNAEEVQTFDKPNNLLYLKYFKPGNNHHIAIYKDQNENLIESAANFWHCVERKSIFFKHFTREERDQIQENTIIKNPALVWDKIQSLPDDTFSQSFLEKLPKPNWELVTSLQRNEMFVIGMSHEELEDALKSNSYQLINHYLFRVQKLAASNYSLRLHTETKVDDKYNGTKNEMLSKTMGKLIIIQSIDAWKQRNPIKVRVNNLGKIVKFG

SEQ ID NO: 3112 - protein, 1207 aa, unidentified
  REGION 1..1207: note = Description of Unknown: Cas Enzyme sequence
MYTFIAKFSNKMTKKILGLDIGVSSVGLAVVEKTADKYKIIDMAVRVVPEDPNFHGKFYSGKTASKNEARTRYRQIRRGIQRFKLRRDALNRVLSQNNMMPDDTLIHLSAKELYGLRNKAISDKLSEKEIGRVFMHLNQRRGFLSSRKSNSEEENLTEYKERIKQLQNELGTKTIGQHLYDELCASNNGVDVLLRERTYLRASFVEEFDRIWDAQKKHHPALLSGGPQEDNNKGSLYDKIRNRILFYQRPLRSQKDLISSCTFEPNNRVAPKSSPYFEWFRIWQKLNDLEWKTPDGLRFKPSMEQKQALFNELFYNTSSDKAVLKITAIKNCLGFKKSDKIYLNFEELDGSRTYAMLRDALEQAEITDVHERLFFNPEVSDEQGGLMEWWHLTYSIPNEADLIRSLANRMHITKEQAKIITKKTAYKPDYGSLSTRAIKKLLPHLLNGLGYSEACDAVGYDHSGYKTKQELKEKLSLLMPNALRNPVVEQILNQMVNMVNLAIDEYGPFDEIRVELARELKNNAKKRNQIEKQQNSNKKKNEDITKELKNSYGFKVVSKKDIQRYTVWNETENQCLYCNNPISNTEFLNGLADIEHIIPRSRSFSDNINNFILAHRKCNRDKNQHTAYDFMEQKGENVLKEYIEKVNRLYDNGKGSISRLKFQNLLARGNEIPDDMVDRMKNDTQYISREAVKILKGICENVHTTTGQITDYLRMEWGLNDVLKELMIDTYRAANETEWKEIKDRSGNIIQKETIKNWTKRDDHRHHAVDALICALTDAKIIFKLNNLNKIYQYERDMLSPSEIKAMEDALSEETGEKTSFNLKQFISERSNTDAPIPNLREEAKKHLAGLFISFKKSSKVFSKNVNRPKKGLPQITWTPRSHLHEETVMRKVLTPGDKPVSLNKKFDIAWVDQIVNNKEREAVKQHLATFNNDPELAFDKKTLKQSPLEVNGKALEKVTLFEEVLSKRVPISTGITTAQMGKIADGQVKTLLEQRMNAYGNDPKKAFADISNNPIWLNRDKGIQIKSFRTLENAKAQKVREGYVQTKGNHHALIYCNNEGIYTDVVVSFWEAVNLGLTNIKEKGHPYPIIQREDHPEYGRLVFTMQINDLFVLDLKHSKNPKNDDEINFLDINNRELLSKKTFRLQKMSKKSNGAIDIVLRQQYETSINREIKEITLLNFQSISHFKRLTKIVVNALGQIRLDNTW

SEQ ID NO: 3113 - protein, 1040 aa, unidentified
  REGION 1..1040: note = Description of Unknown: Cas Enzyme sequence
MAKVLGLDIGSNSIGWCLVEDEVQEIVDTGVRIFQEGVAKQDEREEASRNAKRREARMMRRQIDRRRRRKRVVRNILIRYGLLPKNEGELVALMYRLSNPYALRSRALDEPLSAFELGRTLYHLNQRRGFKSNRKAQAEEEDSGTIYDGTKDGTKPGILVLREALQNGFRTIGEYFASLDTSTTRIRERLTERAMYEAEFDAIWTSQHRFHSDILTDEFRKELHRAIFYQRPLKSQKHRLGKCRFEPLKPKAPKSAPLSQRFRMLQSVNNLRIIGETRVDDDATMLTEEERNALIRHLTDVGDADFSKSTHVKDIFGFKKTDAYRFSLDKIKGLTTERAIRQAFGSDHYKRLSVEEIDKIWHALYYFEDQQKLIAHLREKWGLMLQGAEKLAKSRMEDGFMSVSTRFIRRVIPYLEQGLVYSDACVAAGYDHSSMNIVPGSRDRVNGIDTGTIRNPIVIRSMSETRKLVNAILAEYGKPDRIVLEVTRHLKKPLKERLEIEKRNKAENQLHEKLAEELYREAGVAKVRRDDIIKMKLWRQQGEVCVYTGRQIGIKQLIDGSTDVDHIIPYSRSLDDSQTNKVVCFRDANTEKGNRTPWETWGSDEGRWHEIKQRVAKLPTGKVKRLLADQEALEKLVGVDFIARQLNDTSYASRAIRDYLIEVCPDVLMSRGSLTSELRTLWGLNKVLHRQLGDETPLKNRDDHRHHAVDALVLALSSRSALQRLSTFNARAVRESGAKPRLDAPWPDLLEKAVRAIHGILVSHAMTQKVSGRFHEETIYGRARERFTGRPRRDERGDLFTVRKSLSSFTDTNMVYKIADDVIRGLAFKRLVEYGVDRADLEAGKKVKIPKGAFSTPLWIPSRHGEHDRAVKKVRIILTASKMFNLRGSEDNVQGAYVEPGNNYCYAIYKDERGKVNGIVITMFEAYRRRALGLPVVDPMAIPGAKLSSVFRENVMYVDASASEYETGKTDREWISSRLRRTKKITSGKITFIGHTLSRDKIEFADGATKELSYSKSPANALGQVVEIDVLGRVKNSDTK

SEQ ID NO: 3114 - protein, 1372 aa, unidentified
  REGION 1..1372: note = Description of Unknown: Cas Enzyme sequence
MKRILGLDLGTSSIGWALVNEAENRLDKSSIIKLSVRVNPLTVDEQKNFEQGKSITTNADRTLKRSMRRNLQRYKLRRQCLIDLLSTCGFITKETILSEQGNKTTFETYKLRAKAAIEEISLSEFARVLLMINKKRGYKSSRKANSNDEGQLIDGMEVAKQLYNRGITPGQYVLEQLNLGKKDVPEFYRSDLQAELNRIWEYQAHFYPEILTSEFKNEINNQGKINTQKLFLKKYQIYTAEIKDKDKRLQSYRWRSSALARKLTKEELAYVISDVNGVITNSSGYLGSISDRSKELYFNNQTVGQFQMQRLASDPHYSLRNQVFYRQDYLDEFERIWETQAKFHPELTSELKEEIRDVIIFYQRPLKSQKGLVSFCEFESKQIEVEVDGKKKKKTVGLRVTPKSSPLFQEYKIWQALNDLRVSDKPLELEEKELLFRELAIKEKLKDTEVLKLLYKNSKGLKLSHKEVEGNRTQAALYRAYQRIIALSGHGEYDFSKMNADEVYTLVHDVFGGLGFNTEILKFNSELPREEQEKHPMFRLWHLLYSFEGDESPTGNEKLIQKIMDLYGFGREYASILANVTFQPDYGSLSSKAMRKILPFMRAGNDYSTACVYAGYRHSKNSLTREELDAKVLKDKLEILPKNTLRNPVVEKILNQLVNVVNEIIDTYGKPDEIRIELARELKKNAKQREKLTQVINKATTDHEKYRAEIQQKFGFTRVSRNDIIRYKLYLELAPNGFHTLYSNTYIHEEELFSKKFDIEHIIPQSKLFDDSFSNKTLELRSVNIEKGDMTARDYLSGKYGESGYEEYLKRIAYLDREGSSAKYRKLKMKNDEIPNDFINRDLSDSQYIARKAKMMLEELVKEVVPTTGAITDRLREDWQLVDVMQELNWDKYNRLGLTEIFENRDGQQIRRIKDWTKRNDHRHHAMDALTIAFTKPEFIRYLNNMNAQSDESNDIHAIRRNELYRDKHDKWRFNPPIPLNEFRAEAKKQLENVLVSIKAKNKVVTQNVNRIKTKSGKKEKIQLTPRGQLHQETIYGSIQQYVTKDIKVGSTFNEAVIETVARKEYRDALLARLSAFDNDPKKAFTGKNSLEKCPLYLNDLHTCQVPLKVKTVTLETVYTIRKEINPDLNIEKVIDPKIKRILLERLSQYGGNAKQAFSNLSENPIWLNQAKGISIKRVTISGVSNAIALHDKHDVNGKIIYKDGKTQPVDFVSTGNNHHVAIYIDEKGCLQDNVVSFFDATERVSQGLPVVDKGYKQSEGWTFLFTMKQNEYFVFPNEETGFIPSEIDLMDSGNYALISPNLFRVQTMSKVEYGNAVVRDYKFRHHLETTVKDNKELKGITFKQYKSLDFVNSIVKVRVNHIGQIVQVGEY

SEQ ID NO: 3115 - protein, 1207 aa, unidentified
  REGION 1..1207: note = Description of Unknown: Cas Enzyme sequence
MKRLGLDLGTNSIGWAIVNYKNGTYDLLDRGVNIFKDGVEHGKNGELPMVQKRTEARAMRRHYFRRRLRKIELLEVLVAHSLCPNIPQEALDLWKSKKKYPMLPAFIEWQRTNDEKDENPYHDRHRCLNEKLDLKKEGDRFCLGRALYHLNQRRGFISNRKEGTKESEGNVKAQISDLSEKMKTVNCNYIGEYFYQLYKTKGKIRTTYTSRIQHVRAEFDAICKKQGLTEDLRNALERAIFFQRPLKSQKGQVGNCTFEKGKKRCPASHPNFEKFRMLCLLNNIKVKTKAEDKMRPLTPDELAKITPKFFRKSKPNFDFEDLAKALVSKKEKYAYYKDDKNAETADILFNYRMDTNVSGCPVTASLMEIFGEDWENGICSLYVKGETKTPQDIINDVWHVLQTFDDDDKLKDWALRNLQLTDEQAQLFVKIRMPQDYASLSLNAINKMLPYLEAGYRYDQAVFLANLCDVLPKEVWQDHSMRTEIIGKINAIISNYDTDPISRLREGKTISKQQCIKEFLQSKYGVDERHADRLYHPSMIETYPAAKPNSQGQVTLGSPRLSALKNPMATRALFRLRHLINQLIIDGKIDSDTVVNIEFARELNDANMRKAIETFQNEKQKEHDRIVQEIKKLGLEPTENDILKYQLWDEQKHMCIYTGKEIGVTDFLGPNPKFDIEHTIPRSLDGDDSQKNKTLCDSKFNREVKIGKIPYELSNHTEILARIESMGWAEEIDRLEAAINIRKKKAKMATTKEEKDKAISERHYFKMKLDYWKGKLETFTIDCVSEDFTNRQGVNIGIIGKYARLYLKTVFNKIHVVKGATTADFRKAWGLQQDYEKKERVNHAHHCIDAITIACIGKREYDSWKQFTEDQEKYLRKEGKKPLFEKPWDTFTEDVKAVTNELLVHHYQPDNMGKNTKKKLRVHGIIQKGKDGKPIYQQGAGARRSLHLESFYGAIQREDGIKYVIRKSLASLAEKDIKNIVDDAVREKVEEAVKKYGIKDAVSGENTIWFNEAKQIPIKKVRLYATNITKPIHLKEQRDASPKEYKQMYHVASERNYCMALYEGLNAKKRLKREFELIKNYDAAKGYDIPSTKNTLPLKYILKQGTMVLFYEGTADELENLPKKELSKRLYKVIVMTTKSGSGYLSFLHHMEARSDKELKTIDFKLNGAWCNDDDYRPRMDMYSTAVNVLVEGYDFELTITGEIKFK

SEQ ID NO: 3116 - protein, 1199 aa, unidentified
  REGION 1..1199: note = Description of Unknown: Cas Enzyme sequence
MKFILGLDPGIASIGWALILEAENDNEQSRIIDSNVVKVDFDNFAYMNAKGKISEGKPIDMFRKGLTVSPNLVRRQKRGAHRNLQRYKQRRADLIALLRENGFIDGDTLLCEDGKGTTYETLMLRSKAAREEISLSELARVLLMINKKRGYKSIRKGEADTDIEDMGAYLAAITGRSNTLVENHQTVGQYLMNQLTLNPLKGIKRQTFYRKDYEDEFEQIWKTQMAFHPELTRKLKKEIKNRIIFFQRPIESKKQDLSFCELESHQIEVEKNGKKQLVTTGSRVCPISSPLFQEFRMWQRLNDVILTNTTTLEQYTLTLEQKEMLASELSIRKELTKTAAIKLLVGKQNKTYDLNVDTLIGNETQARLVSAYLKILEMTGHDILDIKKMKAQDVLDVICKVFEGLGYKTEALNGEVMIGPEIYMQPHYKLWHLLYSFPGDNSRSGSAKLVQRVKEFFGFDNDEYAKIIADVKFPDGYRSLSAKAIQKLLPFLKEGYQYNEACEKAGYNHPKRSITKEENESRVLHHYLQPIPHNSLRNPLVERVLNQMVSVVNGLIEEYGDEYGQFNEIRIELARDLSKNAESRRRMTQDIENNKNERAKCRQELIDQLNERGYHVTYVSENDILKYRLYKELAPLGYKTLYSKTKVDLVDLIIHRKFDKEHIIPKAKSPSNAFSVLTVELSSINEEKGDMTALDYVKWKYGEAEAQQYIARVNDLFKKKAISKAKKENLLRTAADIQDEPLTRDLGLTQYINRKAYELLGTITRRVVPTTGSITSRLRDDWQLVDVLQELVWDKYDKLELIDTYEDKDGKTVRKINEDAWTKRTDHRNHAMDAITVAFTKPAFINYLNSLNAEGEKREQLMKMRQKNLHRDKQGNWRFNEPMPLGELRAEVKQQLEKINVYQKPAINAVTPNLNISKSKKKKEGNRQIQLTPRGKLHDDTYYGSIMENGVKVFTKRVEVSESLNIDDVVDKGVQRILQERLREYGNKPKEAFTNLEKNPIWFNREKGICIKRVIVRTKLKDARAIHKKHDNKGELLLGKDGKTQSADYVRTNNNHHVAIYEDAQHELHEVVVSFFDAVDSAIQGNPVIDMTYNADKGWRFLFSLQQNDCFVFPDEATGFNPADIDLTAKDNYALISPHLFKVQAISEGDYRFRHQYDATKNNNAKLKNMTWKRIRVINDLKGAVKVRITKIGHIEYAE

SEQ ID NO: 3117 - protein, 1206 aa, unidentified
  REGION 1..1206: note = Description of Unknown: Cas Enzyme sequence
MKFILGLDPGIASIGWALILEAENDDEVSRIIASNVIKVDFDNFTFVNAKGKISEGNPIKMFQKGYTVSPNLVRRVKRSGHHNLQHFKLRRSNLIELMRENGLIDVNTLLCEDGKGTTYETLMLRSKAASEEISLNELARVLLMINKKRGYKSSRKVDVSEDVEDMGEYLAAITGRSKQLTENHQTVGQYLMSQLSIHPLQGIKRQTFYRKDYEDEFEQIWKTQIKYHPELTRKLKKEIKNRIIFYQRPIASKKGEVSLCELESKEIEIEKDGKKKKVKTGSKVCSVSSPLFQEFRMWQRLNDTILTNTTTLEQRYLTQEEKEKLASELSIRNRLSKRDAIRMLVGKQTRNFDMNFDELLGNETLAKLVNAYLKILELTGHDKLNLKKLTAQDVIGTICQVFSGLGYHTDAINGEINQQTDIYLQPFYRLWHLLYSFPGDNSRSGNDKLVERVKEFFGFDNDEYAKVIADITFPDGYGSLSAKAIQKILPKMKEGYQYNKACELAGYRFSKRSLNKEENAERILQKYLNFIPHNSLRNPLVERILNQMISLVNSLVDEYGETYGTFDEIRIELARDLSKNAESRKRMTQDIESNKNERDTCRKELINILNERGYKVNYVSENDILKYRLYKELAPLGYKTLYSKTKVDIIALIVHRKFDKEHIIPKAKSPSNAFSVLTIELTSINEEKGDMTALDYVRWKYGEEETQQYIGRVNDLFKQKAISKVKKDNLLKTAADIPNEPLNRDLGLTQYINRKAYEILGTITRKVVPTTGSITSRLRDDWLLVDVLQELVWDKYDRLGLINTYTDKDGKTVRKINEDAWTKRNDHRNHAMDAITVAFTKPAFINYLNSLNSQGEQRIQMLKMRQKNLHRDKHGNWRFNAPMPLGELRAEVKQQLENIIVYQNTAPNAVSPNLNTTKAKKEKEGNRLVQLTPRGKLHDDTYYGSIREKIPGSGGEVVIFTKRVEVSESLNVDDVVDKGIQNILRNRLLEYNNDHKKAFTNLDENPIWFNREKGICIKKVVVRVNKDLRPIHKKKNHKGELILNKDNKVQESDYVLTNNNHHVAIYEDENHGWHEVVVSFFDAVERAIHGKPVIDRTYNQGNGWRFLFSLQRNESVVFPEEDTGFDPSAIDLTSKENNVVVSPHVFKVQSISERDYRFRHQYDATDKKKENTNLKNLTWKRIRNPNDLKGVIKIRITKTGRIEYAE

SEQ ID NO: 3118 - protein, 1205 aa, unidentified
  REGION 1..1205: note = Description of Unknown: Cas Enzyme sequence
MKFILGLDPGIASIGWALILEAENDDEVSRIIASNVIKVDFDNFTFINAKGKISEGNPIKMFQKGYTVSPNRVRRVKRSGHHNLQHFKLRRSNLIELMRENGLIDVNTLLCEDGKGTTYETLMLRSKAASEEISLNELARVLLMINKKRGYKSSRKVDVSEDVEDMGEYLTAITGRSKLLADNHLTVGQYLMSQLSLHPLQGIKRQTFYRKDYEDEFEQIWKTQIQFHPELTRKLKKEIKNRIIFYQRPIASKKGEVSLCELESKEIEIEKDGKKEKVKTGSKVCPVSSPLFQEFRMWQRLNDTILTNTTTLEQRYLTQEEKEELASELSIRNRLSKRDAIKMLVGKQARSFDMNFDELLGNETHAKLVNAYLKILELTGHDKLNLKKLTAQDVINTIRQVFSVLGYHTDAIDGEIKQQSDIYLQPYYRLWHLLYSFPGDNSRSGNDKLVERVKEFFGFDNDEYAKVIADITFPDGYGSLSAKAIQKILPKMKEGYQYNKACELAGYRFSKRSLTKDENARRILQKHLDFIPHNSLRNPLVERILNQMISLVNSLVDEYGDTYGTFDEIRIELARDLSKNAESRKKMTQDIENNKNERDTCRKELIDILNKNGYKVNYVSENDILKYRLYKELAPLGYQTLYSKTEVNIVDLIVHRIFDKEHIIPKAKSPSNAFSVLTIELSSINEEKGDMTALDYVKWKYGEEETQQYIARVNDLFKHKAISKVKKDNLLKTAADIPNEPLNRDLGLTQYINRKAYEILGTITRKVVPTTGSITSRLRDDWQLVDVLQELVWDKYNRLGLIDTYTDKDGKTVRKINEDAWSKRNDHRNHAMDAITVAFTKPAFINYLNSLNSQGEQRIQMLKMRQKNLYRDKHGNWRFNAPMPLGKLRAEVKQQLENIIVYQKTAPNAVSPNLNTTKTKKKKEGNRQVQLTPRGKLHDDTFYGSIRKKIPGEGEVVVFTKRVEVNESLKVDDVVDKGVQDILRNRLLEYNNDYKKAFTNLDENPIWFNREKGICIKKVVVRVNKDLRPIHKKKNHKGELLLDKDGKTQPSDYVLPDKNHHVAIYEDENHGWHEVVVSFFDAVERAIHGKPVIDKTYNQGNGWRFLFSLQRNESVVFPEEDTGFDPSAIDLTSKENNVVVSPHVFKVQSISERDYRFRHQYDATDKKKENTNLKNLTWKRIRNPNDLKGVIKIRITKTGRIEYAE

SEQ ID NO: 3119 - protein, 1222 aa, unidentified
  REGION 1..1222: note = Description of Unknown: Cas Enzyme sequence
MKKVLGLDLGVGSIGWCLIEKDDNNTPIRILRMGSRIVPISSDEETGYTKGNAVSKNADRTAKRTARKCYDRYQLRRKALVGLLRQYGMVPDKKLMLEQTPLEIWQKRADAASKVIPLEELGRVLLHINQKRGYKHSRLSNSDSKETAYVQEVNSRYDELKAEGLTIGQHFAAKLKENEQTSADGKKYYNYRIKEQVYPRHAYEEEAWTILQVQSRFHADILTPDVCKEMMNIIFYQRDLKSCKNLVSLCEFESYAITKNGKEITIGPKVAPRTSPLAQLSCILETANNITIRNRKNDELYISPEQRKAIADFLDNHEIMKLTDLYKILEIGRKDGWWAGKAIGKGLKGNTTKSQIRKALSSLPKEQVDSLTAFQLEYDEYVDEETGEVRKRINNALAEKQPLYRLWHLLYSIKDVDELSGALRHIGIEDDESIQKLCNLDFRTAGYANKSAKAIGRILPYLMEGLMYSEACERAGFDHSRRINPERTLLTSLPQIQKNELRQPVVEKILNQLVNIVNALLEKEGHIDEIRVELARELKQSKDERNETFKRNSQNERKNKEYAERIKEYGLTPTRNRIMKMKMWEESEHSCMYCGQPVDVKEFLQGADVEREHIVPRGLLFDNSFTNQVCSCRRCNSQKGMRTAYDFIEDDKGEAGLNSYIEHINYLFDKKQISRNKFNRLLVSHKAYINRKAQGKETEEDKELWENFIDRQLRQSQYIAKKSVEMLQLVCRNVYTTSGSVTETVRRLWGYNELLHDLNFERFKKAGLTTMVTQLHSGEEIEVERIKDWTKRLDNRHHAVDALAIACTTQGMIQRLNTLNASRDDMLKELNSQEQRVVDPEHSMLEKWIYTQPHISYVQAKEAIEKIIISQRPNTRITVPGKRYVTKNGKRTLVQTGIVVPRGALHAEFVFGRIMKQEADGKILTPQYVRKYKLGIGAQGFLFNGKEFYKEELKKDSKTGLSTIVVTDKIKDVLEKIVDGGIRKRILERLNRGFGEGTDYRANVAKALDNLKNLDEDPIFSDDAKTRPIRTVRKYVSSTTMVAVRKDSEGQPLAFVEPDGNHHVAFYKDEDGVITESIVTKWQAVQRKLNHIPIIIDNPSQTWNEVIGRNDIPDELLQTLPKDKSTLMLSLQIGEALIMGMEEADYQKAIEEKNMLALAEHLYFVQNISIGNYRLRRHVETSYDVKDMNKEDLRFLNIASIAALFNYNPHKVKITVLGDIIP

SEQ ID NO: 3120 - protein, 1224 aa, unidentified
  REGION 1..1224: note = Description of Unknown: Cas Enzyme sequence
MKKVLGLDLGTNSIGWCLIEKSDDNIPQRILRMGSRIVPISSDEESGYTKGNAVSKNAERTHKRTARKCYDRYQLRRQALMSLLKRLGMEPSNELIFEQTPMKIWQTRADAATKKISLPELGRVLLHINQKRGYKHSRLNNFDAKETSYVQEVNSRYDELKAEGLTVGQHFALKLKKNEKTSANGRKYYTYRIKEQVYPRHAYEEEARIILNTQRIFYSDILTEDVCKEFLDTIFYQRDLKSCKNLVSLCEFESYTIKKDGKEITIGPKVCPRTSPLAQLSSILETANNITIRNKRNDELYISPEQRQAIADFLDNNEVMKLTNLYNILHIGKKDGWWAGKAIGKGLKGNTTKMQIRAALSNLPSEQVNMLLKFELEFEDYVDKETGEVRQRVDNTQVEKQPLYRLWHLIYSIKDEDELSNALRRMDIKDEETIRKLCSLDFRSAGYAKKSAKAIGRILPYLMEGMMYSQACEQAGFDHSRRVDPGRTLLSALPQIQKNEFRQPVVEKILQQLVNIINSLISKEGTIDEIRVELARELKQSKDERNEAFKRNNQNEKKNKEYAEHIKEYQLTPTRNRLLKWKLYEESDHACMYCGQPIKVREFLQGADVEREHIIPKGLLFDNSFTNQVCSCRSCNSKKGMRTAYDFIEAEKGEEGLRSYIEHINYLFDKKNISRSKYNRLLVSYKAYLQRKVQGKETEEDKNLWENFIDRQLRQSQYIARKAIEMLQQICKNVYSTSGRVTDFVRHQWGYDEILHDLNFDRYKKAGLTTMVTQLQSGDEVEVERIKDWTKRLDNRHHAVDALAIACTTQGMIQRLNTLNASRDEMQAELNDKNGSIMDPNRSMLEKWVSIQPHITYAEAKNEVDKIIISQRPNTRITVPGKRYIQKNGKRTPVQTGIIVPRGALHAEFVYGRIMKQKPTSDGVVKIPQYVRKYKLGIGAQGYLFNGKEFYKEELKKDPRTGLSTIAVTDKINDVLEKIVDGGIRKRILERLNRGFEDGKDYRSNVPRALANLKNLDDDPIYSDDAKTRPILSVRKEVVSTTMVIVRNDRNGRPLAFAEPDGNHHVAFYKNENGLIEERIVTKWHAVQRKLHHVPIIIDNPSATWSDMLGRTDVPEEILKELPKDNSIFMLSLQIGEAFVMGMEESDYQKAIEEGNKQVLAEHLYFVQNLSSSNYRLRRHVESSYDITGMNKEDQRFLNIKSIGALFNYNPHKVKITVLGDIIP

SEQ ID NO: 3121 - protein, 1219 aa, unidentified
  REGION 1..1219: note = Description of Unknown: Cas Enzyme sequence
MKKILGLDPGIASVGWAVVQTAEEASEKSGILDAGVVKVDFDNFAYQKPDGKISSTGKIDELYRKGVTVSPNLVRRQARQARRRLQHYQQRREQLIKLLMANGFITAATPLNEEGKDTTFQTHALRAKAVTEAVTLEELAKVLLMINKSRGYKSTRKGESEGEDTNYLKTITERSKVLLERDLTVGQYLYEMLQQHPLKGIKNQTFYRKDYEDEFEKIWSCQMKFHKELTKKLKKQIRDKVIFFQRPIESKKGDVGFCQLESREVVVNGKTYTTGSRVIPTSSPLYQEFRMWQRLNDTVIKNIMTGEVRHLTQEEKERLAAELSIRKELTKTAVVRLLYGKAIKSVELNFDTLIGNDTAARIYKACLEVIKLSGHELDTKKMSSAAVIAAVQDIFGMLGYRTVALTDAGEFAKLWHLIYSFPGDSSRSGHDTLTAHIKQLFNFATDEQAEKLANIIFDDGYGNLSSKAISKILPKMKEGLQYSDACLAAGYNHSVRSVTKEDNENRVLSATVTPIPHNSLRNPLVERILNKMVYTINAIMQKHGQFDEIHIELPRELCSNAEKRAKDTAAIDRNTKDKEKAEQELKEKLAEMGYPVTYVSPNDVLKYRLYKELAANGYRTLYSDTLIDLKELILGRGFDKEHIIPKALRLDNGFSNLTIEKTDINLKKSKQTALDFVQEEYGDAAAEQYRQRVIDLFEKKAISKAKHENLLRTAAEIPANPLDRDLNLTRYITKKAVELLEPVTRKVLVTTGAVTVKLREDWQLVDVLKEMVFEKYQELGLTEKFTDKEGKVIERIREDVWSKRNDHRNHAMDAITVAFTTQSMIHYINSLSSQGEGREQLFHMRQKHLHKDGKGNWIFNSPMPIDEMRRASKQVLEDIFVIHPTPKVAPVTRNKGTLVPRGKLHDATFYGRKKKEVISFEKVDKSFTEEKISTVTNPKYRSALLHRLQEFGGDAKLAFTGKNSLEKNPIWLDEFHSAAVPLKVKCMTTKHVYTKRVTVNENLNIDKVLDEGVRAILKARLQAFGGKTKEAFANLEENPIWMNEEKGIAIKSVIVETDLKDLTPLHRKEDGTGKDFVKPNNNYRADIYIDNKGELHDNVVSFFDAVQHSSAVDSSWRCLFSIKRNEYFVMPGKDFNPLEIDLEDSQNRSIVANHLFVVQKMSSKDYLLRLHNDTSSGIVKELKDITSIRVTSLSKFIGSVKVSIDTSGGLKVLQKMVID

SEQ ID NO: 3122 - protein, 1397 aa, unidentified
  REGION 1..1397: note = Description of Unknown: Cas Enzyme sequence
MKKILGLDLGTTSIGWALVNEKESEKEKSTIIKTGVRIIHMDNFVSTSSGKESKDPLKDFISGNGISPNAGRTLKRGARRSLQRYKLRRIELIKLLKQHNLITDNSILAEEGKESTHSLWKLRAKAATEEVSLNDFTRILLAINKKRGYKSNRKAQGDDEGTAIDGMEVANVLYEKQITPGQYAYDLLSQDKKYIPEFYRSDLQDEFNKIWNFQQQFYVNVLTDELKEEVNGKKKGHTYKICEAPFELVGVKRHTKGKELKLENYRWRVDGLNQQLTLEQLVVVLQEINGQISNSSGYLGEISDRSKKLIIEGLTVGQYLYQQIKENPHTRLKNQVFYRQDYLNEFNKIWKTQAQFHSELTGELKKEISDVVIFYQRRLKSQKGLISICELEGREIEIEADGKLKKKVVGPKVIPRSSPLFQEFKIWSILNNLQFIELKTKITHNVSKLDEDLEIRKQMFEVLNAKGKMSSTEILKAVFNKPKEWELTNYQEIEGNNTNQILFKAYKSILELAGYEKVDFNDKNTVAEIFESLGIKKEILDFDAELEGKEFEQQLSYQLWHLLYSYEGDNSNTGNDKLYTHLKAKFGFEKEYANALVNVTFQDDYGSLSAKAIKNIIHYLKEGNDYSEACTLAGYNHSNSRTKEENEKRELKEVLELLPKNSLRNPVVEKILNQMVNVINAIIKEYRKPDEIRIELARELKKSSKERAEATSGIAKATKINYGIREKLEGIYPFNAGVRITKNDILKYKLYQELEATGYKTIYTNTYVELGKLFSKEFDIEHIIPRAVLFDDSFSNKTLSVRDFNRFKSSKTGIDAIVEKYGENSGDFNRYTSTIEKLYKDKKIGKAKYNKLLMKGTEIPDGFIERDLRNTQYISKKAKEMLEEVFRTVVPITGIVTSKLREEWQLTNVLQELNWDKYDKLGLTKYETNKLNQKIPRIVDWTKRNDHRHHAMDALTVAFTQHNHIQYYNFLNARRDESHKEYGKIVKIEKSIKETIKDKKGKDKTVMKPPMPINEFRIEAKKHLENTLISFKAKNKVVTRNKNKIRGKDKPQETLTPRGQLHKETVYGKSKHYETKLEKIGAKFDIEKIKTVAKKTHREALLNRLAEFGNGPKKAFGGKNALSKSPIYLDGDKTIELPEKVKIVSVVNQFTIRKDITHELKIDKVIDVGVRNLLQNRLTEFNGDAKKAFVNLEENPIWLNKEKGIQIKRVTITGVSNAEALHHKKDHFGNEILDKNGSPIPTDYVSTGNNHHVAIYRDEKGNLQEEVVSFYEAVMRKNAGMDVILKNHPDNPEWEFLFTMKQNEYFIFPNKETGFNPDEIDLQNPDNLNTISPNLFRVQKIGSLLSGFWFRHHLETTVDKKKELKNISYKVIQSANNLSKIIKVRINHIGVITKIGE

SEQ ID NO: 3123 - protein, 1406 aa, unidentified
  REGION 1..1406: note = Description of Unknown: Cas Enzyme sequence
MKKILGLDLGTSSIGWALVNESNNQKSEIIKLGVRIIQYDTFSKVDRLGKVTESKNPIEDFTSGKGLSPNAKRTQQRGARRNLQRFKQRRKALIEILTKNGFITDAKELTEIGKDTTHQTLAIRAKAAVKKIEKEEFARVLLAINKKRGYRSSRKAKSEEEGNLIDGMAVAKELYDSNLTVGQYVFQLLENGGKYIPDFYRSDLQNEFDKIWEFQRQFYTDILTDELYNELKGKNKGATYKICEEPFQITGNVKQEGTAFEKKKERYLWRGEAISRQFDLEYLVIVLQEINNNLNNSSGYLGAISDRSKELFFNKETVGENLYKQIQQNPHTSLKNQVFYRQDYLDEFEQIWEIQAKHHKGLTHELKEEIRDVIIFYQRKLKSQKHLISECEFEKHHKAIPKSSPLFQEFKIWQNLNYLELKNSETKETVMFRELDEDIRQAVFEELNLRGNLKIKEVIKLLASYRALGKLDLWKSKYKEIEGNRTNEALYNVYQKIAENEGYGFDWDKKSASEINKELTSIFPEIGIDAKILKFNSDFGGDEFDKQESYQLWHLLYSAEDDDKIAEEDKIIYGNSNVALKKKLHTKYGFKPEHANMLANVAFQADYGSLSARAIKKILPYLKAGHPFAGNAGDNQLVGACEMAGYNHSHAMTTEESEKRLLKGKLELLKKNSLRNPVVEKILNQMVNVVNQVIETYGNPDEIRIELARELKKSSDERKQMTEGINKSKTKYEEIRKHLKKDFGIKNPTRNDIIRYRLYEELRANGHKTLYTNQHIPLGKLFSKEIEIEHIIPKAKLFDDSFSNKTLAFSKPNKDKGNSTAMDFIQDKFSDDVEDYKSRVEKLYNNGKGAFSKAKRNKLLMEEKDIPDGFIERDLRDSQYIAKKAKQMLEKVVRTVNTTTGSITSKLREDWDLINVMQELSLPKFKAIDENLIEKIERKDGTFKTRIKDWSKRSDHRHHAMDALTVAFTTYDHVQYLNNLNTVRQLDGTAVAHEKSKLYGIKNKVTKVYEYKNGRKRKFIPPMTNFREEAKKHIENILISFKARNKVVTRNINKTKIKGKDKYNTKMQLTPRGQLHKETIYGRIKEVVVKEEKVNAKFNEVKINQITKPKYQEALLRRLQEFNGDTKKAFTGKNTLIKNPVYLDESKKESVPEIVKVQFFEDSYTIRKEISADLKVDKVIDIGVQRILQKRVDDFGENQKEAFSNLDKNPIWLNKEKGISIKRVRISGVKNAEALHTKKDHLGENILKDGAQVATDFVSTGNNHHVAIYKDEKGKLQEKVVSFYEAVARVNAGVSIINKAHNKDKGWQFLFTMKQNEMFVFSSDNFDPNEVDLEDEGNACKISKNLFRVQKIATKDYFFRHHLETTVDNMSSVKGYCWKREGLNGIKEIMKVRINHLGKIVHAGEY

SEQ ID NO: 3124 - protein, 1446 aa, unidentified
  REGION 1..1446: note = Description of Unknown: Cas Enzyme sequence
MKKILGLDLGTNSIGWAVVNEAEKTDEKSSIVRLGVRVNPLTVDELSNFEKGKSITTNADRTLKRSMRRNLQRYKLRRENLIQILKDNGFICDDTLLTENGNRTTFETYRLRAKAATAEITLTEFARVLLMINKKRGYKSSRKAKSTEEGQLIDGMEIAKRLYDDNLTPGQLSLDLLKSGKKYLPSFYRSDLQAEFDKIWNFQSQYYAFLTDGLKEELKGKNERATWAICAPSKDANASNEQYVWHWKETETKWNTETAANETLEVEKTLVGQKRSGTIADQRIENYEWRSRALSEKMTPEQLIVIFQKINGQINNASGYLGNISDRSKELYFNHQTVGQYQMAQLEKNPNYSLKNQVFYRQDYLNEFESIWETQARYHKELTPNLKKELRDIIIFYQRPLKSQKGLVSFCEFESRQIEVEVDGKKKTKTVGSRVCPKSSPMYQEFKIWQTLNNIQVTYGGKRYLYQEEKEALFAELNYRERMSKAEALKLLFDNEKGYDLNYKSIDGNHTQAELYKAYQAIIEMSGHGEYNFSKMRSNDIQQIVYEVFDGLGYNTKMLTFDSSLDGQDLECQPMYRLWHLLYSFEGDKSNLGNESLIEKLMELTGFDKEYATRLAEVVFPTDYGNLSTKAIRKILPHLKDGNDYSVACAYAGYRHSDSSLTKEELASKMLKDRLDLLPRNSLRNPVVEKILNQMINVVNGVIEEYGKPDEIRIELARELKKSAKEREEMTKAISDSTRLHEEYVKTLQKEFALDHVSRNDIIRYKLYKELERNGYHTLYSNTYIPKEKLFSKEFDIEHIIPQAKLFDDSFSNKTLEVRQVNLEKSNLTAYDYIVGKYGNAEDYTNRVNKLYEDKVIGKSKRDKLLMKEADIPSGFINRDLRDSQYIAKKAREILEEVVRFVVPTTGSITDRLREDWQLIDVMQELNWDKYNQLGLTEIIEGREGQRIRRIKEWTKRNDHRHHAMDALTIAFTKRSYIQYLNNLNARVQKGVDDYVDLDRVELSSLSKEQRASAIYGIEKKELERDGHGKLRFKQPMEGFRSEAKRQLENTLVSIKAKNKVVTRNTSISKKKVGTNKKVQLTPRGQLHLETVYGSSKQYVTKEERVNASFDAEKIKTVANKRYREALLGRLEHFGWDPEKAFRGKNSLEKNPIWLNAQHTECVPEMIKIVSLESIYTIRKEISPDLKIDKVVDMRIRRILKERLEMFGGDAKKAFSNLEDNPIWLNKEKGIAINRVTITGVSNAVALHDKRDKNGHLILDEKGNTQPVDYVNTGNNHHVAIYRKPKLDKKGLPIMSEIGDIQYELDENVVSFYEATSRAILGLPIVDKEFRRDEGWEFLFTMKQNEYFVLPRYDDNGNMVFNPHLYDEEWYRSPDNYSKISPNLFRVQKIASKYYVFRHHLETTVNNDSPELRGVTWERIQNCERLIGLVKIRINHIGDIVSVGEY

SEQ ID NO: 3125 - protein, 1362 aa, unidentified
  REGION 1..1362: note = Description of Unknown: Cas Enzyme sequence
MKKVLGLDLGTTSIGWALINQAENKDEKSSIIRAGVRVNPLTTDEKDQFEKGKAITTNADRTLKRHMRRNLQRYKLRRANLIEILKREGWITDQTILSEEGPNSTFQTLALRAKAALQEVSLEEFSRILLSINKKRGYKSSRKAANGEDGHLIDGMEIAKELYDNDLTPGQYAIRLIRNGIKMIPDFYRSDLEAEFDSIWVYQKQFYPEILTDEFKSLITSQGRNGASKLFFSTYRIETADNKGKDRKTTAYIWREEALKSQLEKEKLAYVLCDIRGDIANSSGYLGEISDRSKELYFNSLTVGEYLYNNLKNNPHFSTKNLVFYRQDYMDEFERLWETQKAFHPELSEDLKKEIRDVVLFYQRRLKSQKGLIRFCEFEKKEVPVTIDGKVKMKTRGCRVAPRSSLLFQEFKIWQILNNLEITYRQDGTTRLLEENEKSLLSNELQIRSKVSSSEILKLLKIKARSAELNYKEIEGNKTMCILYQKYIDIVNQSGHGEYDLNKLTWDDAYLIVSTIFSGLGFGTDFLLFDSSLPKEKYEQQPIFKLWHLLYSYEGDDSPIGDDSLIDKISVICHMPRDYAAIIARARFQEDYASLSHKAIKKILPFLKEGNKYDVACLLAGYNHSNSSTAEERDSKVLLDKLEQVPKGELRNPVVEKILNQMVNVVNSISEAYGKPDEIHIELARELKQSAKKREEATLAIVENNRLNNDITRILMDEFHLPYVSKTDITRYRLYEELKDNGYKTLYSNKYIPRELLFSKNIDIEHIIPQALFFNDSFANKTLEYRDINIEKGKSTARDYVLSKYGDKGLEDYQLRVDDLFAHNAISKSKRQFLLMSQQEIPEDFVLRDLTNSQYIAKKAKEMLESYVRIVMPTSGSITKELREQWQLVNIMKELNLSKYDAIGKVSIRIRDGQENPHIDDWSKRNDHRHHAMDAITIAFTSPTHINTLNHLKESTDSNSEFYGKIRKFDPPIPLGEFRYECKKALESILVSIKAKNKIVTRNVNKTKGPNGTTKRVITYTPRGTLHKEQVYGRRRRYETFYLPVNAKMTFSEIDCIADPRIRGAIRQRLSEYNGDSKKAFTGKNSLDKNPIIIPGSSVMVPLKVKCVRFNTVYSIRKDIGPDLSVDKVMDSHIKAILYERIKEFGGDQRKALSNIERYPIWLNKEKGICIKRVTIMENFDLSAIRNKRDKTGKEVLDSEGNTIPNDFVNLRNNHHVAIYQDEDGNYQENVVSFFDALQRKTLGLPAIDKSYNKDIGWKFVMSMKINEMFVFPNKKEGFIPEEIDLKDPANYPDISKNLFRVQKLSSKDYWFRHHLETDSSINDIALKDITWKRIKAINNLKGVIKVRINHIGQIVSVGDYD

SEQ ID NO: 3126 - protein, 1414 aa, unidentified
  REGION 1..1414: note = Description of Unknown: Cas Enzyme sequence
MTKILAFDPGTNSLGMVCRDTMNDNLMEQITSGVDIIRDNTERDKRGRHSSAASQRRSFRNARIRYRSVKRRKQATLKLLIKHNCCPLDMESLNKWRFDDDEKGYDRTFPVQNVAFMKWINFEFDIDGEVVRSVYRLREILATKPLDYSKPESYIILGRAIYSIAVRRGFKSSRLAIVTDNEDDEQPELQKSEEELSAGLTQYMREYNCPTVGAAFSRMERVDKIRIRANNDYKPIRNQLKEEIRKIFEVQKLDTGSELYKCLMSEKKHEGTIFYKKPLKSQKGKVEYCTLEPHKRRCAKSHPANEFNVAWQLLNNIKIKRDNGWESISLDLRKTIYNKLFVRNQKHFDFAEIKELLKNELHTQLEYKVSINYSDKKSVPGCPVTYYLQKILGPSWETERIQGTKKHLTHAQRRKNLSLEAEGHLTEYTAEDIWHICYESDEKQFIKDFAKNALGLPPAKVISMGALWENIQDGYANLSLCALKKINPFLARGYKYSDAVMLANLPSIMGEGLFQEKEQEIVELIDKERAAISNENRIYDITNKLISDYKSLKMEDLAFAEHNYDYLLQEDDISDVKKACAENYGKEWAALTNDQQSAVVSQAAELYQEFFFSSKRDYYKRVNMSEAIKKVLAEKYPSLTMNKLNKLYHHSDNAYYPSAHENENGILQLGSPARGNLKNPTVLKVLYKIKQNVNKLLANGDIDSDTIVVVENAREALNDFNMRWAIEEYNSKRERENKAIEDALTDLAKEYHLALPKDCVAIARLALYQNENFTPYNPNESRRLYDKLYEKYKLWLKQGFFDFYTGRPITVSELFSPDNLVEVDHILPVSKSFDDSISNKVLSSSRYNSTIKGTKLPCELPNYYVDTPDGTAIIHRIREIEEKVKYLEEKVIYWKGRSSRAADPDSKNSAIKQRHLWQMEYDEWNQRLTNLTAKEITPNFRHNQLNDTRTISKYAYHYLKSVFGRVVVQRGQTTAVFRKIFGFQDAYEKKDRSRHTHHAIDALTLSLIPYGPKRERMMELWYQIQEAHRFKDYDLERQLKDKLEREKTLCGLGCYSPNEVVQYIEDTTLVRNDATNNALTKNIKRYRVRGKVVPLRDENGNIVYEKTAKGIKRVKAKHVSQGNSIRGAIHDQSFYGKIEKWKDNGSHEKEELFVIRRKIEFKSGNVGSGFKSWDDLEKQMVDKKLFKKFKAQYPEGTPFRDACAEGFYTYVVENGVRRKVKVRHVRCIAVTAQPLKKHVFQPQHSDKVQYYYVSPGEAYGVFEYVSKDGERLYESDNLFTLSEKMKNGSLKEVPCPKTIKDKKGKEYFHTRTILKDATILIYPSVESAEAQYHLDAATISKRLYRINTIERDRKRLSLTRHNIVKSYTGKNGIEDSDFKDLPDGMRMPIAKLNFLLLGTDFEIIDGRLIHKCND

SEQ ID NO: 3127 - protein, 1217 aa, unidentified
  REGION 1..1217: note = Description of Unknown: Cas Enzyme sequence
MIKTLGIDLGTNSIGWALVEKDGDITVLRDYGVHIFQEGVAKVKGNEEPMVKTRTAARSSRRHYFRRRLRKINLLRILVREGWCPFLSEDDLRKWKEEKKYPLTKAFLEWQRTDDGLGKNPYKDRHECLSKTLDLNTTQDAYVLGRALYHLNQRRGFLSNRKEQSSEDESGKVNFGIDNLDAAIKSAGCTYLGEYFYKIYGTDEKIRNQYTARIRHYEKEFFAICKKQNLPDTLVEELHRAIFYQRPLKSQKGLVGKCKFEKDKPRCPLSHPDFEEFRMLAFINNIRVAYPGEKELRPLTEEERSIIAPLFYRKTKIHFDFSEIGAKLFGKKAPINYGGELGGNADVARFNFRRNTTVTGCPFTSGLISAFGDDWRSALMSLYVKAEGKTERQIVNDVWHVLFSFDNDDCVIKWAEDYLQLDNSRATAFAKATIQQGYAALSLKAINKILVWLRLGYRYDEAVMLANVPYAMGMDIRNDAAKLNEAIEVVKQTITSYLPNPDINKDSKYRKIEEDLCNAGIVDFDMAKFYHPSMIETFPKVVSIGKTPALLPSPRVQSIRNPMAMRALFRLRALMNELIKKQEIDKNTHINIELSRNLNDSNKRKAIEWYQRENEKKRSDYRKKITEFYKQAGFNHSPSDDDILKYELWEEQNHICLYTGKTIGISDFLGADPKFDIEHTIPRSRGGDDSKANKTLCDKRFNRDVKKDRLPSELVNSTEIMTRIESLTWRDRISELRIDIEKRTRESRMAADKDSKDRAITRRHLAKMSLDYYLNKLDRFKMIDVPAGFSNRQGVDIGIIGRYARMYLASVFDHIYTVKGETTATFRKMWGLQGNYEKKDRVNHSHHCIDAITIACIGKKEYERWAKYKEDYDKYMFYGAARPAFQDRPWGTFVEDVKNISDNLIVSHHNDDRMAKKAKKKLRVRGIIQHNENGKPKYAIGHTARGPLHMQTFYGAIERNGEIRYVVRKELAALDAKDIKNIVDDVVRKKVEEAIKARSIAALRETIWMNEEKRIPIKKVRLYTTDVKNPIKLKEHRDKSIHEYRNHYYVKNETNYAIGLYDGFAPNGKYQLGKDFIVISNLAAAKRINDVSNHGILLPNQKNNLSLRYTLRLGTLVLFYEKNKEEILSCSLAELSRRLYKLVGISTLRVSGYEYGSLKFLHHQDARPSSEITFTNGHWKSADDFRPAIIVQNKKFSALVEGYDFIIDCTGKISFKN

SEQ ID NO: 3128 - protein, 1018 aa, unidentified
  REGION 1..1018: note = Description of Unknown: Cas Enzyme sequence
VRGDKREGAAMARTLGLDLGTNSVGWALIEEDGGRPTAIVATGVRIFQEAVDAKTRLPKNQQRRAARALRRILDRRRRRKQKLRAILLRAGLLPENLLKSATPETVFNELGDPYALRKRGLDHALRPHEFGRVLTALCARRGFQSNRKSLLGALAVEFEDLIDAAKHLGGISATDSTARQEIEKEEGIVRAAIQTLRDDMQRTAARTLGEYLADRPAGERRRGRFTDRAMFREEFDLLWERQREHITALADDGLRARVFDAIFFQRPLKSSKALVGRCSLEPSRRRAAVARLESQRFRLLQDVNHLAVRNPVTGLFRDLDTPERQALVGLLARQRTMGWGAARKALGLRKDELFNYEEGDRDELKGDTTSAALAGILGSTWEQMDPETRRALVEDLLTIADKAHLVRRLREHWRFPREQQYQLAVLELEPGYMAHSVKAINRMLPTLELGAKYFEAKQLAGYKLQETRKTSERLPPPPMVRNPVVQKALGETRKVLNALLQAYGKPDTIRIEMAREVRMSARQLAAFNKQQRANEKSNERALEQLASVGLAAPRRDDLIKYRLWEECGGECPYTGRAIGIHQLFSADVDVEHIIPYSRRPDDSYMNKTLCFADENRMVKRGQTPWEAYGADAARWGAILQRIRRLPPPKQHRFAMAEVATLDEFISRQLNDTRYVAVQVKNFVAALGSDIQVTKGLPTAMLRRYWDLNRILSQDPASKTRTDHLHHAVDAIVIACTNRSVYQRLASSAASSFEAVAGSRTNSAISPWPTFTEDVRRSLETVVVSHTPSRRLAGALHEETAYGYRPATGLYHYRKRLDALFSTKALDRIADPVIKKLVRDRLAEHGDDAKKAFSQPLFHSDGATPIRRVRLTRTANRASVVGVRNLAGEEYKFHDLGNNHHVEIFESADGTQRFGKVVSTLEAARRTRADAVPEVSREGGRGARFVMSLMINDMVEIIAPSGIDYYRVQKLSNDGRITLRHHRAATLDLNHECLLARPSTLKGRKVTVDPIGRVQNAGD

SEQ ID NO: 3129 - protein, 1272 aa, unidentified
  REGION 1..1272: note = Description of Unknown: Cas Enzyme sequence
MNKYILGLDLGVTSIGWALVAVDENNIPVRIIAMGSRIIPLSSDDRDQFQKGQSITKNQDRTNNRTQRKGYDRKQLQKNELKKILKQYNIFPTEELLKLPMLDLWKLRSDSVNPDAAISGAQLGRILYMLNQKRGYKSARSEANADKKDTDYVQAVKGRYAELKERNQTIGQYFYEALNTAKNTNSYFRIKEAVYPREAYIEEFDTLIEIQKNQHDFLTDKVIEQLRNEIIYFQRKLKSQKGLVSICELEGFEKKVLDKEKNKEKLVFVGPKVAPRTAPLFQLCRIWEVVNTLSLKIKNPENSKYKWSDRVISLDEKQKIAEYLFSNGNLSFSELLKILKLKKEDVYTNKQILKGIKGNEVYESIRTIIGDNDLLQFNAAVVSSNYIAMLVDKKTGEVLEEKEGLEIDKKVEQEPLHQLWHTIYSIKELEECKNALIKRFGFDSDTAEKLSHLDFNKQAFGNKSAKAMRKILPYLMQGYDYSKACSLAGYNHSNSLTKEEKEQQPLADRLELLSKNDLRQPVVEKIINQMIHVVNAILEQYGRPVEIRVELARELKQSKDERNDMDVWNSKNQKLNTEIGRRLSELGLPTTKRYIQKYKFIFPSLSKNIKEARVNNQCIYCGETFNLTEALKGDAFDVDHIVPKALLFDDSQTNKILVHRKCNANKTNQTAYDYMASKGKNELESYLERVDDWYNRGIVSYGKVQRLKASYNEYLERKKQKKETELDRKLWENFIDRQLRETQYIARKARMILQKVCSNVTATEGGVTAKLRDLWGWDDVLMNLQMPKYMSAEEATGKTFIGIKEWTSDHGKRKHQKKEIINWSKRDDHRHHAIDALVIACTKQGFIQRINTLNASETRDEMNRKVEEAQIVFKEKATLLEKYLIMQQPFTTEQVMKEADKILISFKAGKKVATITKYKATGKNKQTGVIVPRGALHEQSVYGKIKVIEKEKPVKYLFENANKIVNPKIKEQVYERLSEYKNEVRAALSSLKKEPIYLNKEKTEILNKASCYNEATVLKYKLVGLKSQQVKDIVDEKVKKLVAERLALHGNNEKEAFKDTLWFNEEKQIPIRTVRLLARPDANNLQVIKKDANGKEIGFVLTGSNHHIAIYEDKKGNMSQYGCTFWHAIERKKYQIPYIFKETSEIWNAILNKDYPESFLNKLPADGLRLKFSMQQNEMFVLGLSQEELNAALKNNDTSILSKHLYLVWSISDNNYWFRHHLETKNSELKKTEGAKESKRFYNIRSVGALMALNPIKVRINHLGTINRIGEF

SEQ ID NO: 3130 - protein, 1437 aa, unidentified
  REGION 1..1437: note = Description of Unknown: Cas Enzyme sequence
MKKILGLDLGTTSIGWALVNEAENENEKSSIIKLGVRVNPLTIEEQQDFEKGKSITTNAERTLKRGMRRNLQRYKLRRENLIEILKDNGFITDETILSENGEKTTLETYRLRAKAVTEEITLEQFARVLLMINKKRGYKSSRKAKGDEEGTLIDGMEIAKLLYEENLTPGQYCLQLMEQGKKQLPDFYRSDLQTEFDKIWKKQQEFYPEILTDKLKENLEGKNEKATWSICKEPFNIVGIQRTTRGEELKKENFEWRAKALSEKMDLESLAVVLQKINGQLNNSSSYLGAISDRSKELYFNKQTVGQYQLAVLTQNPNATLRNMIFYRQDYLDEFHAIWDKQAEFHNELTEELKKEIRDVIIFYQRRLKSQKGLISFCEFESKQIEVEKDGKKRIITVGSRVIPRSSPLFQEFKIWQTLNNIVVSGKGGKSKKKKEQASTALSAQEDPLQICGKRELYQEEKELLAAELSIKEKLSKSDILKLLFVNPQELDLNFKEVQGNLTQANLFAAYKTIIEQTGHTLDLKKSASEILKNVEQIFSEFEYNTDIIRFNSDADNLDDEPMYKLWHLLYSFEGDNSKTGKENLINKISDLYGFEKEYATILANITFQDDYGSLSTKAIRKILPYLKEGDKYDVACEYAGYRHSASSLTREELENKIYKDRLEILPKNSLRNPVVEKILNQMINVINAIIDTYGKPDEIRIELARELKKSAKEREELTKSIQESTRMHEQYKQVLSQPPFNLSYISRNDIIRYKLYEELKDNGYHTLYSNTYISPTALFSGSFDVEHIIPKANLFDDSFSNKTLELRTINLEKRDATAYDFVKEKYGETGNDNSLDNYLNRIEKLFKAGVISRAKYNKLKMQGKDIPSGFIERDIRDTQYIAKYAKAMLNDLVKVVVSTTGAITDRLREDWQLIDLMKELNWEKYKNLGLTEEFINDEGHQIRRIKDWSKRNDHRHHAMDALTVAFTKLSHIQYLNNMNARSDRNSSIYGIELKELYRNNNGKLLFKPPFALDEFRREAKRHLENTLVSIKAKNKVTTDNLNITKKAGGTNKKVQATPRGQLHKETIYGSKEKPNPAEEKVGANFNTEKIATVCKPAYRESLLCRLQEFDNDPQKAFTGKNSLKKNPIWLNEEKTEQLPDKVKTMSFETVYTIRKEIAPDLKVEKVVDKGIRTILENRLSEFDNDAKKAFSNLDENPIWFNKEKGIAIKRVTISGVSNAIALHDKRDKDGNLILDNDGKPQAVDFVNTGNNHHVAVYRKPVLDKEGNHVEDEEGNKKYELEENVVSFYEAVSRKNLGLPVIDKTYKASEGWQFLFTMKQNEYFVFPRTEKVEKTDEETGEKSKVEKVVFDPNDIDLLNPANYALISPNLFRVQKISTKNYLFCHHLETKAITSDDLKNKKQLSKITYHFIQSLPPIENIVKVRVNHLGRIVKVGEY

SEQ ID NO: 3131 - protein, 1494 aa, unidentified
  REGION 1..1494: note = Description of Unknown: Cas Enzyme sequence
  MOD_RES 13..72: note = Any amino acid
LPPKKNEPPWILXXXXXXXXXXXXXXXXXXXXXXXXXXXXXXXXXXXXXXXXXXXXXXXXXXXXXXXXXXXXLGLDLGTNSIGWAVVNEAENANEKSSIVKLGVRVNPLTVDELNNFEKGKSITTNADRTLKRSMRRNLQRYKLRRENLIEVLKDNGFITDETILSENGNRTTFETFRLRAKAATEEISLQEFARVLLMINKKRGYKSSRKAKNTEEGQLIDGMEVAKQMYDNDLTPGQFVLALLEKGKKYIPDFYRSDLQSEFEKIWDFQKTFYPDTLTDSLKNDLYGKNKTQTWAICAKPFGISGIKRQTKGNELKLENYRWRSKALTEKMGLEEIAIILQEINGQISSSSGYLGNISDRSKKLFFNHQTVGQFQMAQLDKDPNHSLKNQVFYRQDYLNEFETIWETQAKSHKELSPELKKEIRDIVIFYQRPLKSQKGLISFCEFENRQIEVEIDGKKKLKTIGLRVCPKSSPLFQEFKIWQTLNNVQISGGESKRFLFQEEKEQLFAELNYKEKLSKTDALKLLFKNYKELDLNFKEIEGNRTQAALFNAYQTIIELSGHGEYDFSKMESSKAIQIVYEVFKTIGFNTDILKFDSSLDGKNFEQQPMYQLWHLLYSFEGDKTELGNGNLIAKLQQHYGFDKESATILAGTIFPSDYGSLSSKAMRKILPFMKEGNEYSLACEYAGYRHSQKSLTKEELEKKILKNKLELLPRNSLRNPVVEKILNQMINVVNSIIDTYGKPDEIRIELARELKKSAKERDEMTKQINATTKLHEEYVKILQSEFGLTYVSRNDTIRYKLYKELECNGFHTLYSNRYIPKEELFSKKFDIEHIIPQAKLFDDSFSNKTLEAREVNLEKSNATAYDFVESKYGEDGLRQYENRVEKLFKDGKISKAKRNKLLMKEADIPSDFINRDLRDSQYIAKKAREILEEIVKFVVPTTGSITDRLRDDWQLVNVMQELNWDKYNKLGLTEIIEGHDGQRIRRIKDWTKRNDHRHHAMDALTIAFTKRSFIQYLNNLNARVQKGVDEYIDLDMVELRDLDKVQRASAIYGIEKKELYRGDDHKLHFNPPMPMDEFRAAAKRQLENILVSIKAKNKVVTRNINSSKKKSGYNKKTQLTPRGQLHLETVYGKNKRYATKEEKVNASFDEEKIGTVANKRYREALLKRLQIFNGDTKKAFTGNNSLEKNPIWLNELHTEKVPEKVKTVVFEDIYTIRKEISPDLKIDKVVDKQIKTILENRLKEYGGDSKKAFSNLEENPIWINQENGIALKHVTITGISNAVALHDKRDKSGNLILDENGKTQPVDFVSTGNNHHVAIYRKPVLDKNGIPVLDKEGNPQYELDENIVSFMEATARATQGLPIIDKEYKKDEGWEFLFTMKQNEYFVFPRYNEEGEMIFNPFDHDEDWYKNSENYAEISPNLFRVQKFSKVKANNSFVRDYVFRHHLETTVTNNDSKLRNTTWERIQSCDKLGRILKVRVNHIGEIVSVGEY

SEQ ID NO: 3132 - protein, 1276 aa, unidentified
  REGION 1..1276: note = Description of Unknown: Cas Enzyme sequence
MKYILGLDPGIASIGWAIVLEAENNQETSRIISSGVIKANFDNFTYLNSKGIPKEGNPVEMFRKGFSVSPNLVRRQSRSARRNLQHYKLRRADLIKLLKENHLVNDDTILYEEGKNTTHQTYELRAKAAMEEISLEELAKVLLMINKKRGYKSSRKEDFDSDEQQGEYLSAIVGRSKTLADNHQTVGQYLMNQLEQHPLKSIKNQTFYRKDYEDEFEQIWKTQIKFHPELTRKLKKELKNRVIFYQRPIESKKQDLSFCELESRQIEIEKNGKKRLVTTGSKVCPISSPLFQEFRMWHRLNDTVVINLNTLEKRSLTLGEKELLASELSIRKELSKKDVIKLLLGKGGKNFDLNFEKLLGNETQARLVNAYLKILELTGHDKLDIKKMKAHEVIDAICTVFANFGYSSEALKGQIENGLDVCQQPYYRLWHLLYSFPGDNTRSGNAKLIQRVKDLFQFDSDEFAKEIAEVRFPDGHGSLSAKAIQKILPKLKEGYQYSDACELVGYKHSKRSITKKENKQRVLQQHLKLIPHNSLRNPLVERILNQMVMLVNYLVDEYGKTYGTFDEIRIELPRELSSNAEKRQRDSKGIDDNQKEKETCREELITILKKHGIKVTYVSENDLLKYRLYKELEKNDFKTLYSNSKVDLIDLIMGRGFDKEHIIPRALRFDNSFSNLTIERTDINLDKSKSTAIDFIRDTYGEEATRQYIAKVNELFRQKAISKTKKENLLRTYDEIPSESLNRDLGLTAYINKKAMEILEPVTRKVVPTTGKITSQLRREWQIETVLKELIWDKYKKLGLINSYVDKNGEIVERINQNVWTKRSDHRNHAMDAITVAFTNPVFIFYLNSLNSRGEAREQLIKMRHKYMHRDEQGNWIFNPPMQIDILRAEVKQQLEQMLIFHQSSSKVSTPNVNITKSKKKKAGNMQQTLTPRGKLHDDTYYGCIQYPECEIVAVGKSFDECKIATVTKASYKIALLERLNQYGGNPKDAFTGKNALDKNPIWLDEMHTKSVPQKVKCLQIKTVYTKRVAVNENLNLENVVNEGIKRILKARLEAYNGKTKDAFTNLEENPIWFNKEKGICIKSVIVKATDVKDPIPLHKEKDRSGKHVIDDEGKSKSVDFVKPNKNHHADIYVDANGDLHEKFVTFFEAVQKANKNQPIVDLNYHADEGWRHLFSIQRFDYLVVPDKVSGFDPSAIDVCNPANYPIVSPHLFRVQKMSSKNYVLRQHLDTSNKTPEELKGVTSIEIRSLSNFLGCMKVSVNRLGRITSAQPIMIL

SEQ ID NO: 3133 - protein, 1068 aa, unidentified
  REGION 1..1068: note = Description of Unknown: Cas Enzyme sequence
MSGYVLGLDLGPNSIGWAMIAAHDDGTPANSFFDTEAAGHPPMGVRIFEAGLHNFNTAKEESLNQQRRIARSMRRNHARRNARRRSVLKVLVNAALLPEDPKERESVFHQDAYELRAHALDQALEPYQLGRAIYHLAQRRGFQSNRKSGEAKEDQGILKEIGELAAEMKAAGSRTLGEHLHKLRSESPHHRIRNRHTRRDMYLSEFERIIAAQRPHHPDKLSDDVVSRLKHFIFYQHPFELTEERRSKAPSRANLHRAPSVKGCPLERGMTCCPKGEWIAQRFRILKEVNNLRVAERYSRERELKGEERDALLALLGERDRVTFDMMRKELAKQGLHPDSMFNLERGERKALNGNVVEHKLAVAFGRSKWRSLEEGVKNLLRDAVLHEPDPSALKSALMEHGADEGKAEKLTGWNPPDGYIGYSRRALEKLVPLLEDGLNEHEAIEKAYPDRPSAGVFSFLPVLDSAETPMDLKSVTNPVVRRALVETRKVVNALVREHGVPARIVVELAREMHQGPQGRKEQSRRRAIQEKRRDEAREQLVGYGGNPNSRQDVMRWLLWKEQNKQCLYTGRPIPPTELYHGAEWEVDHILPHWQSLDDSYMNKVLVHRTANAEKRDRTPIQWLGEGSDAFLQLVARAKRCLNDSQLDFPYPKYKRLLQAEVETDQFAQRQLNDTRYIATAVVKYLQLLYPVDLRRGEKAVQSCRGGLTALLRRSWGLNSVLDDILDKDGKPLKTTDRDGVEIKSREDHRHHAIDAVVVALSTRSLLKRYQDYFKRYGRDGTGDVPLPEGWDFLRDDVERMVRRIVVSHRADRKLRGAFHEETFYGQARDREGNEIPGVFVTRKPLKDLTGKMVRNIRDAAVRDLIMARLRDRGWNGKDNALPKDWEGEGLTMADGTPIRKVRVEVPIASPVDLGHRHAISGNNHHMEIVTLPGKAPDEPRKMAAVVVPMMEAAARVRPAPGSRPEPMVRRVYDDDMEFVMSLGRKETVRLWSPFDGSEVFCVVQNLAGSFTPATTIDLYLRDVRDSRPATEGNKKPFLRLKSFRNWKDLGLKKVQVDPLGRVSPAGD

SEQ ID NO: 3134 - protein, 1180 aa, unidentified
  REGION 1..1180: note = Description of Unknown: Cas Enzyme sequence
MKKILGLDLGTTSIGWAFVHLNEADATQSKVYTGVRITPLTTDEKNEFNSGQAISTTAQRTQKRGARKNLDRYQLRRERLLKITNREGWLDAGESYQLIETDHIWSIRSKAASEQITLEDFAKVLFHLNKKRGFKSNRKANTEEDSNTEFKTAIKESDRAVKELGYTIGQWVNELLHERDSISQRVYRDITWSRSLNEEEFDQIWETQSKFYPQLTPSLKKEIGDYTIFYQRRLKSQKGKLSNCQFYDSPDPKGVRKKVVPASSPLFELFRVWHDINNLDVKLAENRQTLDLPIEFKKFLAKVFTNLKTMHEVFGTKSKPTPLKKKITATDIKKLVIKEFGGKTSDYLVNLEVLIPAITWLEIQEAALFTGYERFDLTAFDYLVDGKAYNDQPLMQLWHVLYSTEEVEDLVKVLREKFSMTQEQITAFEKVHLKDDYGSLSSKAIKQILPHLHEGHMYSEACALAGFRHSSFETKKESEERVLLDKLSHLKRGKLRNPVVEKIMNQLVNVVNCIIASDEMGRPDEIHIEMGRELTATAQQRSKISKAMSSSRKARELIREKLQSEFGIKKVSRNDILKYRLGEETNWISLYTGRPIEKYKVFQTGEYDIEHIIPKSRLFDDSFSNKTLCEAEVNRAKGNMTAFDYMESLGDEHLQGYIERVKFYSVKGGTKQISYGKELKLFMKREDIPDDFISRQLNESRYIAREALKLLQPLISTPIVTTGGTLTSYLRKQWGLEDIIKEINLPKYKELGLVSRAKNKGGQEFDVIEDWAKRDDHRHHAVDALTVALTNRSAVQRIDKLNQFMGDYNVCHDSEEFKSGLRVIECPIPNIRALAKPSFEELLVSHKPGKKVATWSKSTHRVKGGKATRRILIPRGQLHQETVYGKNKIKSNPIELAKVTNPELIIDQDTRLAFQLRLNKSGLTIKKAFGKPALRKEPFTVNGKIIDKVQCWEEYYTIRAEVNENLDVSKVVDEQIKYMLFRRLEEFENSKKKAFTNLDENPIWFDQSKGIAIKKVKIKARPNTLVALRTSEETGNPKDFISPSNNHHIAIYRLPDGKLTSRMVTFMEAVERKQQNLPVVNRDEPGLAYITHFTVNELFSFNEKIPTSKAELSRDLWRVQKLSSQGDGRIDIFFRHHLETNIQREMQYSFRRITSFKNLPRFKHRINVVGKIVDSFKIDL

SEQ ID NO: 3135 - protein, 1372 aa, unidentified
  REGION 1..1372: note = Description of Unknown: Cas Enzyme sequence
MKKILGLDLGTASIGWAMVNQSETKEEKSSILGCGSRVVPLSSDEKDCFEKGKAITTNADRRLKRGMRRNLQRRKQRRDNLRSVFVREGWIDKDASLSEEGKGSTYDTLRLRAEAASNPISLYDLSRVLLSINNKRGYKSSRKTDASETGQLINGMEIAKLLQTRGLTPGQYALEEALAGRKGKIEFYRSDLEAEYDLIWDKQSQHYPELLTDEFKKQLFWQGKNGTSKIFYAKYNIVTADIKGKDKRIQGLEYRVKALSERLDVEALAYVIADLRGEISNTSGYLGAISDRSKELYFNNETVGQSLYRNVLQVPGFSTKNKVFYRQDYIYEFERIWEVQAKGHPELTDELKKEIANHILFYQRPLKSQKGHIAFCEFESSPIKVNVDGVLKAKMTGSRVAPKSSPLFQEFKIWQILNNVSIIDRKTEETRSLHQGEKELLSKELSIKETLKQTKALKMLSLNPRQYELNYKELQGNNTIAALYGSFIEIVNASGHGEYDLSKLRHDEAMPLVSDVLTALGCTPALFSLSTDLPKEEYEKQPLFRLWHLLYSYEGDKSNTGVESLHKRIAELTGLSVEYARIIAGVTFKDDYASVSHKAMKKILPFLKQGYQYDSACALAGYNHSGYETAEERDSKTLKDHLDLLPAGALRNPVVEKIINQMINVVNAAAEAYGKPDEIHIELARELKKSAKEREQATSDIQSSKKRNDEIEQILKESFHIQNVKKADIIRYRLYEELKENGYKTLYSNKYIPVSALFSKEIDIEHIIPQALMFDDSFANKTLEFKDINIEKGRRTANDYVKEKWGDEYYEQYRLRIDDLFNRGVISKRKRQYLIMPETEIPSGFVDRDLRNSQYIAKKSREILEDYVRTVMPTSGSVTDCLREQWQLVDVMKELNFDKYDKASRTYTEADSDGRQVKRIQDWTKRNDHRHHAMDAITIAFTRPSHIQILNNLRARSDKDEAFEALFSKETAVIGKKRIFVPPMPLDELRRGVRESLSNVLVSIKAKNKVVTKNINRIQSADGLIKKTELTPRGALHKEQVYGLRLQYETYYVPVGSKMTAEEIANVASKKEREALLARLMQFEGDAKKAFTGKNAIDKNPLFVDDAHSRTVPAKVKCVRMKNVFSIRKDLTPDLQIDKIIDGQVKKRIRERIESYGGNAKAALSNLETNPIWLDDAQTIRIKRVTIKENFDLYAIRSKRDKNGIVILDGKGQPVPNDYVNLNSNHHVALYKDADGRVQESVVPMLEALNRINRGEPVIDKNYHSDLGWTFLFSLKINEMFVFPDPATGFNPKDIDLMDPANASLISPYLYRVQKLSDGDYSFRHHQETTIENDKALRDITWKRISNIQTMIGAVKVRVDHLGRIVSVGEYD

SEQ ID NO: 3136 - protein, 1068 aa, unidentified
  REGION 1..1068: note = Description of Unknown: Cas Enzyme sequence
MSDFILGLDLGPNSIGWAMVNADEDGNPTTGFFDTSGADHPPMGSRVFEAGLQNFDTAKEQSLNQARRTARSMRRNHARRNARRKSVLKELIRSGLLPAAPAERDAIFRLDAYEVRARALDHPLQPYDIGRALYHLSQRRGFRSNRKSGKAKEDQGILLEIGELAKAIESGGYRTLGEYLHSIRSRSKASKIRKQHTRRDMSMSEFEAITASQKQHHPHALSDETIERLRHFIYFQHPFELTEERRLRAPSRANLHRAPSVRPCPLIPEMQCCPKGEWIAQRFRILKEVNNLKVAVKLSRERSLTPEEREAILKKLSANDRVKFDALRKELAKLGVDPAATFNLERGNRTALNGNAVEHKLAVTFGRSAWSSLPDSQKELLRDGLLHEENSEVLTDMMLRHGADPAKTGKLVGWSPADGYIGYSKPALERLVPLLEQGMNEYQAIEAAFPDRPSSGFFDTLPVLSHSGLPMELNSITNPIVRRALVETRKVVNAVIRAHGKPVKIMVELAREMHQGPEGRKRQSRQRNERENIRQEAKTRVEEYGGNPFSRTDVNRWLLWVEQDHTCIYTSRPIPPTELFQGAEWDVDHILPHWQSLDDSYMNKVLVHRNANADKGDRTPAQWMGSDSEMYNRMLARAQRLVANPAIDFPYGKYQRLQQVDVDTDHFSQRQLNDTRYISKAVVGYLKTLYPVAQRTGERTVQSCRGGLTARLRYQWGLNRVLDDILDKSGNPITSLTRDNIRVKSRADHRHHAIDAVVIALSTRSMLREFQNYYKQQSLPGASEPPMPLPWEFFHDDVARIAPTILVSHRADRKLRGSLHKETFYGVSRDGNGEIEPGLFVTRKSLSALTGKSVSSIRDDAVRAVITNRLRSLGWDGSSNTLPKDWYASPLELSSGTPIRRVRVTVPINNPITLGHRHAISGNNHHMEILALPMTGGTQQLNLVASVIPMMEAASRARPKRGDRKRPVVQTQFDDGMQFVMSLGRKETVRLKNPANGQTTYCVVQKIAGSVEPSSTIDLYLRDVRDSRPASEGNKTPFVRLNSFLSWTQYRIEKIQVDPLGRCQVSGD

SEQ ID NO: 3137 - protein, 1465 aa, unidentified
  REGION 1..1465: note = Description of Unknown: Cas Enzyme sequence
MKYIKYILGLDIGSNSIGWALIQLDLLQKTKRIIAAGSRIIPMDQKVLSDFGKGITISSTAQRTSYRNARHCRERHLLRRERLHRVLHILGFLPTHYDKQIDFSKRYGKFIGDIEPKIAYNEGKFLFMDSFQEMLSDFKSHQPDLFYTKKNGEESKIPYDWTIYYLRKKALSQKISKEELAWIILNFNQKRGYYQLRGEEEIENPNKEVTYYSLMVTEVTAEAPNKKGEIWYSIQLENGWVYRRTSKIPLDDWKGKVRDFIVTTELEVDGSIKRDKEGKEKRSFRAPSEDDWNLLKKKTEQDINTSKKTVGTYIYDHLLQNPNEKIKGKLVRTIERKYYKEELKAILEKQIALQPELFTDQLFADCIRELYSKNEAQQRNLLARDFIHLFVEDIIFYQRPLRSQKTTIANCSLESRSYIDKDSHTRKEAPLKVCPKSNPYYQEFRVLQWLQNLKIYEIESDQEVTHQFIKTLEDKQQLFEFLMNQKEIDCEESLKYFLNQTYPNAKEKALKSELKKWKDTYRWNYVYDIGEKSSKKYPMNETRYELKRHLEKVANLPDDFLSSEVEYLLWHLIYSVKDKVAYEKGLKKFAQKHHLDEDSFVESFKKFKPYPSEYGSFSEKAIRKLLPLMRFGSYWDFNHIDKNTQKRIDDLITGVENEEIRTILREKAEKYQLEKKTDFQDLPLWLAQYVVYNRHAEASSLEKWTSVNDLETYLNEFKQHSLRNPIVEQVVTETLRVVRDIWQQYGQGQANFFNEIHIELGRELKKTAKEREDLSKQNQKNEDTNLRIRALLAELGEDSTIENVRPYSLMQQELLKLYEEGVFSSSMEIEDDIEKIHKKATPSKAELQRYKLWLEQKYKSPYTGQIISLKRLFTEDYEIEHIIPQSRYYDDSLSNKVICESVVNKAPYKDRQLGLEFIKNQGGRIVKELSKENKTIKIFTEEQYRTFIKEHYSNNPAKTKKLLLEDIPEKMVARQMNDTRYISKYISEILSKIVREDERDEGVNSKNVILCTGNITSALKQDWGVNDVWNDLILPRFERMNSLTQSTLFTTYNERYKKYLPTVPMEYSKGFQKKRIDHRHHAMDAIIIACTTREHINYINNQHALEKGKDKKEKQEERDKVRERLCIKKYNNRSEGNYSWIFKKPWDTFTQEVRAALEDIVVSFKQNLRVINKATNYYEHWVEENDKLIKKMVKQEGTNWAIRKPLHKETVSGKIILEREKVSGGKILTATRKTIDSTFTEKVIEGITDTGIQKILLNYLKFKKSPEIAFSPEGIEELNKNIALYNDGKPHKPIYKVRIFEQGSKFPLGEVGNKATKYVEAAKGTNLYFGVYQGKDKRSFTTIPLNEVIERQKQGLPSVPEYNEKGDPLLFSLSPNDLVYVPIEGEIIEDIDFRNLSKEQKEKIYKTVSFTGNQCFFIREIVATSIVNKMEYSPLNKMERSITGIMIKEICIKLKVDRLGNISKA

SEQ ID NO: 3138 - protein, 1618 aa, unidentified
  REGION 1..1618: note = Description of Unknown: Cas Enzyme sequence
MKKILGLDLGTNSIGWALIENDFETKQGKILGLGSRIIPMSQDILGNFDAGNSISQTAERTGYRGTRRLRERNLLRRERLHRVLNVLGFLPEHYANQIDFEKRLGKFLDEKEPKIAWGEDENGKFEFIFQKSFNEMVEDFQANGQDIKIPYDWTIYYLRKKALTQKIEKEELAWIIMNFNQKRGYYQLRGEEEEKTNVKEYVESLNVVSIEKGEIDKKNDKKSWYKMTLENGWEYSATFTTEPNWLNTKKEFLITEEYDDDGNIKVVKDKKTDTTGKEKRRITPLPSFDEIDLMSKEQKDKMYKKIKARTEITISNTGKTVGAYIYETLLERPNQKIRGKLVRTIERKFYKDELIAILKKQIELQPELFTEDLYNDCIRELYRNNEEHQLVLSKRNCFLHLFVGDIIFYQRPLRSQKSTIGNCTLEYKIHKINKKDEKGNPIKNVFEKDAEGKDIEIKEYLKAIPKSNPLYQEFRLWQWLFNLKIYRKDDDIDVTEQFIRDNDDLVSLFEFLMTKKEVNHVDVLKYFITPKMTEKYPNAKVKALNKEIEKELVKYRWNYVFDNSKEKEEDKSKKYPCNKTGSQIKTKLGKDKNVPADFLKIIDEKEVEIKKGKEKGKKIIVSLGTREYQLWHIIYSVKDINEFKTALGKFAQKYNLDETSFVENFKNLVFEENDYGSFSEKAIKKLLPLMRLGKYWNFDAIDSNTKERIEKLQTAEFDENIRDRVREKVNKEKLDKNEDYQGLPLWLAQYVVYDRHSEAEDAGKWKMSYDIQNYLYEFRQHSLRNPIVEQIITETLRVVKDIWEHYAIENNVECVEIYDEKKKKNVKSFGKFFDEIHIELGREMKNTAEDRAKITNQVSDNENTNLRIKAMLMEFAEDDFFKTKIEKADGKIEIINPVRPYSQNQQDILKIYEEDVLRKYSEQELKSEKTELKDKEGKEVTIYNIAKKSAPTDKEIQKYRLWLEQKYCSPYTGEMISLSRLFTTDYEIEHVIPQSRYFDDSLSNKVICEAAVNKLKDSCLGLEFIKKHAGEKVECGMGNIVEIFTEEKYKNFVQEHYKNNNAKRKKLLLEEIPDKMINRQLNDTRHISKFVSKLLSNIVREEKDDDGVNSKNLISGNGKITTKLKQSWGLNNVWNGLILPRFERMNELTNSENFTSKNTEGHTIPAIPVELSKGFQKKRIDHRHHAMDALVVACMTQKHVQYLNNENAKSQKFHLQKGLAKTLRKYETIEKTLQEKDENGIWRIKKDANGKQITKQIEVPKEYFMPWDNFVEGKNFIEQVKSELEKIIISFKQNLRVINKATNKYKKIKDGKKVEIKQEGINWAIRKPLHEETVSGIIDLPWVKVGKGEIITATRKALDKSFNKDKIKKITDTGIQKILINYLESKNNDTELAFSPEGIEEMNKNITQYNDGKFHQPIFKVRVYEKGKGRFILGNTGNKKSKYVQGAPNLFFAIYERKDNKERMFDTVPLNEVMEHQKVQAPTNIEKSERTDIPVKNILDYRGKEVEVNYLFHLSPNDLVYVPTEDEQENIRAIDFENLDKEQLKRIYKVEKFSGTECYFVRNDIAFLIKQYDAKTKLGELESQNKLQTTMCKERIKIADVCIKLNIDRLGNIKPKKQ

SEQ ID NO: 3139 - protein, 989 aa, unidentified
  REGION 1..989: note = Description of Unknown: Cas Enzyme sequence
MAYTLGLDIGSNSIGWAILDKEKQRLIDSGVRVFPEGVDRDTKGLEKSKNATRREARGARRTHQRRNQRKQQLLKTLQTAGLLPQNEPELMSLLHNNPYELRKKVLDEKLEPYKFGRVLYHLSQRRGFKSNRKSSKAKEDSKIVKEAGELQKQIEQANCRTIGEFFAGLNPDEQRIRNRYTFRSMYEKEFDLLWAKQSEYYSQVLTENLRKKIRDEIIFFQRPLKPTDELIGDCELEPGEKRCPRADWFARKFRILQDVNNLRIQNSDGSESKLTAEQRNLVLDELGKKKELKFDDIRKKLNLMETQLFNLEQDGKVASIKGDVFAAAMRSKNVFGSKVWDAMDEQEKIKLNDAFVELEDDQLAEKLKTQYGLNENQIEIAMKVSLPQRYMSFSRKAILKLLPFMEQGCLTSEAIERAGYDRDKNTSGETANKLPLPPDLRNPIVQKALFEVRKLVNAVIREHGKPKNIAIEMARDVQGNRRQREELHWKMLENEQRNKEVRGKLIADMEIIRPSRDDVIKYKLWEECGRKCPYTGRSISQTALFGLNPEFQVEHILPYDRSLDDSYMNKTLCEVHENIHVKKGQTPYEAYSHNPEKYEQIKQNVRVLPWPKRQKFLQKEIDLDQHIARELNDTRYICRETISYLKQLGVYVRGTRGKTTAELRHQWGLDGIFDELNTRRDNDHRRHAVDAAVVAVTENEHLRRLAKSKYAVSGVAFEPPWPNFREEIRENVKQINVSHRVQRKVSGKLHEETAYGPTGKKDENGQDIFVYRKKLEDLTVPMVEKIVDPTVRKIVKDRLAEKGINTASVERKIAKEVWAEPLYMKTKKSDKKVLIKKVRIENVANNAIEMKDKFGRVYRVVEPGNNHHIEIFEYTDKKGETKRDSRVITMFDAVQRSRQGKPVVCKDYGDGRKFICSLVINDLVMMKNKTGEIDIYRVQKMDVNKMVRFRYHTASTIEKKETYIDKTAHLFEGYKVTVDLLGRVYPAND

SEQ ID NO: 3140 - protein, 1004 aa, unidentified
  REGION 1..1004: note = Description of Unknown: Cas Enzyme sequence
MGISKFTIGLDIGSNSLGWAIVDGSPEFNGENIIAGVRVFSGGTAKTQAGEQSRNSDRRAARQARRQNDRYSRRKRKLKKVLITAGMYPCEPKEQESLIEIDPYFLRRKGLYEKLTPEEFGRALLHLNQRRGFRSSLKIQDQAKEEGEIKKNISALSQEIAQNDFKTIGELFAWKKEQGMKIRGQHTSRQMFIDEFELLWNAQAQFFPDLLTEALKNEVYSAIFYQRPLKEQSHLIGKCKLEPEERRCPRSSWYAQQFRILQEINNFRVLSRSGERTLTEEERKQIFQKLMTQKSPVKIQTIKSKLLDLDEIETLNFEATGRDSLEPNYVEAGLQKIFGKDHYLANAEWYRNEVWEALIREDPYDFKQKAENDWGMNEERIKSLFDIKRPSGYTNYSLKAIKKLLPWLEKGFSVYEAIEKAGYQQEEQKELSYLPPIRSDEFRNPIVVRALSETRKVINAIIRNYGMPEKIMIEMARQTKGTIRSRQKQLWENLRRAKYHEEIREKLQEKDIDASRNNITKYKLWEECNYTCPFTGSSISFSQLFGNDYEYDIEHIFPFRRSLDDSFINKTLCKRSENISRKGNRTPYEAYYGTEQYDQILLRVNKNKKMPYAKRKRFSMKEIPEDFTKRQLVDTSYAAKSAVEYLKQLGCEVDTVRGHITSELRHFWGLNSILNDEDDNNQKSRDDHRHHAIDAIVVAHITKKHINALKSKYDFQKNKHFPSPWDAFGIGIDDFRRDVKKSVQTINVSHRPERKISGKMNLETNYGKTGQDNQFVYRVPLQALTPAKVTKIVDPVVRAIVESRLKEFGIEPGKGSKPIKAAVFKEELRMKAKCNKEGPPIKKVRVRASFSNAIPIKDKNGIPYRYVEPGSNHHIAIYEYEDEKGVKRRCKEMVSRFEAYQRRMKGLPIVNKKHPQYPDARFMMSLCINDMVIYKKNNNKYLCRVQKISGEGNGESIDISFRDHTASTIDSEKKGFRVRTLSPSKFDIEKVFVDPLGRVLPAHD

SEQ ID NO: 3141 - protein, 1152 aa, unidentified
  REGION 1..1152: note = Description of Unknown: Cas Enzyme sequence
MKIGIDLGSNSIGWAVVSDNSILASGVRVFPEGINRVKGTVEESKNLKRRLARQVRRQYFRKRMRKNILWGLLEKEGMAPSTEDLKAWREMNPYTLRDKATEEEVTPLEFGRIMYHLSQRRGFKSSMKSADNEEGKIFDGDLKIGKIGITQTEQGINTGGYATLGSYLNSLNPHEERIRNRYTTRKMYRQEFEIIWNVQKAFQPNRYNEDLYNQLGHEKTGVLFFQRPLRSQKALIGKCTFERNKPRIPSSHPMNQEYRAWCMINNIRYGENQKLTDAQRWQILQLAGNQAKLTIAQIKKKLKLLEEFNYEDDSTFPCLTTSFQLNKHFGSKVDLSDTKTADDLWHLFYEAQDPDWLVDKLQLKYAFSEEEAKAVVKGKNRIRLEEGYGSLSALAIRRILPFLKEGYRYDVSVLLAGLCKVMGGDFWGRLSGIEKETLVGNIKAASETRAKGTIRENLWNYIVAEYGVPEKATAADLYHHSDLDSQQDLLDALPEPKKLRNPIVEQALFEMRSLVNALIKEHGKPDRMVLEMARELKNPKKKREEMLSNNRKREMQRNEIKQKLIDEGIRPTGYNITKFLLWEESKEQCPYTGRSIPRSELFDDGIWQIEHIVPYSVSLDDSFGNKTICHADENRRKGNKTPWQFYNFSEGNWAEVKERAKMIFCKGSYPKYIKFINEREPKADDFLSRQLNDTRYMATEAKAYLQKICSDVVVTPGGVTAELRHLWGLDGILSPSIPTELPFDGPGWLVTESDGRIVEFVAWSNAHVQGKIEEKLSKKGIVWSGEMRMGVFYPGKNRDDHRHHAVDAIAIACTERSFVQAISTGHSTGKWLKSEVFQSPWPNFFQDAKRSIDQILVSHKKRKRLLTTRLVKQKINGVKIQHKLTSPRDQLHDETFFGKVLDPNTRTEVFTTRKPLSSITKVKQLRMITDPRILALIDVRAQELGVDLSQKDADLPKNFFFEPDENGIPIPTLYLPGGTERASIPVKKVRVRVVSSNMALRNESTQQYAEPGNNYLAAIIEDSNGVWREEILSFWTAVKRAKNKEPLIGLNQGETIRYIFQANDLYLLNWPKNLNPETAPRELLSKHLYRVQKFSSMFYVFRKHNASTLAFENEEIRIRSFSALNAKSLKKLSIDNLGRLRISPKHEENHQY

SEQ ID NO: 3142 - protein, 912 aa, unidentified
  REGION 1..912: note = Description of Unknown: Cas Enzyme sequence
MKKVLGLDLGTTSIGWALVNQAENENEKSSIIRAGVRVNPLSVDEKDSYEKGKSIETNATRTSKRAARRNLDRSQMRRDELIKLFKEQGWITDDTILSENGNFSTFETYRLRAEATHNPISLEQLSRVLLMINKKRGYKSNRKAVGDDEGHLMDGMTVARELFEKGITPGEYALNILKSGKKHIPEFYRSDLQSEYDKIWAFQSQFYPEILTDDFKKQIEGKGRNDVGKNFLGKYQIYTADNKGKEKKLQAFAWRASALKEKLEPDVLAYVIADIAGGIKNSSGYLGDISDRSKELIFNKETVGEYLYRNIQADSHFSVKNKVFYRQDYLDEFNKIWDIQSQYHSELTTELKEKIRDEIIFYQRRLKSQKGLISICELEQKTIEIEKNGKKIKKVVGPKVAPKSSLLFQEFKMWQILNNVFITDTVTGENRVLALSEMNKLAKELMVVDKMTAKSAMEILFRKEAKFYEVNFKTLEGNHTYSSILKKLIDIINESEALDLKYDKMPSEQIYDAIDKFLVNKGLLNREVLEYDADLPKKEYEAQPIFKIWHLLYSYEGDDSRTGDESLIEKIHQLCGLPIEYARMLSTVTFKDDYGSLSSKAMRRILPYMKQGLTYDKACLEVGYNHSVESLTSEQIENKELVDKLEVLPRNSLRNPVVEKIINQMINVVNAVGEEYGRPDEIHIEMARELKKNQQERANMYEDILDANKRYAEIEKILQTDFGIKHVRRNDILKYRLYQELKNNGYKTLYSNKFIRQEDLFSNNIDIEHIVPQSLLFDDSYSNKTLEFKDTNIEKGKMTARDYIESKYGKEGFEAYKTRVESLFKSGGISGKKTKILLMKQADLPKDFLERDLSMTQYIAKKSKEILGSYVKTVMPTTGSITSKLREDWQLVDVMKELNMPKYDAAGLTTIT

SEQ ID NO: 3143 - protein, 1254 aa, unidentified
  REGION 1..1254: note = Description of Unknown: Cas Enzyme sequence
MEKKILGIDLGVASIGWALVKLDTENQANNEILKMGVRIVPIDSNDVQDYSKGTGESPAHQRTVKRGIRRMYARYVMRRKNLTQKLHQLGMFDASLFSLEKLALWGLRSRAVNEQISLKELGRVLYHLLQKRGYKSNRRESSKEKKETDYVQQVKGRYQQIKDLQLTIGQYFYSELTQNPYFRIKEKVFPRGAYEEEFWAIMRKQQTFYPEILTHEVVDDFYQIIYYQRPLRSQKGLVKICEFEGKWVVKNGREMFVGPKVAPRSSPLFQIEKIWESIHNIRLKNRDGDLYKLSLEEKQKIFQYLNNNEKLTGPKLLELLGKGKNEGWYYNKLIDKGIQGNLTLVKIKKALGDYPDAENLLRFNLEFITQGEEALLVDQETGEILESYVKKEVSPSIENEPLYQLWHVLYSIHQPEECVKVLKSKFSLPEEIAIRLAELDFTAGGYSSKSHKMIRKILPYLMEGFDYAQACEKAGYNHSNSLTGEENLARQLKDKIALLPKNSLRQPIVEKVLNQMIQIVNEIIDESNGLVTREERLNNRFEIRIELARELKQNKQDRAETFKRIKAIERENEKYTKELENYGIKASRNNIVKMRLFNETSVDEDGRINAMCLYCGKMFGKEQALKGEEVDVDHIIPRSLIYDDSQQNKILVHRKCNATKGDMTAYDFMASKGEEALNEYKERVKRLFDKKLITRGKRERLLTAQSKIDSEFIERQLNETRYIGKKAREILTAVSFNVHATSGMLTARLRHLWGWDNVLLNLQQERFEYLCKEKLSEAKEEEIPEIIARMKEEFSKRIDHRHHAIDALTIACTRQGFIQRLSTLHAQHTRDELYRLLNNESGEREDINPEIQERLNLVDKYFISQKPFATYQVQEKAAEIFVSFKPGKKVAVKGRNIVHLQGGKTYVQRGVIVPRGPLSEESVYGKIRFHDKPQPLKYLLEHPDLIVNSRIRDLILKFKQDHPEASPKDYPKILKKEPILLPSGEPLTEALCYAEDYVIRKPLDVNNFKKIDDFKWIVDKGIRERIIKHVEEYGGNIKEALAHPVYYDKEKTRPIRSVRIFTSLNAVVPIKYNSDGQPMGYVKPGNNHHVAIYEDAEGNLHEHVCTFWHAVERYKYGLPVIIKDTTQVWDEILKSSKEYPQTFLGQLPETGWKLKLSMQMNEYFLMFLDPEKAREAVENKDLKTIAFHLFRVYQLSSTDYNFVYQYYAKNPGTVFDRIEFKSLRIKSIKALMNAIPQKINIDLLGNLPIAFNGK

SEQ ID NO: 3144 - protein, 1134 aa, unidentified
  REGION 1..1134: note = Description of Unknown: Cas Enzyme sequence
MKVLGLDLGTNSIGWSLVDQGNSTIVAAGVRIFTMGVIKETLGKGDKEESLNAQRRMFRQLRRQYFRRRLRKLLLLKELRKDGWCPMIAEQWEAFRKGKGYRPDSVTRAWFALNPYELRAKAVHEALEPHELGRVLYHLSQRRGFESSSRSAEADEDGILFTGKDGKTGINETRDALGTETLGSYLSTLRTESGQSYVRSKARIRNRYTTRDMYADEFAAIWQFQKSLNPTLTEALRIKYGGYKKRGDTMDGILFFRRPLRSQKGARGKCIFEKRKERCNASHPLAEQFRVWQFVNQVEQGGRRWDDSTRNKAFVYLMSQVRSVKFSALRKNLKLADSSLRFNYDDDTSCPAAPTTAQLAGKDLFGAKRWADFTEQEREDIWHVLIDFDDRDRLKQYAASKWGLNEAQVLKLAKVRFDAKYASLSRKAIKNVLPYLERGFQYSEAVAMGGVRAAFREDWFSLSLEQAERFEGICLEAIRAKDSGGIRAALTDALTSDPIRLPIERMKHLYHHSELDKRENFAPLFPVGVEADRRILRLKNPVVVKALFEVRKVLNALIKEYGKPDVVRIEMARDLKNTRSQRFDIQREQRRLEARNAEYRKRLEEYDIRPTHENLLKYALCQECSHTCVYTGRSIGMDDLFKRGIVQIEHIRPWSRSLDDSFINKTLCFADENRKKGDRTPYEYYSQMGPEKWAEVKDRALRLFHTAPGWPDRYKKFKRFVDEKWEDEGFVQRQLNDTRFIAKEVGSYLKQVFPKVETYPGQMTAKLRAMWGMNSILNKEDASKNRDDHRHHAVDALVLACSEVRFLQELTRWNQYGERTGSVRDFPKPWPLFRQDAERVIGGIWASHDQPRAPISTRNVVIELPNGRKTSNKGVSVRGALHKETVFGKRHDPITGAEAYHVRKPLESITDEEQLNKVVDSKIRSLLADAIELKGGFEGHGKNRKIPKGAFFSTNEQGERIPLIFLPNRKGGDPVPVLKVRMRENLGNTVELHNNINAHVNPNNNHHVLIYVDRNGDWREEVILFWEAARRKALGESVYQLPHDGIELIYVFEENRIYKMSPKWFVKENSELSHCDYILARVQNISKLFYNFRWVNASTLDNESELVRIKSFKKLREVSPVEVKIDPIGKLIEM

SEQ ID NO: 3145 - protein, 1405 aa, unidentified
  REGION 1..1405: note = Description of Unknown: Cas Enzyme sequence
MKRILGLDLGTTSIGWALVEEAENETEKSNIIKLGVRVNPLSVDEKTDFEKGRPLSTNAERTLKRGARRNLQRYKQRRENLIEELIENSIISKITPLTEIGKHTTYQTLSIRAKAANEKIELEDFARVLLTINKKRGYKSSRKASNDEEGVAIDGMSVAKELYERNITPGQYVLELLSQDKKYIPDFYRSDLKDEFDKIWNTQKDFHKGSLTDELYDDLQGKAKAQTWAICKQPFDLKGVTLKGNAKEQRFKKYEIRVNGLKQKIDLEHLTIAFQEINNELNNSSGYLGAISDRSKELYFNNLTVGQYLYEQIEANPHTSLKNQVFYRQDYLDEFEKIWTTQAKYHEELTNTLKEKIRDITIFYQRKLKSQKGLLDFCQFESWDQEYFDKTTNKTKKRTVGRKVISKSSPLFQEAKVWQNLNNLVFINEDANEQIVINELDNHILDEIFQELNIRGNQKPNDILKLLKKHISEITKLSDWKTNFESIEGNKTNQVLYNAFYKIADAHGYGHDWDKKSVSEIKIELIAIFSDVGINPKILEFDSTLSGKELENQASFQLWHLLYSAEEDVKINEEDKIKYGNSDVGLKKNLQAKFGFAPEDTKIIASISFPQDYGNLSSKALRKILPELKKGYEYSDACKNVGYNHSKSLTADDLEKRILKDKLEILKKNSLRNPVVEKILNQTVNVVNQIIAQFGKPDEIRIELARELKKSAKQRSEMTKGIADATRRNDDIKKLIAKEFGIPNPSKNDVIRYKLYDELSTNGYKSLFSDRLIKIEDVFSKKIDIEHIIPKALIFDDSFSNKTLAYREVNLEKDKSTAFDYITNYKNLEVESYTERVETLFKSGSISRAKRMKLLMSAKDLPKDFIERDLRNSQYIAKKAKEMLFEVIRNVVSTSGSITDKLREDWDLINVMKELNFPKYEALGLIEIEKRYNKGTEKYTERKVIKDWSKRNDHRHHAMDALTVAFTKHNHIQYINNLSARYNTNHQMHSRILNIQSSITEMVSSNNGSKKRRFTAPMENFRTEAKKHIEAILISFKNKNKVVTQNINIYKAGKEERKKIQLTPRGQLHKETIYGKIKRPEPKATKINANFDFEKALTIMNPTQRELVINHLKTYNNKHKVAFSSKEIKSKPLIHKNKPLTEVICFEEIYTIRKGINPDNFKTQKNIEKVIDVKTKEILSKRLNEYNNDPKKAFSDLDKKPIWLNKDKGVKIKSVAITGVNNVEALHAKKDHFGKPILDENGNEIAVDFVSTGNNHHVAIYKDEKGNLHENVISFYEAVERSNQGLPVIDKFYNSELGWEFQFTMKQNEMFVFANDNFDVNEINLMDENNSTLISKYLFRVQKISTKNYMFTHHLETQATNSDDLKNKKMLSGLKYNSIRSPDSLSRLLKIRINHLGQIVQVGEY

SEQ ID NO: 3146 - protein, 1398 aa, unidentified
  REGION 1..1398: note = Description of Unknown: Cas Enzyme sequence
KLGVLLEYAMKKILGLDLGTNSIGWALVHEAENVKESSEIIKLGVRINPLSSDEVIDFERGRPLSVNKDRTLKRGARRNLQRFKLRRKNLIDILIKAKILRSDSVLTEIGKNSTYETLQLRSKSVKQQVKKEEFARVLLAINKKRGYKSSRKSNNKEEEGNLIDGMFIAKELYNNNLTPGKYVYQLLSENKNYIPDFYQSDLKNEFLAVWTFQKQFYPDILTEQLFINLQQKNKNQTWAICKEPFDIKGIVYKGTAKQKRLEKYKWRSKSLTSKIDLETLAIVLQEINNDLNKSSGYLGAIGDRSKELYFNNITVGQYLYQQIKKNNHTSLKNQVFYRQDYLDEFERIWEKQSKFYPELTNKLKEEIRDVVIFYQRKLKSQKGLISICELEQKTIEIEVKNKTKKKIIGPRVVPKSSPIFQEFKIWQILNNLTFTRKNETNLFEKQNYKVTLENKKNIFNELNIKGTLKISDVFKLLKLNTKDWKCNFDTLEGNVTQQAIYNVLQKISEDQDSSFDWSKKNAFEVKEELRATLPTIGIHPNILDFDVNDDNFEQQPSYQFWHLLYSAEDDTKITEEDEKNYGKNYVNLKKKLHLKFGIPIKYTSLFTNIVLEPNYGNLSAKAIRKIIPHLQEGYDYYDASRLAGYNHSNSITRDENLKRELKDKLELLPKNSLRNPVVEKILNQLVNVVNQIIETYGKPDEIRIELARELKKSRKQREEIYKNISIATKRNEEIKKTLQTPPFNLKSPTKNDVVKYRLYQELKPLGYRTLYTDKYISPQLLFSKEIEVEHIIPKAVLYDDSFSNKTLAFRQVNLKKSKMTSYDYIDKIEHKNLEKYIQRVSDFYNGGKNKISKSKYLNLLTPLDELSDDFIQRDLKNTQYIAKKAKNILLEICREVHPTNGKITDKLRRDWDLLNIMKELNLSKYRALGLTVFEERKHGNNVEKIIDWTKRNDHRHHAMDALVVAFTSKSHIQHINTLNAESAQNSIQSVIISQNQKTKLKNKGLYVLPMSNFRTEAKKHIESILISFKTKNKVVTKNMNFEQKTLTPRGQLHEATIYGKIKSEILKDETIGGTFIIEKINTITKPEYRNLLLKRLEENHNNPKKAFAGKNSLIKKPITLSNGKEMPLKIKTKKYETIYTIRKNINPDNFKNIKAIEKVIDEKHKNILKERLTKFNGNGKEAFSNLEENPIWTNKEKRIALKRVTIKGVSSVVSLHDKKDHLGNVILDSNGKTQSVDFVNTGNNHHIAIYKDENGKLYDKVVSLFDAVTSCNLNQPVIQKNYNKDLGWEFLFSLKQNEMFLIPTNEFNPKDYDLKNTKLYSLLSKHLFYIQSISLNKYGNNIIRDFVFRHHLDSLKTKTNALKNYTYFHVKSLDDIRLIGAVKVRINHIGQIVQVGEY

SEQ ID NO: 3147 - protein, 1555 aa, unidentified
  REGION 1..1555: note = Description of Unknown: Cas Enzyme sequence
MTKKILGLDLGTNSIGWALVENNFDKKEGKIIDNGVRIIPMDKGTMDNFGIGQSISQTANRTAYRGTRRLYQRDNLRRERLHRVLNVLQFLPNHYTNAIDFKKYLGQFKKGQEVKLNYIPNSKGKDKFIFQKSFLEMVAEFKKEQPQLFHTRKNGIEAKISYDWTIYYLRKKALTQKIEKEELAWLLLNFNQKRGYHQLRGEDEDFDKEKNKTFEKLEILKVVDTGDILRKTGEKLYDIFFTNGWQYDKQTTKPENWLNKTKEFIVTVTTLKDGSIKRSYKSVNSEEDWIAIKKKTEQDIKQSNKTVGSFIYDSLLKNPSQKINGKLIKTIERKFYKEELEKILIRQIEFHSELKDKNTYIKCVEELYPKNEAHKNNIISKKKNEMFRYLFIDDIIFYQRPLKSKKSNIASCPYESRIFFKGDEKVKQGLKVISKSHPYFIEFRLWQFIHNLRIYKVEKEKDTDLTSQFLETEDDITDLYDFLNDKNEVEQKNIIKYFIDLKKIDKKEKDIYRWNYVMDKKYPINPTRNSILNRLKKVENINGSNFLTLEKELHLWHIIYSVTDKKEFEKSLESYANKFELDKDTFVEAFKKHPPYSSDYGAYSEKAIKKLLPLMRRGKYWDENAIPEKVKAFVFEIYERIKHLKDGEKKEQGLKDAVNLISDDAISKQFIKSFLRHTLNNPLMGLNTYQACYAVYKRHSEASLITQWKSPKDIDNYLGSFKQYSLRNPIVEQVVLETLRTVRDIWEYNLSIDDKFKFSEIHLELGRDIKNSADKRKRISQKQTQNENTNKRIKLLLEEMYEEGARSYSPGHQEILKIYEEGITQSPQTSYEKVKEEEIEKIKKNAKPSSNDIKKYKLWLEQGYISPYTGKTISISRLFTHEYQIEHIIPQSRYFDDSLGNKIICEATINEDKSNKTAYEYLKAKGGSIVHGIRLLTIEEYENHCSKYFKNNRTKLKNLLSEEIPEGFINRQLNDSRYIAKFIKGILSNIVREENENEITSKNLIAVSGAIIAKLKQDWGMNEQWNKIIQPRFERLNGISNSEKYGYLDYKKDGNKNNTGKQFFRIIVPEGVNKKRIDHRHHSLDAIVIASCTRDHINYITSLETERKNHKLVSKLCNLKKINRKRNDKIETIEVFDSYKKPWKNFTIDVLNTLEKTTVSFKKNTRIITKTNNKTWQWVKDEKGNLKKQLVSQIKGDSRAIRRPLHKETFYGLVNIKQKKKGSSSLRNFIEYPEFVIDKEIRGKIKALNKLFDSDKKKILKYLKDNPIKQNGEVVDKIKVWEWTKNATASRVKLSDSFTRKQLESITDNGIQKILEKHVKGYIKENGEEQFNLAFNPEGIEKLNENIIVLNNGKNHQPIYAVRVYEEGSRFSVSSNENNLNKTKKYVEAAKGTNLFFAVYWSVSKEQRVYESIPLKEVIDWQKWRAKNKVFDEPLIPINKEKGEFLFFLSPNDLVFVPTKEEQDTPSLVDFSNLSKEQVDRVYKMVSTTKGECHFVSQYYSTNIISNENGSNNKNERVQLKDLNELDEKGKPKMIKSICWKLKVNRLGKIEKVER

SEQ ID NO: 3148 - protein, 1378 aa, unidentified
  REGION 1..1378: note = Description of Unknown: Cas Enzyme sequence
MKKVLGLDLGTNSIGWALVNEAQNKNETSEILKLGVRVNPLSVDEKTDFEKGRPLTINADRTLKRGARRNLQRFKLRRENLIEILLRENLINNNTLLTETGNAVTFETLAFRAKAANEKIDLEAFARVLLSINKKRGYKSSRKAKNEGEGNLIDGMAVAKELYDRQITPGQFVLGLLEQEKKYIPDFYRSDLKAEFDAIWTFQMQFYPQIFTNEFYKSLEGQGLQSTRKRFLAIHQIYTAENKGKRDIVKLQHYRWRVEALTKQLELPEVAYVLVEINNNLNNSSGYLGAISDRSKELFFKQETVGENLYNQIQKNPHTSLKNQVFYRQDYLDEFEKLWEMQSQFHSQLTTELKDEIRDVVIFYQRKLKSQKHLISTCEFEKYHKVLPKSSPLFQEFKIWQILNNIEFENSETKETKILSQEDKDLLFEELNLRGDLKPDVVLKLMELPKNFWVINYKESLDGNTTNKALYNVYHEIAENEGYGFDWSKKSAKEIKNELTNIFPLIGIKPEILKFDSDIEGNDFSKQLGYQLWHLLYASEDDVKTKKEDVLLYGNSNTSLKKNLFNTYGFKPEYGAMLSAISFSQDYGNISARAVKKILPYLKVGHEFSEACSLAGYRHSHHLTKEEAAARTLKDALSLLPKNSLRNPVVEKILNQMINVINQVVETYGKPDEIRVELARELKKSAKERAETTSYVNAGKRRHEDIRKILTKDFGIQNASRNDIIRYKLYEELSSNGYKTIYTNTYIPKELLFSSQIEIEHIIPKAKLFDDSFSNKTLAFSKPNKDKGDSTAFDFIESYFLSDLENYKARVSTFYGNKAISKAKYNKLLMKESELPDDFIERDLRNSQYIAKKAKQLLLEVFRTVNTTTGRVTDKLREDWDLINIMKELNLPKYRALGLTEMQERKNGKKIEQIIDWTKRNDHRHHAMDALTVAFTTYNHVNYLNHLNASRFEKNKELFAVRNKITKMYGPENGSKKRRFIPPMTNFREEAKKHIEAILISFKAKNKVVTKNKNKIKTKGGIKKVTQLTPRGQLHKETVYAGRKRVVVKIEKISAKFTLEKIEQVTKPIYKIALLKRLQENNGDPKKAFAGINSLSKKPVLLETGETIPNEVKTQYFETIYTIRKLVNADNFKDLKSLQKVQDLKIREILENRLEEFGGEAKEAFSDLDKNPLWLNKEKGIKIKRVAISGVSNVETLHHKRDHFGTTILGENGVEIPSDFVSTGNNHHVAIYSDKNGKLHDNIVSFYEAVSRVNAGLPIVDMTLNESLGWKFLYTMKQNEMFIFPNENFNPKEIDLLDVKNRLLISKNLFRVQKLSKVDYGNSAVRDYVFRHHLETKIEDNKALKNITYVVCKSLPLFKDIVKVRLNHLGDIVHRGEY

SEQ ID NO: 3149 - protein, 1285 aa, unidentified
  REGION 1..1285: note = Description of Unknown: Cas Enzyme sequence
MRVMGLDLGTNSIGWAIVDDVGGCMSLVDKGAVIFEKGVGEEKNVEFSRASERTGYRAARRIKYRRKLRKLETLKVLARYSLAPQLSKYDLDEWRYAKHYPDAQSFREWLNCTAQSREQKKRNPYYCRYAAVTRKFDLNSETDRFMLGRAFYHLAQRRGYQSNRVAGEDKNGTVMGAIQELHEKMNGRTLGQYYFEESLGDEAVRGAGHYTHRKDYLDEFHRICEVQQLDQKMVRELDRAIFFQRPLKSQKGLIGKCPLEPKKPRIPISHPIYERFRVLQFINNIKVREPIGASLEPRFLNEEERRIALQNLLMQGKNEKFEKLVKKLLPKRTQVEYGGKYREADRESWVFNCRKDMAMPGAPFTAKMISVFGDNWENEVYARYAKAENKTKEQVVGDIWHALFSFDNTEKLRQFLVNNLKLDNVSAEKLAKPLPQGYGNLSLKATKNIMIWMEKGTIYSQAAFLGKLPEIFRLKKIDWNSVKADVEKLVKAIMSRHSLDSAIEFAVNCEISKLRDHEFAGGNGLFLKIPENVTTLKDNMLQCIQDRYGERRWAGLSDEQREESTSKAVSLLLTHASRHQGKGEYVKGLTLESRLKQSLADKYNFAYADPSQESELRLLYHPSAIEYYPQAQENQLGDPRINAIKNPVFMRSLFVLRRLINTLLNEGIIDKDTRIRVEMARELNNANNRAALHSWQRELEQKNAKYASVISENGYDATATNIVKYKLWMEQGKQCLYTGRQIGLHDFLGENPVFQIEHTVPRSRRLDNSQENMTLCEMHYNCMVKRNFLPQELGGASEILLRARHVYQPHIDELESQMERSRAQSRAAQDKESKDKARQKLLRAKLERDYLRGKLKRFELIEPPNGFTNNQLVDTRIISKYAVLYLKSLFNRVETLKANVVHEVKDIWGLKEKSRDNHVHHAIDAVVLACLNKKFYDKLASYYDKYERFRKYGEPMPSAPQPWDDFDRYMNAEIQNEIFIPHLHKDNTLKPTYKILRKRGKNVLKKNGSPVVLQGDTARGQLHQETVYGVIQMPPAKGVESQVNERKAVVRKFVRDLDTKDVDNIVDPVVREVVRANFENRKTTTIWLNKEKRVPVKKVRLVVRNKAESLIPIRKQRDQSRQRYKSHQMVANGSNYITGLYRGTINGKSKADWKVISVFDAVKARRLGSWNEIMPEVDEKGLALRYKLKSGTNVLFWKDSPDELKRLGNSELLRRLYRVAVMAGSRIIFNHNQTALSAGELGSGSSKIDWEGSANRLRLSVNNINIAVDGNDFDLDILGRINWKE

SEQ ID NO: 3150 - protein, 1466 aa, unidentified
  REGION 1..1466: note = Description of Unknown: Cas Enzyme sequence
MKRILGLDLGTNSIGWALVEQDFEQKEGKILGMGSRIIPMDAAILGDFDKGNSVSQTAERTKYRSVRRLRERHLLRRERLHRTLNVLNFLPEHYAAEIDFAKRFGKFKPETEPKLTYHNNEFLFKTSYQEMLEDFKINQPQLVKDGKLIPYDWTIYFLRKKALSKAISKEEIAWVILNFNQKRGYYQLRGEEEEEKDNVKEFVVALTITAVEKGDVDSKNNKRTWYKMTLSNGWEYSATFIVEPKWLNKEKEFLVVEEYDESGNIKIVKDKKSDSTGREKRRLTILPTFDEINVMAKKDQDKIYGKIKARTELTIKNSQTTVGAYIYDTLLQNPNQKIKGKLVRTIERKFYKDELIAILRKQVELQPNLFSDDKLNECVHELYKQNEAHQNQLNGKDFVHLFVNDIIFYQRPLRSQKSSIGECSLEYHTFKMKDKDGNAIEKKQYLKAIPKSHPLYQEFRLWQWLYNLKIVLKEDDSNVTEHFITNAEDLEFLFEQLNNRKEIKQDALIKILLEKSGLKGKALSAELAKYRWNYVEDKIYPCNETGTQIRTRLDKVENITSNFLTTEKEQQLWHIIYSVNDKVEYEKALKSFAIKNHLDTLSFVENFRKFPPFKSEYGAFSEKAIKKLLPLLRIGKYWSWDAIDDNTKNRILNLQNAEVDESIRIKVREQVHKEKLDKNTDYQGLQLWLAQYIVYDRHSEASDFQKWSSVADLDKYLYDFRQYSLRNPIVEQVITETLRVVKDIWTQFGEGKENFFDEIHVELGREMKNTADERKRLTNVVTDNENTNLRIKNFLVELFNDGSIDGVRPHSPMQQEALKIYEDGVLNSGIEIPEDIQKISKSALPTKSEFQRYKLWLEQKYKSPYTGQIISLNKLFTSEYEIEHIIPQSRFFDDSFSNKVICEAAVNKEKDRHLGFEFIKSKGGSIIDTGFGKSVKILTVEQYEEFVKEHYKNNRTKRNKLLMDEIPEKMVERQLNDTRYISKFISQILSNIVRLDQNDDGVNSKNILPGNGKITTQLKQDWGLNDVWNALILPRFIRMNELTQTTDFTSTNTNGKTIPTVPLELSKGFQKKRIDHRHHAMDALVIACATRDHVNLLNNQSAKSENNRYDLQTKLRKKEKWQNNGKEGEKFTTFFMPWATFPTDAKKQLEETVISFKQNLRVINKTSNKSERYVEKNGKLKKVLVPQTEGDSWAIRKPMHEETYSGLVDLPRIKVSKGKFLTATRKAVDTSFSPKVIESITDTGIQKILLNYLKSKNNEPELAFSPEGIEEMNKNIEIFNDGKKHQPIYKARIFKETAKQFKVGQAGNKKAKFVTAAGGTNLFFGIYQDENGKRSYDTIPLNEVIERQKQGLNSVPETNEKGHQLLFHLSPNDLVYAPEEGESFDVNNLNISRMFNVNDFNGGTCYFSPNSFAKNIAPKEIDLNYDKTKDKTSGSFDSKTASYKGVSIKEICIKLKIDRLGNVSNS

SEQ ID NO: 3151 - protein, 1015 aa, unidentified
  REGION 1..1015: note = Description of Unknown: Cas Enzyme sequence
MNNLTLGLDLGTNSIGWALIEYDDNQRPQKLVACGSRIFQEAVEAKTGTPKNHARRAARAARKLVARRKQRRNKLLNLLIGHHLLPADEIQRDILLLNNQENNPYQLRKRGLNERLEPFALGRALYHLAQRRGFQSNRKARDEKEDGKVKSAITSLRADMQAAHCRTLGEYLASQIKQRKRYTDRAMYTEEFDTLWQAQQAYHPDLLLSALKVAIRNTIFFQRPLKSQKHLVGKCTFEPKRKRAAKATLLTQRCRILQDVNHLTVKNPVTREYRPLTQEERKRLVDALNKQKSMAWETARKILGWNKVDSLHEGETFNLEDGKKCKLLGNHTAYDLRNALGERWDALSEQQQDSLITDMLTIDNVQGFLNRMQTHWGFDAATAESLAKIELEPGYARLSAKAMRSIVPYLQQGMIYSDACKAAGYDHSKPKQQTITDKLGLPIYVRNPVVQKALFETRKVVNAVVRQYGKPSIIRVEMARDMKLSKRQKDDMQKEQNVREKANEQAEKILRNEFGIRQPSRADIQKYHMWQECKEVCPYTGTLISREMLFSAEVDVEHILPYSRSLDDSYMNKTLCMAGYNRQVKHNQTPYEIGQGNPLVYAEIYQRVKMLPFPKRRRFEQKDIDTDAFVTRQLNDTRYICVEVKDFLQQLGAPVEVSKGEATATLRYRWQLNTLLSVDGNNVKNRADHRHHAIDAVVIALTNRPLFQSLSRLSAQSGAALSERGFDLPQPWEGFYNDVYEKIDTMIVSHAPARKISGALHEATAYGYSDSEKCFVYRKPLDKEFTLAQVNKIRDGEVKRLVIARLKEIEPSIERALDESLPKKERLKMDKKREKEIIKQAFGNPENPLLHKDSNTQIRSVRIKDNSSKAGMLPIKDRHGKEYKFYPLGNNHHIEILQHKQEQKKVGVVISAIEALHRAHDGLPVINRNGPWQFDGVSYSTNDWTFVMSLAINDVIAKPDKSDIFRIQKISGNTQIFYLPHTAATLDESVSKLPNTFDYTKVGTDPLGNLTLCND

SEQ ID NO: 3152 - protein, 1040 aa, unidentified
  REGION 1..1040: note = Description of Unknown: Cas Enzyme sequence
MSKTILGLDLGSNSLGWSLLSADDAGQPTDIIDIGVRIFQKSVQEKPPTPKNQQRRTKRLARRTIQRRARRKLKLLNYLIRLNLLPTELSGNLQPEGILNGIGDPYQLRAKAPDEDLTAYELGRVLLHLVQRRGFLSNKKTLLGRDMLDDPDVISVLGDDTDSTDSAEETAFKADISLLRAEINKLEPPDSEQESPDSEHKKTLGKYLASLPKHECKRNRDGNHIRTDRQMYLDELSLIFEKQSVCHPVLTEDVQMAIKEIIFFQRPLKLKDDRIGKCSLEPNKKRSAISRLEYQRFRYLQDINNLTYFCPNTEQWVKLNNQDKEKLRVLFEVSKELTFARIKKELALKRNIKLNLETRDKPLKGNTTVFSISEVYSDWHTLDALQQRAFVEDLISIKKKSALKRRLVSHWGLNGEDAVRVCMVELEPGYGSVSLKAINKLLPHLEAGLIYSDARVAAGYGYEKEEIEIESKLGMPPELPNPIVMKGLHELRRVVNALIAEHGKPDIIRIEMARDLEMNTKRYKAHEARQKLNTKLNDEAQKAYQNVGIEHPKLQLSKYPSRDQKIKYRLWKDQNMCCAYSAKTVSLGKLFSADIEIDHILPYSHSLDDSYMNKVVCYAKENQVKGQRTPMDAFGANEEKWEQITQAIQRLPKQLSKKRDAFYKTSADLSDHDFIGSQLTDTRYMSKVAGTYLESLGSDITFTRGIMTSWLRYQWDFNSLISATDNKERGDHRHHAIDAVVTACIDRNLYQTLVEVSRSLESSQSSLSMRDVYIDPTINDFKDKLKTKLDQMIVAHAPNRKLTGALHEEKGVGFIEGIGTVNRKRLNEDFELKHAKNIIDDNVREIVTTHLEKHNGKPKLAFAPGFKLYNTGGEILIKRVRVVQATTSLEKLENTKLAIKDKAGKVFKWHAYGNNHHVEILKNRGNNKYKSEFVTTFEASQRARTPQGNGTQIIQQNHGDEWEFLMALHKNDLVRLTVDGQKKIYRVQVLEGAGKIIIRDHRAATLNNPQKMLRKSISTLLETYEMTPIKINAIGKLLDD

SEQ ID NO: 3153 - protein, 1491 aa, unidentified
  REGION 1..1491: note = Description of Unknown: Cas Enzyme sequence
MKRVLGLDLGTNSIGWAVVKAEQNERNELQLVGIEAAGSRIIPMDAATLGDFDRGNSISQTAERTRLRGIRHLLERCLLRRERLHRTLDILGFLPLHYSQALNRYGKIIDGEEPKLPWCKNRIGKYEFLFIDSFNEMLKDFKIVHPELEGKKIPYDWTIYYLRKKALTQKISKEELAWVLLNFNQKRGYYQLRGEEDETASNKKVEYVALKVVSVEDTGEKRGKDMWYNIYLENGWIYRRTSNVPLDWVGKTKEFIVTTDINEDGTPKKDKEGNIKRTFRSPKEDDWTLIKEKTQFEIEHSGKTVGTYIYDSILQTPSQKVRGKLVRTIERKFYKEELKRILDKQTEFHPELQNDELYKACIEELYPSNEAYRLNIASRDFTYLFVDDILFYQRPLKTKKSLIANCPYEGHVGIDKATGEKKKYGVKCIAKSHPLFQEFRLWQFLSNLRIYKKGLADDVDMTQDFLKTEEDYVALFDWLNEKKTIAQKSFLKYPAFGLKKDADNYRWNYVEDKDYPCNETRAQLLAYLSKTGVSSDFLTTKQEEKLWHLLYSIDDKHELGKALHKFAETNSLDDLFVETFLKFPPFKKEYGAYSAKAIKKLLSLMRMGKYWSEATIDNESRIRIEKIVTGEYDEKIKNRVREKAIHLTDVSQFKGLPLWLACYIVYGRHSEAKDIVKWESPNDLQKYLDSFKQHSLRNPIVEQVITETMRTVRDIWKQYGKIDEIHVELGREMKNPADKRKKMTQQIADNENTNLRIKALLTEFANPEFEIENVRPYSPSQQDILRIYEEGVLGSVDNIPEDIENVLKKFKESDVKKRPSRSEVLRYKLWLEQKYRSPYTGQPIPLAKLFTSAYEIEHVIPQSRYFDDSFSNKVICESKVNKLKDNLLGFEFIQKYHGEKVELSFGKVVNIFTETEYEQFVKDHYSRNHTKMRKLLMDSIPEEFIARQLNDSRYISKVVKGLLSNVVREEGEEEVTSKNVIVCTGGVTDRLKKDWGINDVWNKIILPRFTRLNVITGTSQFTTRTTNGHEVPSMPLEFQKGFNKKRIDHRHHAMDAIVIACANRNIVNYLNNESASSKSKVSRYDLQVLLCDKVKTDNKGNYKWTIKKPWESYTEDVYHVLKDIVVSFKQNLRIINKATNMYARFDDGKKKCAKQEGSNWAIRKPMHKDTVYGEVNLRKIKTVSLNEAIKNPLRIVEKEFKQKIIQLLNIGLDTKKIKKYFEKNKDIWQDINLSKIAVYYFTKETKDRFFATRKPLDTSFNKKKIEESVSDTGIQKILLRHLELKDGNPELAFSADGIDEMNRNIVELNGGKHHQPISKVRVYEKADKFAIGSKGNKSAKFVEAAKGTNLYFAVYETEIQNERTSKVAKKRTYATIPLNIVIERLKQGLSPVPADENGNDPKFILSPNDLVYVPDVDNYSNSINYNKIYKFVSCTGNEAHFVPCFIASPIIETKELGSNNKAQRAWTNEMIKEVCIPLKADRLGNIIKIGY

SEQ ID NO: 3154 - protein, 1237 aa, unidentified
  REGION 1..1237: note = Description of Unknown: Cas Enzyme sequence
MKILGLDLGVASIGWALVEKNNENGEINLIKSGVRIIPIETKDALQFSSGNTASPNIERREKRMQRRMYFRRKKRNQSLIKALKDKGLWDVNLINIEKNKLWELRNNAVNEQIPLTELGRILYHLAQRRGYKQMRIEQDESDANSKSDYKKNIYTRYQTIKNENVTVGQYFYKELSNNEHYRVKEQIFPRKAYEEEFEKIINKQKEYYPDILTDEYNNKIRHIIFHQRPLKSQKHLLGVCTLEGKTIKIKNNDGTVKEKYAGPPVVAKTNPLFQIHRIWQTINNITIKNKKTHKIYELSIEEKNKIFNELQNKDSLSIKQLYKILNLSDDEWYFDKLSKNGIKGNELLTLIRNALKGENYPQDMLKLEIKIINYKKKIVDKDTGEIKEQELEMIDPDVVNEPLYKLWHILYSVVDKEECMKALIKNFKLTESAADKLSDINMNSMKYGSLSLKAIRKTLPYLMKGMIYSVACDTAGYDFSNAITKEENTFRKVKNKLDLLPKNSLRQPIVEKILNQMIHVINYIIDENNGLVSREEREKGNFAIHIELARELKTSKDEKQKISSSIRRNKIENEKITSELTNKYGLTPTRKLIEKYKLYNELIPDGSNVVQPQCLYCGGFISLTEALTGDAIDVDHIIPQSKLFDDSKNNKILVHASCNRTKGNLTAYDFMKTKNSDIFNNYLSLVETLKNKKSISYIKYKYLLISEKDIPQDFLDRDLRVSQYITKKARELCMNISRDVLVTSGTITARLRELWGYNDILFEINNELMNNLDLTDDDIAQLEEIFRDKRTDHRHHAIDAVTIASTTRSIIQRINTLSSTESKEKINEYLKQMNQESLDTVYNPNEKNLRLLHKYLANQPHPKRDQVKQSMKYILISFKPGKKVATYSKRIVYLGNKPKILQTRILTPRGALHEESYYGRIPIYEFKDLKYAIQNPDLVVNNHIRNQIKELLDKYNNDTKKLWKDIDKEKVFIYSDINNSNAIKDVKCYHYEYVIKKSVQGDKVDQKAIDKKIKEILANSKNVKEEVYFNYAKHIPIRSVRVFTGLNESSMRPIRLNDKNEPITFVKLGNNHHIAIYQDKNEKYQEHLCDFWHAVERKKYNIPVIIENPDKIWDEILENPDSYPQDFLNKLPDPSWHLVLSFQANEMFVLGLSNEEFDQYFVDKNYAILSNHLYRVQKLSTNQYFFRKQNDTSSDLSSLYRKIEYLKQLSIQSLLKENPIKVRINYLGEIVDYKKTF

SEQ ID NO: 3155 - protein, 1242 aa, unidentified
  REGION 1..1242: note = Description of Unknown: Cas Enzyme sequence
MKKILGLDLGTNSIGWAVVNADENGKPVSIERMGSRIVPLSPDDTNEFTKGNAISKNQSRTEKRTARKGYDRYQLRREYLTAELRKSNMLPDERLIKLPVLELWELRAKAATHEIQLTLPEIGRVLYHINQKRGYKHAKSDESADTKQKAYVAEVNARYALIKERNQTIGQYFAEKLKENEIETPKGKFYTFRIKEQVFPRRAYEAEFDQIMECQKVFYPEILTEKEIDKLRNEIIFYQRKLKSCKHLVSICDFEKREYENKEGKIVFGGPKVAPKSSPLFQTCKIWEEVNNITLKNRKNDELYITLEQRKAMVDFLDTHEKLTLKDLYSILGISKQDGWWGGKAIGKGLQGNTTKIALQNALGDFENAEKLLQFNLKNTDSGLTDELTGEVIQVIEANVEKEPLYDLWHTVYSISDREELANALKKKYNIYDEDIINRLYSIDFVKQGFGNKSAKAMRRILPYLQQGLKYSDACEYVGFRHSDSLTKTENEARQLLDKLPPVKKNALRQPVVEKILNQMINVVNALMVEYGQFDSIRVELARELKQSKDERNTTFLQNEAYERLNESIAKRLNSEGITPTKRIIEKYKFIFPTKGCIDKKTGKFVSKNFDALATVNQCIYCGKPFSLSAALNGEGYEIEHIIPRDLICDNSQSNKILSCRNCNSTKNNRTAFDFMRSQDKAVFDAYIERVEKWYEDGIISPSKRERLLLSYEDYLERKKKGKTTEEDKKYWEEFVSRQAGETQYISRESIRILKQCCRNVNVTSGTVTATLRHLWGYDEILHQLNFERYKQAGLTEIVTWTSDHGKNEHSKEQIVDWSKRIDHRHHAIDALVVACTQQGFIQRINTLNADDTKDLMRKQIESAGIKFEEKKVLMDKYLTSFVPFTTKVVADEVKKILVSFKAGKKTASTGRRVKYVKGKKEVLQDGIVIPRGALHEEGVYGQIEINGKKEIVKKYKLGKGAQGFVFTGKETYEKKVNKKTEEVQVVDKVEDVLGSIVDGNIRAKILERLNQGFEEGKDYRNDVKKALDNLNNLDNNPIYADKNKTIPIRTVRCRTGLSAVVPIKRNELGESIGFVKPGNNHHIAIYRDKEGQLHEHTVTFWHAVERKKYGLPVIIDNPSEFWDSIMDKQLPESFLEKLPDVNWIFEMSLQQNEMFVLGMEDEIFEDAIRYKDYSMISKYLYRVQSISGSDYWFRLHVETQNDKSSSAKDAMKYHRVKSLKALFELHPRKVNISVVGKIIEL

SEQ ID NO: 3156 - protein, 1428 aa, unidentified
  REGION 1..1428: note = Description of Unknown: Cas Enzyme sequence
MEDFILGLDPGSNSLGTLVRDLSYDKLLDQIVYYSVDTFDSVVVNGESLAAKRSKDKRQRRQLRVRRNRLWATLALLIKYNLCPLKQEELDAWRIYDKRRGYFRKYPINSKSFSQWIALDFNGDGTSDYQTPYEIRHLLATIQLDFTKTENRYLLGRALYHIAQHRGFKSNKKGFGRKSDDHEETEEPIIDMAEQLKQSELQKSNKLQAYMDNHSPKINTVGSAFHLLLTEGIGEDLTGPIRVRGSKYEAIRSQLQDEIKFIFNFQEGLKDKKECLAELLCDKEGSGTIFFRNPPRKSSVGTCTLEPKKKRCLESHPDFEKFRAWSFINSIIIRNSNGELVNLPLELKQMIYQKLFIADKDFQFRDIRAFIQQQDGFEKINLRYSSRPKTRTINYPSDYPVSACKVTKRLIDLFGSNWETKVLPIDGKKRRGHGKKHPSRLIVYKPMDIWHQCLCIDYPDELLDYANRVLGWDDEDKIQKLEYLWNDISDKRCRLSHKAIRNINYFLERGLQYSDAVFFAKIPDIVGQDAWKVKEKEIFQFIQGGYCTLKKNVVQHSAIVAITNRLIADFKTMTEDEENQNSDKKKRFDTSINKNDEKKILRFIESHYGKATWKTFDVQKQQTIKENVIEEYRSFLEDSNRDFRKMPRLGDELAKVMVNDFFQDKSVENDFGKLYHPSMISKFTPIDITGRGDMRLGSPALGNIRNPVYLRAMHILRRKVNALLDAGIIPLDSTRVVIEVPREINDANMRKAYSLYQSRQQKEKEYILAALPKDVKYSNDDIEKVRLLLHSNTDYINEDTPIEDKKDSKARNERLYKKWLKDGGRCYYTGEPIKLEDLGLNGSIPNVDFEHTIPRSILPDNSRKNQTLCFNYYNRNVKEDQLPALLPTYEEEISPRLQPIRDKVERIKNEISTCRSKSRRAADKEWKDYWIVRRHVWEMELDYWQGKLQRFTAEEVPESFRRSQLTDTAIVAKYATLYLKSIFHRVDVQKGSVTALFRKLYGFQEKDEAKDRTNHYHHAIDAAVLTMIPPPAQRDRMIALYYEREEAKDKNEIGKIIENLNKEVRAARLGTDLKSLKRSVMSIEKQIKSSVLVNKNVVDRQLKPNKNGDSIRLDLHEKTFLGIVKTVKKEKNTKDGSVNVTRIPRPVKRVKLSKLSTKGDIEKCLESIVDGKLRNYLKKVYEQRCKENVPLKDILSGIYYDFGKSGVHQPVRHVRCYRAKISYESAIPVSRHVFRKVDAPAYKQFAYVKNRENVLLLIYEKRNKNGKSLWKGRYISAFDLSKVAGLFRKKFRKHQRFTIQTINDIPEETGWLYYDSSCEYRLRHVIKPGLRVLLKENNENLRRLSTSKLLKRLHVIVKVNESKGIFLCHHTLVNGYTEIEEGGRNKSISQIDNKTINIFMDKQPLFEYVNFKIYPNKKTDGIIKWKDK

SEQ ID NO: 3157 - protein, 1224 aa, unidentified
  REGION 1..1224: note = Description of Unknown: Cas Enzyme sequence
MKKVLGLDLGVGSIGWCLIEKDDNNTPKRILRMGSRIVPISSDEETGYTKGNAISKNADRTVKRTARKCYDRYQLRRKALVNLLKRLGMEPNKNLMFEQTPIELWQKRADAASKEVSLEELGRVLLHINQKRGYKHSRISNSDSKETAYVQEVNSRYDDLKAEGLTIGQHFAAKLKENEQETADGKKYYNYRIKEQVYPRHAYEEEVKQILEVQSQYNPDVLSPDVCKEIMDIIFYQRDLKSCKNLVSLCEFESYTITKDGKVINIGPKVAPRTSPLAQLSSILETANNITIRNRKNDELYISPEQRKAIADFLDNHEVMKLTDLYNILNIGRKDGWWAGKAIGKGLKGNTTKCQIREALSGLPKEQVDSLTAFNLEIDENVDEETGEVRKRINNTQAEQQPLYKLWHMLYSIKDNKELAGALNHLGIEDEESIEKLCKLDFRTAGYANKSAKAIGRILPYLMEGMMYSEACELAGFDHSRRINPDRVLLTHLPQIQKNELRQPVVEKILNQLVNIVNALLENEGAIDEIRVELARELKQSKDERNEAFKRNNQNERLNKELAERIMKYGLTPTRNRILKLKMWEESEHSCMYCGQPVDPVEFLKGVDVEREHIIPRGLLFDNSFTNQVCSCRRCNSKKGMRTAYDFIADDKGQEGLDTYIDRINDLFNRKKISRSKFNRLLASHKAYISRKSQGKETDEDKELWEIFIDRQLRQSQYIAKKSVEILLQVCKNVYTTSGSVTDFVRHQWGYDELLHELNFERFKKAGLTAMVKQLHSGKEVEVERIKDWTKRLDNRHHAVDALAIACTTQGMIQRLNTLNASRDVILEELNSNDQRLVDPDRSMLEKWIYVQPHISYAEAKDEIDKIVISQRPNTRITVPGKRYVTKNGKRTLAQTGIIVPRGALHAEFVYGRIMKQEADGFTMTPQYVRKYKLGIGAQGFLFNGKEFYKEELKKDSKTGLSSIVVTDKIKDVLDKIVDGGIRKRILERLNRGFVGGADYRANIAQALANLKNLDEDPIYSDDAKTRPIRTVRKYVSSSTMVAVRKDSNGKPMSFIEPDGNHHVAFYKDENGVIKESIVTKWQAVQRKLNHIPIIIDNPSQTWSEVLGRNDVPEELLQSLPKDSSTFLLSLQIGEAFIMGMEDSDYQKALEKRDMRTLSEHLYFVQNISSNNYRLRRHVESSFDITDMNKEDQRFLNIKSVNSFFNNNPHKVKITILGDIIADL

SEQ ID NO: 3158 - protein, 1174 aa, unidentified
  REGION 1..1174: note = Description of Unknown: Cas Enzyme sequence
MKKILGLDLGVASIGWSFIEESEKQSRILGMGVRIIPMSADERDEFNSGNSISKNAKRRIKRGMRRNIYRRTMRKDLLKSALHEIAMLPSIESFGSHGKMELWELRANAAKQRIELEDMGRVLFHLNQKRGFKSNRKTDGAEEDAKKESEYKAEIRKNATSLEESGLTLGQWMFRELRSDEHFKLKGKIFPRDVYIAEFDAIWKEQVKHHSVLTEALRVKIRDGIIFNQRPLKSQKALVSRCEFVKRYAVVNDKRMDVSPRVAPASSPIAQLTRIYEKVNTIEFSDRYSRVLEIDRLRLLSIASELRFREKMAIKDVASALGMPKDARNNMNEKGLVGDTTFAAIAKVLSKYDEGAACLDMLKTWSPSVVTKTRLDKTTGDMNFEFLEIDESVEKHPYYQLWHALYSVDHEEGLLKRLMGEYKLSEPCARELMKLDFTKAGFTKKSAKAMRLILPYLFEGYVYSDAMAMAGMRHSDSLDKAENEARELLNRIPNLQKNSLRQPVVEKVLNQLINIVNAIIEHPEYGRPDEIRVELARALQQSREERNRETKRNSDAEKRNKIIEEKLSGEYGFRKVTRSLINKYKMYEECQGISLYTGKRVALADFLNGAGVEVEHIIPRSKLFDDSMSNKTLAESWVNKAKGNMTARDFMELQPVPGLQSFDDYMKHVDELFKTRVISFTKMKRLTTIEKEIPNDFISRQLRQTQYISKKAYQILALVSRNVHASSGSVTDYLRDKWGWNDVLKRIHWERYEKLGLTSVEERENGSRVYNIEGWSKRDDHRHHAIDALVVACTKQSFIQTLNNLSQLLVDDTTQSALKEMDHVKLKDIAGKAPFTTDQIIDVAEKVVPSFKAGKRVASKSKNKATGHVQLIPRGALSEETVYGKIKQQVKRSVALNKNFDPSWLLVDPQIRTLVAKRLAEHEGNAEKAFKKKLFWDSSETQAITKVEIWDWQEETVVKYNITSLKLKDLDYIVDDVVKAKLKAFFASYPTEKDAIKNLGTQTIWFNEAKRIPIRSVRLRTGLGKVVPVKEVEPGMATGYVNSGNNHHLAVYERPDGTLFDRMFTFQEVFAARAAGLPVYQQTCEDGVLKWKFEQNDLFSINSKDGKDRYYRLQKISKKSSGAIDIFFRLLTETSLKDDMNSRNLEVFYNTQSLSALKVLNPQSVRLSLLGELT

SEQ ID NO: 3159 - protein, 1497 aa, unidentified
  REGION 1..1497: note = Description of Unknown: Cas Enzyme sequence
MAKIIGLDLGSNSIGWAVVDNEKNKIEAAGSRIIPMDAGRLGDFEKGNSVSFTADRTKYRGMRRLHERFLLRRERLLRVLNILGFLPEHYASQISRYGKFPRNEEPKLAWHEGKDGKMEFLFKTSFDEMVADFRMAGFDKKIPYDWTIYYLRQKALTYPISKEELAWLLLQFNQKRGYYQLRGKVDEGMGDAEEKGEEKSYQELKVLKVENTGEPDKKGGTWFNITLENGWVYRRAFRIAPDWEGKTRGFIATFRLDKNGQHRTDTPSISSPSEEDWGLHKIKTEHDIQQSGTTIGAYIYQSLRNNPDRKIIGDLVQTVDRNLYKEELHRILDTQQRYIPELNNKELYTYCIEELYPANEAYRNSIANKDFNYLLTDDILFYQRPLKTKKQLIADCPFEQRNGRPVKCIAKSHPLYQEFRLWQFVTNLRILKEGIDITTTLLPDNNSYVSLYDYLSSIKEVDQASILHYFKIGKKESSQYRWNYVQERKYPVGETHSILLGGLSKAGIDKDFLTPEKELHLWHIMYSIDDQCQYEKALHTFANHQRWDENKCSLFVKAFKRLTVYKDKDYGAYSAKAISRLLPLMRQGKYWNVNAIDEQTRSRIEHIITGEEDSTLTASVREKFKYLENINQCQRLNTWQACYLVYNRHSEAIDAQKWNKPEDIDTYLSHFRHNSLNNPVVEQVVTESLRVVRDIWKQVGTIDEIHIELGRDLKKTKAERERLTKAISEGEATNQRIRLLLTELMNPECQVENVRPNSPSQQEILKIYEDGVFHQGLEIPDDIKDIQKRFTAAKNQPSRAEVMRYKLWLDQKYISPYTGKAIPLAKLFTPAYQIEHIIPQSRWFDDSMSNKVICEAEVNQLKDRELGHEFISTHAGESVTLSMGETVEILTISQYEALTKKLFADNPGKMRRLLMDEIPDDFTQRQMVDSRYISRLMMHLLSNIVRAKDEMEQLEESTTSKNVIPCNGTTTDRLKHDWGINDVWNRIILPRFERLNKITQTSNFTAITAEGHTIPHVPLDMRQGFNKKRIDHRHHAMDAIVIACTTRSHINLLNNKSAESNERYDLQHKLRTKDYYLDKKGNRQLHFGDFIKPWPTFTEDVYHTLENIIVSFKQNLRIINKTSNHYSVLRNGKHVIQSQEKGDSWAIRKPLHKETVFGEVNLQLKKKVRTKEAIANPGNIVDSELKEKVKYFKSLHHSDRQIIEYFDKHKDIWSEAADGKIEVYYYTKDTNDRYFATRYNNELTNYLGKCSNGNEALKRIEKITDTGIQKILISHLFNENKDPQKAFSPEGIDRMNANIIQLNEGKKHQPIKKVRVYTKGDKFNLTDTGLKSYKYYNGDDGKNLHYIIYTTEDSPKRNFLVVELQVSVECQKKYGKHWQKHLEYFLKNYGKEREHHCGLLPENAIIKQILSAGDIIYMPPTQEQSIPDHINPSNLYRVRSFDDGHFYCIPINVANIVLEGKEFGSPNKTQKDYNDKMIRDFCIPIQVDRLGNIIQIG

SEQ ID NO: 3160 - protein, 1484 aa, unidentified
  REGION 1..1484: note = Description of Unknown: Cas Enzyme sequence
MAKILGLDLGTNSIGWAVIDNEKKCIDAAGSRIIPMDAGRLGDFEKGNSVSFTAERTGYRGMRRIHERFLLRRERLLRVLNIMGFLPEHYASLLDRYGKLPNETDAKLAWCEDKDGKTEFLFKPSFEEMVLDFRKTGHMQNIPYDWTIYYLRKKALTQPLTKEELAWVLLQFNQKRGYYQLRGKDDENDANEEKGNEKEYTELKIVKVEDSGDKDKKGNSWYNISLENGWTYRRVFKFAPDWKNKTRGFIATFKLDKNGKRTDEQPKLSSPDESSWGLRKIKTENDIQKSGKTVGEFIYNVLLLNPDQKIIGEAVRTIDREYYRDEITRILDKQREFIPELSDNNLYQQCIEALYPSNDAHRRNIIRRGFTYLFTDDILFYQRPLKTKKGLIADCPYEERHGKPIKCIAKSHPMFQEFRLWQFLANLHIYHQDVDVTTQFLPDNKAYADLYNHLASQKETDQTALLKYFGIGKKDIAQYRWNYVPDRKYPCGETRAILLGGLRKAGIDDSFLSNDIELQLWHILYSIDDTTQYRKALRTFADKQNWDDEKCESFAKAFDKLTVYKEKDYGAYSAKAISRMLPLMRRGTYWSENAIDSKTKKRIDHLITGEVDSNIPNTIRERFRNIESIEQCQGMNTWQACYIVYGRHSETIDAQKWNKPEDIDAFLKTFRHNSLNNPVVEQVVTESLRVVRDIWKQTGRIDEIHIELGRELKKTKSERESLSQTISQNEATNQRIRMMLVELMNPDCQVDNVRPQSPSQQEILKIYEDGVIKSGIEMPDDIADIQKRFTAAKNQPTHAEVVRYKLWLDQKYISPYTGRPIPLAKLFTPAYQIEHVIPQSRYFDDSLSNKVICEAEVNQLKDRQLGHEFIVAHHNETVHLSLGGTATILSVEAYEKLVNETYANNRAKRKKLMLDDIPEDFNARQMVDSRYISRLMMHLLSNIVRSEDEEGNREESVTSRNVIACNGSVTDRLKHDWGVGDVWNRIILPRFERLNAITGTKDYTSVTANGHIIPNVPLHLKQGFNKKRIDHRHHAMDAIVIACCSRDHVNLLNNESAGSSTRYDLMHKLRTKEQYTDKQGKTHDIFGNFIKPWPTFNEDVYNTLQGIIVSFKQNLRIINKTSNRHTVINDGKHVIVRQKKGDSWAIRKPLHKETVFGEVNLQLKKKVAIKKALTDINSIVDRELKETIKKKKALGYSDKQVIDFLEKEKDVWSEIANGKVEVYYYTKETADRYFATRKDLLSYMSGCSTVDAAQKAIDGITDSGIRTILRNHLAAENNNPTEAFSADGLERMNRNIRELNGGKLHQPIKRVRVFEQANKFSVGANGQKATKYVEAAKGTNLFFVIYTTAKGTRGYATVPLNVVIDIQKKYEKLWKEHLAERLKEDDLKLMEKDDQVLYILSPGDLVYVPEDNDYTTVNISRIYKTVSSTTSRLYGIPFHVASSIIDKFEFTSMNKSERTLQGEMLKEVCIPIEVDRLGNIIKIG

SEQ ID NO: 3161 - protein, 1489 aa, unidentified
  REGION 1..1489: note = Description of Unknown: Cas Enzyme sequence
MATILGLDLGTNSIGWAVIDDRIKQIVSTGSRIIPMESGRLGDFEKGNSVSFTAKRTQSRGMRRLHERFLLRRERLIRVIRIMGFLPEHFSSQLSRHGKLPEDKELKLAWREGPDGKMEFLFKAAFEEMVADFHRAGVDTKIPYDWTIYYLRQKALTQPISQQELAWILLQFNQKRGYHQLRGKADEGLDDSKEKNEEKSYHELKVIKVEDTHEPRKGGGSWYNITLENGWVYKRPSLVKPDWEGKTQSFIATFQLDKDGKRKSDQPKLRSPQGDDWGLRKIKTEQDIEQSGLTIGAYIYQSLLHNPDQKIIDGHVQTVDRKLYLSELRSILDQQKKYIPELNDHELYLRCLEELYPNNEAYRNSIANRDFTYLLAEDILFYQRPLKSKRSLIDNCPFETRHDKPIKCIAKSHPLFQEFRIWQFISNLHIFESYNDVTPIFLPDHEAYTNLFDFLSSIKSIDQKGLFRYLKIPKNDAPKYHWNYVQDKAYPVGETRAILLEGLRKANIPKTFLTPEKEEHLWHILYSVDDPTQYRTALRTFAKHQGWDDSQTDSFAQAFDSLTVYKEKEYGAYSAKAISRLLPLMRRGKYWNLSAIDKDTLSRIEHIITGESDPTLTPFVRDKFSYLHDIAQCQGLGTWQACYLVYNRHSEAIDTAKWNKPEDIDIFLDQFRHNSLNNPVVEQVVTECLRVVRDIWQQIGHPDEIHIELGRELKKTKAERERLTKIITEGENTNQRIRLLLLELLNPDFQVDDVRPQSPSQQEKLKIYEEGVFQSGIEIPDDIQDIQKRFTSPKNKPTHAEVIRYKLWLDQKYISPYTGKPIPLSKLFTTAYQIEHIIPQSRWFDDSYSNKVICESEVNQLKDRELGHEFIVHHAGEEVSLNLGGTVKIFTADQYEEHIKTTFTSNPKKMRNLMLDEIPEDFTSRQMNDSRHISRLMMQLLSNIVRTEDEEGNLENAATSKNVIACNGAVTDRLKHDWGLDDVWNRIILPRFERLNKITDTTDYTDTTPNGHTIPSVPVNLRPDFNKKRIDHRHHAMDAIVIACTTRNHVNLLSNEAANNSKRYDLQHTLRQTEYYQDPQGNKHERFTLFYKPWPSFTQDAYQALQSIVVSFKQNLRVINKTSNRYTIIQNGKHITVKQTKGDSWAIRKPLHKDTVFGEVNLQLKKKVRIKEALKDPNSIVNRELKAKIKKQKALHYTDKQIIEYLNKHKDIWSEAADGKIEVYYYTKDTPNRYFATRKDLFELFEKVSTLPDALKVIDSITDSGIRSILYAHLQAESNNPSEAFSADGIERMNSNIQTLNNGHPHLPIKKVRKYEQANKYSIGDKGQKKTKFVEAAKDTNLFFVIYTDAKGTRGYVTVSLNLIIELQKQYEKDWKNHLAGRLKADDLQMLPPSAHILHVFSPGDLVYVPTEEERQNGVHNINVQRIFKMVSCTGKQCHFLPYTVATVVLPKTEYQAMDKMERALTGEMIKEVCIPIQIDRLGNITKIG

SEQ ID NO: 3162 - protein, 1487 aa, unidentified
  REGION 1..1487: note = Description of Unknown: Cas Enzyme sequence
MAKIIGLDLGTNSIGWAVIDNEKQIIESAGSRIIPMDAARLGDFEKGNPVSYTSKRTQYRGMRRLRERFLLRRERLLRVLNILGFLPEHFASTVSRYGKIVSDDEPKLAWKEGTDGKKKFLFQSSFNEMVSDFVRNGVDQKIPYDWTIYYLRQKALTQPISKEELAWILLQFNQKRGYYQLRGKADEGLDSTENQKEEKSYHELQIVKVENTGEKDKKGGIWYNITLENGWIYRRAFKIAPDWEGKTRGFIATFKLDKNGKHKTDTPSISSPSEDDWGLRKIKTENDIKQSGSTVGAYIYQSLLQHPDRKIIGDLVQTIDRELYVDELSRILDKQIQYIPELNDQELYNRCIAELYPSNHSYRKSIAHRGFKYLFIDNILFYQRPLKSKRGLIDDCPFEERNGKAIKCIAKSHPLYQEFRIWQFVTNLRIYQNDEDITATLLPDAEAYANLYQYLSTQKEVDQSEILHYFKIGKKELPSYRWNYVEDRKYPVGETRAILLGGLRKAGIAEDFLTQEKELQLWHILYSVDDQKQYRKALRTYAHRQSWDAEKTEAFAQAFDKLTIYKEKDYGSYSAKAIGRLLPLMRQGRYWKADNIDMKTRNRIEHIITGEEDETIKASLRERFNYINNIDQCQGMNTWQACYLVYGRHSEAIDAQKWNTPEDINKYLSHFRHNSLNNPVVEQVVTESLRVVHDIWEQTGHIDEIHIELGRELKKTKNEREHIAKVIAEGEATNQRIRLLLNELINPEYEIEKVRPFSPSQQELLKIYEDGVFNSNIEIPDDIRDIQKRFTAVKDQPTAAEIKRYKLWLDQKYISPYTGKPIPLAKLFTPAYEIEHVIPQSLWFDDSMSNKVICEAEVNRMKGKELGHEFIANHHGEKVHLTLGGDVEILSLEAYERHVKTTFTSKKKREILMMDEIPDDFTSRQMNDSRYISRLMMHLLSNIVRTEDEKGNLEESTTSKNVIPCNGSITDRLKKDWGINDVWNRIVLPRFERLNTITGTRDYTTRTENNNTIPSVPLSMRQGFNKKRIDHRHHAMDAIVIACTTRDHINLLNNEAAKSKNRYDLQNKLRTIEYHNDKNGQRQPHFGDFKKPWPTFTEEVYRTLERIIVSFKHQQRVINKTSNFYNVIHEGKHIAIKQTRGDSWAIREPLHKETVFGEVNLQLKKRIRIKDAIANPNSIVNRELKEKIKYFKSLHHTEKQIIKYFDDHKDIWSETADGKVEVYYYTKDTKERYFATRKDLIDIMKDSTTIAAAQKTIDSITDSGIRSILQAHLAAEGNNAAEAFSADGIERMNRNIMALNGGHKHQPIKKVRVYEQANKYSIGNTGQKATKFVEAAKGTNLFFVIYKNKKGTRGFATVPLNIAIELQKKYEKKWKEHLSDRLQQDDLMLMPTDADILYILSPNDLVYVPLEDERVDINHIDPKRIYKCISFTERTCLFLPYSIASIILQKKEFEAKNKMERTITGEMIKEICIPVTVDRLGNIQHIG

SEQ ID NO: 3163 - protein, 1426 aa, unidentified
  REGION 1..1426: note = Description of Unknown: Cas Enzyme sequence
MTQKVLGLDLGTNSIGSSVRNLDLSDDLKGQLEFFSSDIFRSSVNKESNGREYSLAAQRSAHSRSRGLNEARRRKLWATLDLLIKYGFCPMSPESLMRWRTYDKQRGLFREYPIDDKDFNAWIMLDFDRDGIPDYSSPYQLRRELVTRQFDFDQPIERYKLGRALYHIAQHRGFKSSKGETLLQQETNSKQSLTDEAADVAGEMKASEEKLSKGLSTYMKENNLLTVGAAFAQLEDEGVRIRNNNNYRAIRSQFQHEIETIFMFQQGLSIKSELYEHLISEKKNVGTIFYKRPLRSQRGNVGKCTLERTKPRCAIGHPLFEKFRAWTLINNIKIRMSEEEQAEQLPMKLRFELYNDCFLAFVRAEFKFEDIRKYLEKRLGVHFSYNDKTINYKDSTSVAGCPITARFRKLLGEDWESFHVDGQKQRQAHGKNNASFHTVSYTVEDIWHFCYDAEEPEVVLSFAQDNLKWEKKKAEELVRIWSAIPQGYAMLSQKAIRNINKMLILGLKYSDAVLLAKVPEIVEITDGEILSVTEDYHRVEAQVRYEKQINNIVNALIAKYKSASEEYRFADHNYEYQLDKSDEEEIVRQIESCLGARKWSLMDADEQTDILQKVRDKYQNFFRSHERKFVESPKLGDCFEEYLVKRFPMVKGEQWKKLYHPSQIAIYRPVSAGKDRSALRLGNPDIGAIKNPTVLRVLNTLRKRVNQLLDDEVISPDETRVVVETARELNDANRKWALDTYNRIRHDENEKIKKILEEFYPKRDGISTDDIDKARYVIDQREVDYFTESKTYNYNKDIKKYKFWLEQGGQCMYTGRTINLSNLFDPNAFDIEHTIPESLSFDSSDMNQTLCDAHYNRFIKKNHIPADMPNYDKAVIIDGKEYPAITSQLQRWIDRVERLNRNVEYWKGQARRAQNKDRKDQCMREMHLWGMELEYWKKKLERFTVTEVTDGFKNSQLVDTRVITRHAVLYLKSIFPHVDVQRGDVTAKFRKILGIQSVDEKKDRSLHSHHAIDATTLTVIPSSAKRERMLELFAKIEEVNKMLSFSGNEDRTGLKQELDGLKNQLNKEVKACRIGHNVSEIGTFINDNIIVNHHIKDQALTPVRRRLRKKGHIVGGVDNPRWQTGDALRGEIHKASYYGAITQYAKDKEGKVLMKEGRPQINPTIKFVIRRELKYKKSSTDSGFVSWDDLGKAIVDKELFALMKGQFPAETSFKDACEQGIYMIKKGKNGMPDIKLHHIRHVRCEAPQSGLKIKEQTYKSEKEYKRYFYAAVGDLYAMCCYTNGKIREFRIYSLYDVSCHRKSDIEDIPEFITDKKGNRLMLDYKLRTGDMILLYKDNPAELYDLDNVNLSRRLYKINRFESQSNLVLMTHHLSTSKERGRSLGKTVDYQNLPESIRSSVKSLNFLIMGENRDFVIKNGKIIFNHR

SEQ ID NO: 3164 - protein, 1422 aa, unidentified
  REGION 1..1422: note = Description of Unknown: Cas Enzyme sequence
MTQKILGLDLGTNSIGSSVRNLDLSDDLKGQLEFFSSDIFRSSVNKESNGREYSLAAQRSAHSRSRGLNEVRRRKLWATLDLLIKYELCPMSSDSLMKWRTYDKRRGFFRKYPIDDKDFNAWIMLDFDGDGIPDYSSPYQLRRELVIRQFDFNQPIERYKLGRALYHIAQHRGFKSSKGETLLQQETNSKQSLTDEAADVAGEMKASEEKLSKGLSTYMKENNLLTVGAAFAQLEDEGVRIRNNNNYRAIRSQFQHEIETIFMFQQGLSIKSELYEHLISEKKNVGTIFYKRPLRSQRGNVGKCTLERTKPRCAIGHPLFEKFRAWTLINNIKIRMSEEEQAEQLPMKLRFELYNDCFLAFVRAEFKFADIRKYLEKRLGVHFSYNDKTINYKDSTSVAGCPITARFRKILGEDWESFRVDGQKQRQAHGKNNASFHRVSYSIEDIWHFCYDAEEPEAVLSFAQDNLKWEKKKAEELVRIWSAMPQGYAMLSQKAIRNINKMLILGLKYSDAVLLAKVPEIVEITDGEILSVTEDYHRVEAQVGYEKQINNIVNALIAKYKSASEEYRFADHNYEYQLDKSDEKDIIKQIESNIGTRKWSLLDADEQTDILQKVRDKYQNFFRSHERKFVESPKLGECFEEYLMKKFPMVEGERWKKLYHPSQIAIYRPVPANKDRSALRLGNPDIGAIKNPTVLRVLNTLRKRVNQLLDDGIISPDETRVVVETARELNDANRKWALDTYNRIRHDENEKIKKILAEFYPKRDNISTVDIDKARYVIDQREMDYFTEAKTYHKDIKKYKLWLEQGGQCMYTGRTINLSNLFDPNSFDVEHTIPESISFDSSDMNLTLCDAHYNRFIKKNHIPADLPNYDKSVVIDGKEYSPIKPRLQRWADRVERLNRNVEYWRGQARRAQNKDRKDQCMREMHLWKMELEYWTKKLERFTITEVTDEFKNSQLVDTRVITRHAVLYLKSIFPHVDVQRGDVTAKFRKILGIQSVDEKKDRSLHSHHAIDATTLTIIPGAAKRERMLELFAKIEEVNKMLSFSGNEDRTGLKQELDGLKNQLNKEVKACRIGHNVSEIGTFINDNIIINHHVKNQALTPVRRRLRKRGHIVGGMDNPRWQTGDALRGEIHKASYYGAITQFAKDKDGKVLLKEGHPLVDPTIKFVIRRELKYKKSTADSGFASWDDLEKAIVDKELFALMKGQFPEETSFKDACEQGIYMIKKGKNGEVDTKLYRIRHIRCKTKQKNALKIKEQAYKSEKEYKRYFYAAVGDLYAMCCYTNGKTREFKIYSLYDISCHRKVGVEDIPEFITDKKGNRLMLDYKLHTGDMILLYKENPEELYDLDNVSLSKLLYKINGFENDGLRIRMVNHLVAKEAMGESVKDYAKLPDIIRCGVKTIKFLVMGENRDFVIKNGKISFNHR

SEQ ID NO: 3165 - protein, 1424 aa, unidentified
  REGION 1..1424: note = Description of Unknown: Cas Enzyme sequence
MTQKVLGLDLGTNSIGSSVRNLDLSDDLKGQLEFFSSDIFRSSVNKESNGREYSLAAQRSAHGRSRGLNEARRRKLWATLDLLIKYELCPMSSDSLMKWRTYDKRRGFFRKYPIDDKDFNAWIMLDFDGDGIPDYSSPYQLRRELVTRQFDFDQPIERYKLGRALYHIAQHRGFKSSKGETLLQQETNSKQSLTDETTDVAGEMKASEEKLSKGLSTYMKENNLLTVGAAFAQLEDEGVRVRNNNDYRAIRSQFQREIETIFKFQQGLSVENELYERLVSEKKNIGTIFYKRPLRSQRGNVGKCTLERTKPRCAIGHPLFEKFRAWTLINNIKIRMSEEEQAEQLPMKLRFELYNDCFLAFVRAEFKFEDIRKYLEKRLGVHFSYNDKTINYKDSTSVAGCPITARFRRLLGEDWESFHVDGQKQRQAHGKNNASLHTVSYTVDDIWHFCYDAEEPEVVLSFAQETLKWEKKKADELVRIWSAIPQGYAMLSQKAIRNINKMLILGMKYSDAVILAKVPELVDVSDEELLSIAKDYHLVESQINYEKRINSIVNGLIAKYKSVSEECRFADHNYEYLLDESDEKDIIRQIENSLGARKWGLMDADEQTDILQKVRDKYQDFFRSHDRKFVESPKLGDSFENYLTKKFPMVEGEQWKKLYHPSQIAIYRPVPANKDRSALRLGNPDIGAIKNPTVLRVLNTLRKRVNQLLDDGVISPDETRVVVETARELNDANRKWALDTYNRIRHDENEKIKKILAEFYPKRDNISTVDIDKARYVIDQREMDYFTEAKPYNKDIKKYKLWLEQGGQCMYTGRTINLSNLFDPNSFDVEHTIPESISFDSSDMNLTLCDAHYNRFIKKNHIPADLPNYDKSVVIDGKEYSPIKPRLQRWADRVERLNRNVEYWRGQARRAQNKDRKDQCMREMHLWKMELEYWTKKLERFTITEVTDGFKNSQLVDTRIITRHAVLYLKSIFPYVDVQRGDVTAKFRKILGIQSVDEKKDRSLHSHHAIDATTLTIIPSSAKRDCMLELFAKIEEVNKMLSFSGNEDRTGLKQELDGLKNQLNKEVKACRIGHNVSEIGTFINDNIIINHHIKDQALTPVRRRLRKKGHIVGGVDSPRWQTGDALRGEIHKASYYGAITQYAKDKEGKVLMKEGRPQINPTIKFVIRRELKYKKSSTDSGFASWDDLGKAIVDKELFALMKGQFPAETSFKDACEQGIYMIKKGKKGMPDIKLHHIRHVRCEAPQSGLKIKEQTYKSEKEYKRYFYAAVGDLYAMCCYTNGKIREFRIYSLYDVSCHRKSDIEDIPEFITDKKGNRLMLDYKLRTGDMILLYKVTPAELYDLDNVNLSRRLYKINRFESQSNLVLMTHHLSTSKERGRSLGKTVDYQNLPESIRSSVKSLNFLIMGENRDFVIKNGKIIFNHR

SEQ ID NO: 3166 - protein, 863 aa, unidentified
  REGION 1..863: note = Description of Unknown: Cas Enzyme sequence
MKQPYSIGLDIGTNSVGWAVINEGFDLRKYKHQNMWGAHLFDEAQKAAIRRSFRSSRRRLARRKRRITLLQQLFDDEIQKIDPHFYLRLSESMLHLGDKNSALELDANILFADHSFTDKSYREKYPTIYHLRSDLFHNSKKQDIRLVYLALHHIIKYRGNFLVEGGVDNVISSFDNQNLQKFMDFIGADESMAKKVKAILLDRSLSRSVRKSDIIKLLRPTPDNKKVVSEAIGAVIGLKWNANKLFEDDSLEAKGEFSNKNYEEQRDEIAAAIGDDRYELVETLESVYQWTIFSQFIRKDSCLSDIMVEKYDDYRQDLSDLKSLFHEFLPKESYKSFFHGDTAEFEQYNKHKYSLEDLYKSIKNHLGNVAKEDPRYQRLEKRAELGEFLARQRIRDNGAIPHQIHQYELERIIDNQAQHYPFLAQNHDKIISIFTFKLPYYIGPLKTGGDFAWSVKKKDGVIYPWNFDEMIDDEASAEKFIDRMRNNCTYLPDEEVLPKNSLLYQEYEVRNELKNVTVNGKRLSSDIQNRIVDELFNKEPSVTHKKLIKYLYDNQIYNTTSLVISGTAKEKSFASSRKSYIDFTQKVGTPITPKNQQAIEEIIKWITLFEDKKILAKKLQKYSDIFNENQLRTILKLNYSGWGRLSCKLLDGITAHTRYGEMTVIETMRRCSDNFMQIIQSDQYEFKKIIDDILSLDQRTEITYDDIKNLAGSPGIKRALWRSVRIIDEIVDTIGYEPKLISIEMARNEDEKVRTKSRYNQLEKMYKDLYGKEYNKSDIKSQLADHKDKLDRKKYYLYFLQNGKCAYTGDPLDIENDLKDCEIDHILPRSLTKDDSLDNTVLVLRKENQRKLDDYPIVPDIQN

SEQ ID NO: 3167 - protein, 1155 aa, unidentified
  REGION 1..1155: note = Description of Unknown: Cas Enzyme sequence
LSVENEFYGCLVSEKKNIGTIFYKRPLRSQRGNVGKCTLERTKPRCALGHPLFEKFRAWTLINNIKVRMPEEEQAEQLPMKLRFELYNDCFLAFVRAEFKFEDIRKYLEKRLGIHFSYNDKTINYKDSTSVAGCPITARFRKLLGEDWESFHVDGQKQRQAHGKNNTSFHTVSYSTNDIWHFCYDAEEPEAVLSFAQDNLKWEKKKAEELIRIWSAIPQGYAMLSQKAIRNINKMLILGMKYSDAVLLAKVPEIVEITDSEILSVTEDYHRVEAQVRYEKQINNIVNALIAKYKSASEEYRFADHNYEYQLDKSDEEEIVRQIESCLGTRKWGLMDADEQTDILQKVRDKYQNFFRSHERKFVESPKLGDCFEEYLVKRFPMVKGEQWKKLYHPSQIAIYRPVSAGMDRSALRLGNPDIGAIKNPTVLRVLNTLRKRVNQLLDDGVISPDETRVVVETARELNDANRKWALDTYNRIRHDENEKIKKILEEFYPKRDSISTDDIDKARYVIDQREVDYFTESKTYNRDIKKYKFWLEQGGQCMYTGRTINLSNLFDPNAFDIEHTIPESLSFDSSDMNQTLCDAHYNRFIKKNHIPADMPNYDKAVIIDGKEYPAITSQLQRWIDRVERLNRNVEYWKGQARRAQNKDRKDQCIREMHLWGMELEYWEKKLERFTVTEVTDGFKNSQLVDTRVITRHAVLYLKSIFPHVDVQRGDVTAKFRKILGIQSVDEKKDRSLHSHHAIDATTLTVIPSSAKRERMLELFAKIEEVNKMLSFSGNEDRTGLKQELDGLKNQLNKEVKACRIGHNVSEIGTFINDNIIVNHHIKNQALTPVRRRLRKKGHIVGGVDSPRWQTGDALRGEIHKASYYGAITQYAKDKEGKVLMKEGRPQINPTIKFVICRELKYKKSSTDSGFASWDDLGKAIVDKELFALMKGQFPAETSFKDACEQGIYMIKKGKNGMPDKKLYRIRHIRCNTVQKNALKIKEQTYKSGKEYKRYFYAAVGDLYAMCCYTNGKIREFRIYSLYDVSCHRKSDIEDIPEFITDKKGNRLMLDYKLHTGDMILLYKDNPEELYDLDNVNLSKLLYKINGFENDGLRIRMVNHLVVKEAMGESVKDYAKLPDIIRCGVKTIKFLIMGENRDFVIKNGKIIFNHR

SEQ ID NO: 3168 - protein, 1424 aa, unidentified
  REGION 1..1424: note = Description of Unknown: Cas Enzyme sequence
MTQKVLGLDLGTNSIGSAVRNLDLSDDLQWQLEFFSSDIFRSSVNKESNGREYSLAAQRSAHRRSRGLNEVRRRRLWATLNLLIKHGFCPMSSESLMRWCTYDKRKGLFREYPIDDKDFNAWILLDFNGDGRPDYSSPYQLRRELVTRQFDFEQPIERYKLGRALYHIAQHRGFKSSKGETLSQQETNSKPSSTDEIPDVAGAMKASEEKLSKGLSTYMKEHNLLTVGAAFAQLEDEGVRVRNNNDYRAIRSQFQHEIESIFKFQQGLSVESELYERLISEKKNVGTIFYKRPLRSQRGNVGKCTLERSKPRCAIGHPLFEKFRAWTLINNIKVRMSVDALDEQLPMKLRLDLYNECFLAFVRTEFKFEDIRKYLEKRLGIHFSYNDKTINYKDSMSVAGCPITARFRKMLGEEWESFCVEGQKERQTHSKNNISFHRVSYSIEDIWHFCYDAEEPEAVLAFAQETLRWERKKAEELVRIWSAMPQGYAMLSQKAIRNINKILMLGLKYSDAVILAKVPELVDVSDEELLSIAKDYYLVEAQVNYDKRINSIVNGLIAKYKSVSEEYRFADHNYEYLLDESDEKDIIRQIESSLGAKRWSLMDADEQTDILQKVRDRYQDFFRSHERKFVESPKLGDSFENYLIKKFPMVEREQWKKLYHPSQITIYRPVSVGKDRSVLRLGNPDIGAIKNPTVLRVLNTLRRRVNQLLDDGVISPDETRVVVETARELNDANRKWALDTYNRIRHDENEKIKKILEEFYPKRDGISTDDIDKARYVIDQREVDYFTGSKTYNKDIKKYKFWLEQGGQCMYTGRTINLSNLFDPNAFDIEHTIPESLSFDSSDMNLTLCDAHYNRFIKKNHIPTDMPNYDKAITIDGKEYPAITSQLQRWVERVERLNRNVEYWKGQARRAQNKDRKDQCMREMHLWKMELEYWKKKLERFTVTEVTDGFKNSQLVDTRVITRHAVLYLKSIFPHVDVQRGDVTAKFRKILGIQSVDEKKDRSLHSHHAIDATTLTIIPVSAKRDRMLELFAKIEEINKMLSFSGSEDRTGLKQELEGLKNKLQMEVKVCRIGHNVSEIGTFINDNIIVNHHIKNQALTPVRRRLRKKGYIVGGVDNPRWQTGDALRGEIHKASYYGAITQYAKDKEGKVLMKEGRPQVNPTIKFVIRRELKYKKSAADSGFASWDDLGKAIVDKELFALMKGQFPEETSFKDACEQGIYMIKKGKNGMPDIKLHHIRHVRCEAPQSGLKIKEQTYKSEKEYKRYFYAAVGDLYAMCCYTNGKIREFRIYSLYDVSCHRKSDIEDIPEFITDKKGNRLMLDYKLHTGDMILLYKDNPAELYDLDNVNLSRRLYKINRFESQSNLVLMTHHLSTSKERGRSLGKTVDYQNLPESIRSSVKSLNFLIMGENRDFVIKNGKIIFNHR

SEQ ID NO: 3169 - protein, 1422 aa, unidentified
  REGION 1..1422: note = Description of Unknown: Cas Enzyme sequence
MTQKVLGLDLGTNSIGSSVRNLDLSDDLKGQLEFFSSDIFRSSVNKESNGREYSLAAQRSAHSRSRGLNEARRRKLWATLDLLIKYGFCPMSPDSLMRWRTYDKQRGLFREYPIDDKDFNTWILLDFDGDGKPDYSSPYQLRRELVTRQFDFDQPIERYKLGRALYHIAQHRGFKSSKGETLLQQETNSKQSLTDETTDVAGEMKASEEKLSKGLSTYMKENNLLTVGAAFAQLEDEGVRVRNNNDYRAIRSQFQREIETIFKFQQGLSVENELYERLVSEKKNIGTIFYKRPLRSQRGNVGKCTLERTKPRCAIGHPLFEKFRAWTLINNIKIRMSEEEQAEQLPMKLRFELYNDCFLAFVRAEFKFEDIRKYLEKRLGVHFSYNDKTINYKDSTSVAGCSITARFRKLLGEDWESFHVDGQKQRQAHGKNNASFHTVSYTVDDIWHFCYDAEEPEAVLSFAQETLKWEKKKADELVRIWSAIPQGYAMLSQKAIRNINKMLILGMKYSDAVLLAKVPEIVEIADEEILSVTEYYHRVEAQVGHEKQINNIVNALIAKYKSTSEEYRFADHNYDYQLDESDEKDIIKQIESNIGTRKWSLLDADEQTDILQKVRDKYQNFFRSHERKFVESPKLGECFEEYLMKKFPMIEGEQWKKLYHPSQIAIYRPVSAGKDRSALRLGNPDIGAIKNPTVLRVLNTLRKRVNQLLDDGVISPDETRVVVETARELNDANRKWALDTYNRIRHDENEKIKKILKEFYPKRDTISTDDIDKARYVIDQREVDYFTESKTYNKDIKKYKFWLEQGGQCMYTGRTINLSNLFDPNAFDIEHTIPESLSFDSSDMNQTLCDAHYNRFIKKNHIPADMPNYDKAVIIDGKEYPAITSQLQRWVDRVERLNRNVEYWKGQARRAQNKDRKDQCMREMHLWGMELEYWKKKLERFTVIEVTDGFKNSQLVDTRVITRHAVLYLKSIFPHVDVQRGDLTAKFRKILGIQSVDEKKDRSLHSHHAIDATTLTIIPSSAKRERMLELFAKIEEINKMLSFSGSEDRTGLKQELEGLKNRLQMEVKACRIGHNVSEIGTFINDNIIVNHHIKNQALTPVRRRLRKKGHIVGGVDSPRWQTGDALRGEIHKASYYGAITQFAKDDEGKVLMKEGRPQVNPTIKFVIRRELKYKKSAADSGFASWDDLGKAIVDKELFALMKGQFPEETSFKDACEQGIYMIKKGKNGEADKKLYRIRHIRCNTVQKNALKIKEQTYKSEKEYKRYFYAAVGDLYAMCCYTNGKIREFRIYSLYDVSCHRKSDIEDIPEFITDKKGNRLMLDYKLHTGDMILLYKDTPEELYDLDNVNLSKLLYKINGFENDGLRIRMVNHLVVKEAMGESVKDYAKLPDIIRCGIKTIKFLIMGENRDFVIKNGKIIFNHR

SEQ ID NO: 3170 - protein, 1537 aa, unidentified
  REGION 1..1537: note = Description of Unknown: Cas Enzyme sequence
MAKILGLDLGTNSIGWAVVDNENKRIEGAGSRIIPMDGDRMNKFESGKGSISYTEDRTKARGARRLRERYLLRRERMLRVLNIMGFLPEHYASQLDRYGKLPAVKEPRLAWREGKDGKPEFLFKASFEEMAAEFRNSGHDGNIPYDWTIYYLRKKALSQPLTKEELAWVLMQFNQKRGYYQLRGKVDEEIDGAEEKNEEKSYHELKVVRVEDTGETYKKGGTWYNITLENGWVYPRPFRTAPDWEGKTRGFIATFKLDKEGNRKSDQPSISAPDEKSWGLRKIKTEHDINASGLTVGEFIYDILLRNPSQKIIGEKVRVIDREHYLKELHRILDKQREYIPELNDHELYHQCIEALYPSNDAYRKSIANRDFTYLLADDILFYQRPLKSKSSLIDDCPYERHTHTTKDGKPRIKDGIPIIKPCKCIAKSHPLYQEFRLWQFLSNLRIYRNDEDVTAQLLPAIEAWVELYDWLSIQKSVNQKSLLKYLKIGKNDLASYRWNYVQERDYPVGETRAILLGGLHKAGIEDDFLSGEHELQLWHILYSVDDPKQYSTALRSFAKKQKWNEERTEAFCQAFKRLTIYKEKDYGAYSAKAISRLLPLMRRGRHWKAESIDSKTRSQIEHLITGEVDDVLTARARKNLSHITDISQCQGLNTSQACYLVYGRHSEAADTKKWISPDDIDAYLKEFRHNSLNNPVVEQVVTESLRVVRDIWRQFGKPDEIHIELGRELKKTKAERETLSLAIAEGEATNQRIRLLLTELKNPDCQVENVRPQSPSQMELLKIYEDGVMRRPEKDIFEDENEKLAIEDIKKRFSAAKNQPTHSEIIRYKLWLDQKYISPYTGKAIPLGKLFTTAYQIEHVIPQSRWFDDSLSNKVICEAEVNQLKDRELGHEFIVRHHGERVPLTMGGEVEILSVEAYEKLVKDLFANNRRKREKLMMDEIPEEFSSRQMNDSRYISRLMMHLLSNIVRTEDEEGNREENAVSKNLIPCNGAITDRLKRDWGVGDVWNRIILPRFERLNTLTDSSDYTTTTDNGHTIPTIPFELRQGFNKKRIDHRHHAMDAIVIACTTRDHVNLLNNEASREGNRRYDLQNKLRKKEPYNRNGKQYEKFTDFIKPWPTFTEDTYHSLQDIVVSFKQNLRVINKTSNYYAVIRDGKHKYIKQEKGDSWAIRKPLHKETVFGEVNLQLIKKVPVKKALEDVNSIVSKELKEKIKEKKSLNYSNKDIIDFLDKNKDVWSEAADGNVEVYYYTKDTDKRYFATRYNNDLLSYFKDAEEEVDTIDKIKKITDTGIQKILLHHLANEGGNPKIAFCAEGIERLNKNIVHLNNGKKHQPIKKVRIWTEGKKFNLTDKGMKSKKFFNGDKGKNTHFIIYTRGTSTVRNYLVVDLQVSVECQKRYGKLWKKNLEIFLKDYEKDDKKNISGLLPEDSTILYILSSGDIVYVPSIEEKNNLSINNLDPTHIYRILSFDRDPTNFYCVPNHVAKTIPKKGVKRNGKEKVETEFGSIDKTQNDYSGRLIRENCIPIKVDRLGNITDIG

SEQ ID NO: 3171 - protein, 1395 aa, unidentified
  REGION 1..1395: note = Description of Unknown: Cas Enzyme sequence
MKRILGLDLGTTSIGWALVNEAEDNSNESSSITRLGVRVIPLTVDEQTNFEKGKSITTNADRTLKRSMRRNLQRYKLRRDALIDCLKKAGIVTDDTILTENGPRTTFATLRARAKAATEEVSLEDFARILLMINKKRGYKSSRKAQSTEEGTLIDGMDVAKKLYYEHLTPGQYAYQLLLEGKKYLPDFYRSDLEAELKVVWDYQRQFHPDILTDDFYHQLQNKSKTNTTKIFLGRYGIYTADNKGADRRLQQYRWRTEALTRALTPEELAFVIADINGAITGSSGYLGDISDRSKEIYFKNQTIGQNIVEHIDSDPHFTLKNQTFYRQDYIEEFERIWNTQAQYHQELTPELKKKIQKEIIFFQRPLKSKKSMLDICTFERRQIEVTEDGKTRTKTIGLKVCPKSSPLFQEFKVWQVLNNLQVEYEDAGEDLFATTEKRRFLTLEEMQILARELMYKDKLSKREVLTILFGKAAKKYDLNYKEVEGNRTLTALYKAFFDIISQSGHNEYDITKLRAAEIEEVTTQVFTALELNTSILHYRTDLEGQDLDRQPLFQLWHLLYSYEGDNSKTGNDSLIAKLQELCHCDLEYAQVLAKVTFQEDYGSLSTKAMRKILPFMKHGLTYDKACEKAYEEEGLRHSERSRTREELDSRTYVDRLDLLPRNSLRNPVVEKILNQMINVVNGVCEEYGRPDEIRIELARDLKQSAKEREKTTQDINAATLLNEKYREVLEKDFGIQHVSRNDIIRYKLYMELKDNGFKTLYSGTYIPKDELFSKKFDIEHIIPQARLFDDSFSNKTLEARNINIEKSNKTAYDYVLGKWGEEKAAEYKARIDALHKQGIIGKAKHDKLLMREADIPEDFIDRDLRNSQYIAKKAREILEDMVPQVVPTIGSITDRLREDWQLVDVMQELNWDKYDRLGLTESYPDKDGRIIRRIKDWTKRNDHRHHAMDALTIAFTRPAFIQYLNNLNALSDHSSSIYGIEQKYLYRDGRGNLRFRAPMPLDQFRAEAKRQLKSILVSIKAKNKVMTQNVNKSKAKEGTNRKVQLTPRGQLHNETIYGHTRHRVSEMVKVDSKMTAERAQLVAKKAYREAILTRLSQFDGDAKKAFTGKNSPEKNPIWLNDQHAEQVPPKVKLVYFEDYYPIRKPISPDLKLDKVIDVGIRRVLQERLDEFSGDAKKAFANLDENPIYLNREKGITIKRVRIRGVLSAIPLHEAKDHFGNVILDEDGQKKPVDYVQTASTHHIAVYRDSEGNLQDVAVSFYEATTRKALGIPVVDTDYHSSDGWRFLFSMKQNEYFIFPDIEHGFDPNAIDIFDPKNRAEISKHLYRVQTLSKIEYGNQCVRDYLFRHHLETNVAKENVLKGITYQSIKSLAPLKGIVKVRVNHLGDILPAKES

SEQ ID NO: 3172 - protein, 1386 aa, unidentified
  REGION 1..1386: note = Description of Unknown: Cas Enzyme sequence
RNHLHFFIYYIMKKILGLDLGTTSIGWALVNECENEDEKSSIIRLGVRVNPLTTDEKGNFERGKAITTNSDRQQTHGARINLQRYKLRRKYLCDCLNKHGWIGSEPMYEDGKSSTFETYKLRAKAAEEEVSLHEFARVLFMMNKKRGYKSNRKANDKEEGKLFDGMSVAKKLYEAHLTPAEYSLQLLNKGKRFTPEYYRSDLIEEFEKIWNEQKKYYPEILTDEFKRQLEAKTKTSTSKIFLGKYGIYSADLKGLDRKLQPIKWRVEALRQQVDKDVLAFVISDLKGQIANTSGLLGAISDRSKELYFNKQTIGQYLWASLKENPHVSVKNQPFYRQDYIDEFEKIWETQASFHKELTPELKQEIRDIIIFYQRPLKSKKGLISVCELEQRKVKVTIDGKEKEITIGPKVVPKSSPMFQEFRIWHNLNNIQLIDNERNSKRSLYEEERNLLYEELSIRDRLSKAEALRVLGKKNRQWDLNYKELEGNRTQATLFSYYNKIIMMTGHEECNIKQLKAPEIRHYIKTIFKNLGFNTGILEFDSSLNKHELEQQPMYQLWHLLYSYESDKSRTGNEALLKKLETIFGFPREYASVLAEVAFEDSYGNLSVKAIREILPHLQAGLDYSQACEEAGYKHSRRSLTKEELDKKEYKEKLELLSKNSLHNPVVEKILNQMINVINAVIDEYGKPDEIRIELARELKIGAAERENMTRSISQGNAENKCIREILEKEFALSYISRNDIIKYKLYEELKPNGYKTLYSDTYIPKDKLFSKDFDIEHIIPKARLFDDSLSNKTIEARDVNIAKSNKTAFDFISGKYGQQGIEAYKKKLYILLQGGSINKAKYNRLLMKEADIPSDFINRDLQNTRYITRKAYEILSDLVRVVTPTSGAVTSRLREDWQLVDIMKELNFEKYQKLGLTEIIEDRDGRKIKRIKDWTKRNDHRHHAMDALTIAFTKPSFIQYLNNLNARSNKGDSIYAIENKELHREVGKLCFNAPLPINEFRAEAKKHLKAVLVSIKAKNKVMTQNVNKIKTKHGVIKKVQLTPRGELHNATFYGTKKRPIIKMVKVGAALDEVTIKKVSSSFIRKALLDRLCENNGDAKKAFTGRNSIDKNPIYIDEERKRTVPALVKTIEWEMYHPTRKMISPDLKIDKVIDKGIRDILKTRLAKFNGDAQKAFSNLDEEPIYKDEAKKITLKRVSLEGVSSVIPLHTLKDRSGMPITGKDSEPALGDYVQTSNNHHVAFYIDENGNLQDNIVSFFEAAERKSQGVPIIDKNFNHDIGWRFLFTMKQDEYFVFPNEVTGFNPSEVDLTDEANYSIISPNLYRVQKMSKASGRDYWFRHHLEAMLNDDPKLRNSMFKRIKSLKALEGIVKVRINCVGKIVAVGEYD

SEQ ID NO: 3173 - protein, 1226 aa, unidentified
  REGION 1..1226: note = Description of Unknown: Cas Enzyme sequence
MTIAKKLYEERLTPAEYSLRLLYKGKKFTPEYYRSDLIEEFEKIWNEQKKYYPEILTDEFKQQLEGKAKSNTSKLFLGKYGIYSADTKGLDRRLQPLKWRVEAMKQQVDKNVLAFVISDLKGQIANTSGLLGAISDRSKELYFSKQTIGQYLWASLQENPHISIKNQPFYRQDYLDEFEKIWETQATFHKELTSELKQEIRDIIIFYQRPLKSKKNLIAVCELEQRKVKVTVDGKEKEITIGPKVAPKSSPMFQEFRIWQNLNNILLLDHETNSKRPLYEEERNLLYEELSVKEKLSKTEALKVLGKKSKQWDLNYKELEGNRTQAVLYDCYNRIIVMSGHEECNFKKLKASDIRHYVKMIFKNLAFNTDILCFDSSLKGHELERQPMYRLWHLLYSYEGDNSRTGNDALLRKLETAFGFPKEYAAVLADVVFEDSYGNLSVKAMRNILPHLQAGKDYSQACEEAGYKHSRRSLTKEELNQKVYKERLELLPKNSLHNPVVEKILNQMINVINAVIDEYGKPDEIRIELARELKIGAAERENMTRSISQGNAENKRIREILEKEFALSYISRNDIIKYKLYEELKPNGYKTLYSDTYIPKDKLFSKDFDIEHIIPKARLFDDSLSNKTIEARDVNIAKSNKTAFDFISGKYGQQGIEAYKKKLYILLQGGSINKAKYNRLLMKEADIPSDFINRDLQNTRYITRKAYEILSDLVRVVTPTSGAVTSRLREDWQLVDIMKELNFEKYQKLGLTEVIEDKDGRKIKRIKDWTKRNDHRHHAMDALTIAFTKPSFIQYLNNLNARSNKGDSIYAIENKELHREDGKLCFNAPLPINEFRAEAKKHLKAVLVSIKAKNKVMTQNVNKIKTKHGVIKKVQLTPRGELHNATFYGTKKRPIIKMVKVGAALDEVTIKKVSSSFIRKALQDRLYEYNGDAKKAFTGRNSIDKNPIYIDEERKRTVPALVKTIEWEMYHPTRKLILPDLKIDKVIDKGIRDILKTRLAKFNGDVQKAFSNLDENPIYKDEAKKIILKRVSLEGVSSVIPLHTLKDRSGMPITGKDSEPVLGDYVQTSNNHHVAFYIDENGNLQDNIVSFFEAAERKSQGVPIIDKNFNHDIGWRFLFTMKQNEYFVFPNEVTGFNPSEVDLMDEANYDIISPNLYRVQKMSRVVYGKSIIRDYVFRHHLETTVEVNANLKGLAYKQLKSLSYLEGIVKVRINCIGKIVAVGEYD

SEQ ID NO: 3174 - protein, 141 aa, unidentified
  REGION 1..141: note = Description of Unknown: Cas Enzyme sequence
MKKILGLDLGTTSIGWALVNESENKDEQSSIVRLGVRVNPLTVDEKGNFEKGKAITTNADRQQVHAARINLQRYKLRRENLRSCLQKQGWIGSEPMYEDGKSSTFETYKLRAKAAEEEVSLHEFVRVLFMLNKKRGYKSKR

SEQ ID NO: 3175 - protein, 1197 aa, unidentified
  REGION 1..1197: note = Description of Unknown: Cas Enzyme sequence
KQILEKQREFHKELLDKKLCEQCYENLYSHNPDHRKSMLALSEKRGEGYFTTLFIDDILFYQRPLKSKKSLISDCQYEYHTYMKDGKEVRAYQKCIAKSHPLFQEFRLLQFLKNLRIIKRKDWEYGTPQGELFPRNQYLTDIDVTNTILNTEEKWEQLYDYLNQKKEFKMKDLLSWPVLKLGKNPEKLYRWNYVEDKTYPGNETHAQIISYLAKAGIAPDALTEEDEYFLWEILYSVNAKDELEKALESFAKKHGFDGTFVDVFKKSPAFPSEYGSYSAKAIKKLLPLMRFGNKWNEDNICTSTKERIEKLITGEFDEKLSDKIREKIGNELGNSHKDIKDFKFMPLWLACYIVYGRHSEAQDVNKWESPEDIDLFLKQFKQYSLRNPIVEQVVLETLRTVRDIWRYYGSIDEIHLEMGRDLKNPADKRKAMTERNIKNEQDNYRIKALLTVLANELNYENARDFSPSQQEILRIFEETAIESYKATEGKGDLPEDIKLIIEKFKVIDEKKRPTTSDVKRYALWLEQKYQSPYTGQPIKLSRLFTSDYEIEHVIPQSRYFDDSFSNKVICEAAVNKLKSNMLGLEFIKKFHGQKVEIGNGKFVTILSEDDYKKLVDEKYKSPNLKTKRNKLLMDDIPDGFIERQMNDSRYISKLVKGLLSNIVRTTDSEGNLEPEAVSKNLITTNGAITDMLKRAWGVNDVWNKIILPRFQRMNKIDPEHTYTAISAQGHEIPSMPAVYQYGFNKKRIDHRHHAMDAIVIACANRDIVNYLNNDSARDGGKRRYDLMHKLCNKKKDSDGYERMPRLPWSGFCDDVYNTLEGIIVSFKQNLRVINKATNKFVHYNEEGKKIVDCQKGVNWAVRKSMHKDTVFGLVSLRKEKTVKLKEALSRLDRVTDKDLRDKLKELVAKHYTENQIKVYFEEHNDVWKDVDTKKIPIYYYTEEEGNEHYFATRFLSDLTTYFNGVKKKEDAEKKIEGITDTGIQKILLNHITRCENNVEYAFSPEGIDDMNSHILELNDGKPHKPIYKVRRFECANKFAIGQKGNKKAKFVEGDKGTNLFFAAYKAEDADDFNFITIPFNEAKRRLQSHLSVADETDENGRELLYVLSPYDLVLLKDGEKSITSHKIFKMVSSTGIQCNFIPNNVAIPIVNKKEYSAMNKFEKDDVSGLMIKANCVPIKVDRLGHIISIDNKLVDHD

SEQ ID NO: 3176 - protein, 1372 aa, unidentified
  REGION 1..1372: note = Description of Unknown: Cas Enzyme sequence
MKRILGLDLGTTSIGWAIVNEAENENETSSIIKLGVRVKPLTVDEQNTFETGKSITTNSDRTLKRSMRRNLQRRKLRRKNLIECLKENDIIENDTILCEEGNKTTFQTYRDRADAAVNEISLEAFARVLLMINKKRGYKSSRKAKSAEEGQLIDGMAVATELYERNLTPGMFVTELLKKGKRYVPDFYRSDLVAEMERIWQFQKQFHADILTDDVRKQLKNKKKQQTENIFLKNFGISSADNKEKDKRRQAFQWRADAVRKELTREELAYVIADVNGAISNSSGYLGAISDRSKELIFNHQTVGQYLMERLNADPHFSLKNQTFYRQDYLDEFETIWETQAKYHKQLTPELKKEIRDIIIFYQRPLKSNKGSIDVCYFENHQKTITEHGKTRTKRVGLKVLPKSSPLFQEFRIWQILHNIVVSETSSGNKRPLYQEEKELLFAELNIKEKLTKNEVLKLLFSKPRSYDLNYEEVEGNHTLAAIYSACQEIISMSGHGEYNFQKLPANDINKVVYGVFSGLGFKTDFLTFDSSLEKHDLEKQPMYRLWHLLYSYEGDNSNTGNRSLIEKIRSITGLDPEYANILANVSLQQKYGSLSAKAVRKILPYMKEGFNYSDACEKAGYRHSDSLTREELEHKEYKNHLDLLPRNSLRNPVVEKILNQMINVVNEIVKVYGRPDEIRIELARELKKSAKEREQMSKDIREGTKRNEELRKEIETKFGIKNVTRNDILRYRLYLELAPNGFKTLYSKTRIPEEKVFSKEFDIEHIIPQARLFDDSFSNKTLEARQINIDKSNKTAIDFIRERYGENYTEEYKQSVEDLLKSGAISRAKRNKLLMTEADIPSDFIDRDLRNSQYIAKKAREILLNMCMFVNPTIGSITDRLREDWQLINVMQELNWDKYDRLGLTETITDHNGKPLRRIKDWTKRNDHRHHAMDALAIAFTRPEFVQYLNNLNARSDKAGAIYAIEKKYLERDKNGKLRFIAPIPLAEFRAEAKRKLEEILISIKAKNKVTTQNVNVIRTREGKIKRTQQTPRGQLHNESIYGHIQRYTTREVKVNGSFDEQMISLVSKKAYREALLSRLHEFDNDPKKAFTGKNSLDKTPIWLDRNHTWAVPLKVKITEMQDEYPIRKDIAPDLKIDKVIDTGVRSILQWRLDEYSGDARKAFSNLDENPIWLNKEAGITIKRVRIKGIANATALRSKKNHKGEFICTADGKKQAVDFVNTSNNHHIAVFRDETGKLQECIVSFLEVTERKAQDLPAIDKDYRKADGWTFEFTMKQNELFVFPNEETGFDPSEIDLLNPDNYALISPNLYRVQKLAAHDYYFRHHLETTVEDKETLKNIAFKRINSLTKLENIVKVRVNHIGQIVQIGEY

SEQ ID NO: 3177 - protein, 1420 aa, unidentified
  REGION 1..1420: note = Description of Unknown: Cas Enzyme sequence
MARNILGIDLGTNSLGLSVRDLDSGENLKEQIVFFESVIFESGVGNGKSGEFSYAAERTSHRTSRRLYQARKYRIWSTLQLLIQEGFCPLTMDELDRWRCYDKARGLKRQYPVDAVAFEQWVRLDFDGDGKADYSSPYQLRAELMEQQLDFDNQTNRYKLGRALYHIAQRRGFKSSKGETKDIQEQKADGLLDSLEEGSRWTDELKEVEKKKSLAIVAYMEEHGLPTVGCAMAHLERHGVRVRNSEYTAVRSQYKDEIAAIFNFQQQLDTGSTLFRRLMSERKGEGTIFYKRPLRSQKGNVGKCTLEQGKTRCAVSHPDFEDFRAWSFINNIKVRNTPSDKWQAIPLELKQRMYEERFLLTRSYFKFEDLRKWLEKELQHTLSYDRNCRTINYADRTSVSGCPVSSRLRNILGDDWRQAVIATGKERASQRTGEIHRVQYNYEDLWHIAFSYQEPEMVEQFAREEAGFDDAKVKEMMQLVNAISQGYSMLSLKAIRLINRFLRKGLIYTDAVLLAKLPEILGEDLWQQQEDTLMSHLEQINATNRREKRLLNIVNNLISQYKVRTLDNQSAFKNHEYTLQPSDYSDIDRCIKESFSDNEWAELGTQGQQQVLQYVTQRYQQFFASRERDYFPLPKLGDAIKDFLISSLGQDSGLPWHKLYQPSQLEFYAPAQSKVYEVDGRFLSLRLLDSPSLGSIKNPMALRTMHVLRRKINDLLKQGLIDEDTKIVVETAREMNDANMRWATKTYQEKQEDANKEIEKILAEFLGHQPTADEVRKTRLLVEQIKLDTSNGKAKEKSKNSYYENEQKEVIKKYRLWLEQGCRCLYTGKVINLSNLFDDNFADIEHTVPRSLSFDDSLANLTICDAQFNRTVKQKRIPSQLDNHEEILQRIQPWMDKVEHLKEQVDLWRAQSRRAADKERKDQCIRQVHLWSKELDYWQRKVKTFTMTIDEFTPGFRNSQLVDTRIVTKYAFHFLKSAFNNVEVQKGEVTAAFRKIMGLQSMDEKKDRSRHSHHAIDAAMLTIIPKAAKRDEMLRLFYEIQEANFAPSELEAKKQRLERMKKECRVGNVDGLYEWIDNTILIDHLAKDQTLTPARRKIRFKGDVSNGPKEVIQHSDCIRGCLHDASWLGAITQHKSEGISYVKRRFLTPKKGKEGEFESWEDIEKHIVNKSLVPMMKSQFPEGTSFANACNQGIYMLNKKGEKINLIRHVRCYVDIKNPAKIKKQTYNSNKEYKRYYYAKNGEISAYAIYWDGTIGTTHTYDSLSLYDLANIMKSEHIDTKEQTFSPNKLVKGEQIPLFAILVPGCTRVMVFRNDEFKKGAIVGEIQNFAKTLKNNEISKRLYVVRQVFSTDGRVKLMHHLEARSDKELLEHYGKAGVNGYSKIDVDQPHPKLLLSNSNLIVLVEGKHFVFDGLGNIRFL

SEQ ID NO: 3178 - protein, 1475 aa, unidentified
  REGION 1..1475: note = Description of Unknown: Cas Enzyme sequence
MRKIGIDLGSSSLGFVVTENGIIIKKGVIRFDTGMMKGQSGGYVSPTRERRIARSKRNLIRARKYRKWELLEILVKENYVPLTKQELEIWSKYKKGQIRKFPENKLFQKWLACDFTYENGKKYNNPYELRVNALNKNIKISKHEFGRALYHIIQRRGYKDIGETDSETEKQKERRGESGFQKALNENDNIISKALLNEFLDKNKRARNQYPYREEYEYELEQICEAQGFDISKKENGKYTSEFVEKLWKAIIWQRDLRTQKGKIGKCTLEPKKLRCPISHPVFEIFRTWQFINTIKTINEDGGKEPLPLSLKNKLFEFFLKKDDNFKFEQIRVFLDKQFHSKMKYNYPINRNKKNTNENYTDGTYETSVAGMPICRGLIDVFGEDAKNALATIEFQNLSQRDKNGGFGSATKVVANYSINDLWHILFSFDKKSAKEKNFLEIFAKEKLYLTEEKQVAKFVKLNNKISQGYADLSVKAMCKIIPFLKEGYLYNEAVVLAKVPEILGKNWEENKTEILSAINDANNDYNWNKVIVGITNKLIDKYKGDPYFAYKNHSYQLSDHDCNEVEKTCQGYFGEQTWKKRNDKSVIIEDVKQKYQEFFYDEKRAYREVPTFTDIFNDKLKSQNIHLDAYQLYHHSDTENIYLRKCIINKKTGERILPQATNIHGVKVDILPGVQIDSIKNPMFNKSMSILRRLINELIKEGTVDEHTEVVLEVARDLNDNNKRIAIERYQNERRTNREKYREFLTEYKKSKKPDLNVEENISKFEMWTEQIFEETIDDEGVEHSNKNRIEILKEKDAITRYELWMEQKGQCLYTGKMIPIGKLFSIEIDIEHTIPRSKLPDNTMANQTVCYAWYNRDKKKNQMPTKCNNYYNDVEGWGTRIEPRLDKWKTIRDNWKERYNKSTKPKGNEDEIAKNKRIQEKHYCKMHFDYWNDKIERFEATEVKDSWARRQLVDTQMVSKYAREFLKTYFLKVAVQKGTVTAVFRKLFGFQDEDEIKSRNKHTHHAIDALVLTLIPTNSSHRERILKEYFKAIEENNKEKIKELKENEIPKNFNVQKFISNIEGSTLIYNFGKKSITKQTSKIVRKRGKRQYLKDKKGNYVLDNDGKKILLISRGSTVRSDLFAQTYLGKIKNVERDEDGKPIREGDDWKYKSGKDEFSFVKREDIDKVKASESLINSIVDPIIQELVRKQKRNSEIKDYQGNIIRHVRIQVKAGREVKERVNYRSKHDYKNKFYSEAGSIPYAILLQKSDETGVKRELLSIASFEIAKMRRNTGVFDIEKYVKDYNPEYKDWEKQLLKVGQKVFVLNEDSDYEKRFDKSFQTNRLYVITQFSEGSIWLKHHLCALSVNDIKNAVSLAKDEIMTIYEKKLNIPPVVEDKSIIDNNERRNDYLNRKYRFDTINNSFRLARLQAIVGTKRTKEIKKELDQYKAIPSKIEVEGHTYLLKMSKEYWNYLIEGQDFEMTLDGSIEFLD

SEQ ID NO: 3179 - protein, 1457 aa, unidentified
  REGION 1..1457: note = Description of Unknown: Cas Enzyme sequence
MKKILGLDLGTNSIGWAVVNEAEMPTEKSSIVKLGVRVINYDNFVSTETGKDSMDPVKDFSGGKGISCNAKRTMKRSARRNLQRYKLRRENLIEVLKENSFIDDETCLSENGNRTTFETYRLRAKAATEEISLKEFARVLLMINKKRGYKSSRKAKSTEEGQLIDGMEIAKRLYEENLTPGQLSLQLLENGKKYLPDFYRSDLQSEFDKVWEMQKHYYPDLLSAELKDELFGKNKTQTWAICAKPFNLVGTKRNTKGFEQKIENYQWRCKALSENLNLEQLAVVLQEINGQINNASGYLGNISDRSKALYFNKQTVGQYQMSQLDKDPNYSLKNQVFYRQDYLNEFETIWETQAKYHKELTPELKKEIRDIVIFYQRPLKSQKGLISFCEFESRQIEVEVDGKKKIKTIGLRVCPKSSPLFQEFKIWQILNNAQVTGKIVPNEQTDLFGEAEGFKVGKRFLFQEEKEKLFAELNYKERLSKTEAVKLLFGNQKGIDLNYKELEGNRTQAALFNAYQTIIEMSGHGEYDFSKIPSAKAVEIVSEVFTGLGFNTEILKFDSSLEGKALEQQPMFKLWHLLYSFEGDKSELGNHKLIEKLSDIYGFDKEYAIVLAGVVFSSDYGSLSSKAIRKILPHLKDGLDYSVACEYAGYRHSKHSLTKEEIENKVLKDKLELLPRNSLRNPVVEKILNQMVNVVNAIIEEYGKPDEIRIELARELKKSAKEREDMTKSINETTRLHEEYIKVLQGEPFYLEHVSRNDIIRYKLYEELKFNGYKTLYSNTYIPREKLFSKEFDIEHIIPQAKLFDDSFSNKTLEVRQVNLDKGNATAYDFVAERYGEQGTSEYENRIESLYNNKVISKTKRDKLLMKEADIPSGFINRDLRDSQYIAKKAREILEEIVRFVVPTTGSITDRLREDWQLVDVMQELNWGKYNQLGLTEIIEGRDGQRIRRIKDWTKRNDHRHHAMDALTIAFTKRSFIQYLNNLNARVQKGVDDYIDLDMVELSDLSKEERTAAVYGIERKELHRDSHGKLRFNSPMPLDEFRAEAKRQLESTLISIKAKNKVVTRNLNKAKNSVTSEITDKDGNKKTIQGQLTQTPRGQLHLETVYGSSKRYVTKAEKVNASFSVEKIESVANKRYREALMLRLQQFDGDPKKAFTGKNTLEKNPIWLNETHSEKVPEKVKLVGFETFYTIRKEISPELKIDKVVDSHIRQILQLRLDEFGGDAKKAFSNLDDNPIWLNKEKGIAIKRVTITGISNAEPLHDKRDKEGDLMLDEHGNTQPMDFVNTGNNHHVAIYRKPKLDKNGQQMMDEHGELQYELDENIVSFYMATIRAMLCHPIIDKEYKREEGWQFLFTMKQNEYFVFPRYDEQGNLIFNPLDYDEDWFKNPANYAVVSPNLFRVQKITNKDYFFRHHLETTVQDVSGLKGITWKRCGLNGIDYILKVRVNHIGQIVSVGEY

SEQ ID NO: 3180 - protein, 1750 aa, unidentified
  REGION 1..1750: note = Description of Unknown: Cas Enzyme sequence
MKIINKIKNMANKKILGLDIGTTSVGYTIIEVSEDKIKNIYSDKQATSDINNERIGIYKDALGVRIISQDTDRFDRGLKLNDTKGSTLTPTANRRKFRGIRRMRNRYKLRRNKLYKLLSILGLAADENYFTNKKGKRGKNNDIGKALYALRERAIREKISLSELARVLLHLNQLRGYSSDRFAKDEETKFDYYLTEVVDVDWENRIAIFDKGSTDDVKYYQFKAKLNFVEPYVVIEDDEKTVLENIEGYIFKKEIDFKEGDFITIKAPEFKQNKKGKVIVEEYYKITPTKPDATDWKYKYQTLHKNLTDWCKSGGTVGSYFYKNFYELSTLSRIRNNVVNREWYEKEFDTIWNLQYQYHKDFFENVEVSYLVKEVFKDYSTVLNDVVGKNGNKERLQTLIKDKIIFFQRPWQQAKSKGRCEFEKIKVKREFAIKGTGTKELREEHIGRTVVPRSHPIFQDFKVWQQINNVRLIWNTADEKINLFENAELFEKLTGKTIEKVKELLFKKLQGSKTLSWRTFVKEELGLDTYDEIEEKKKAKISKKQGLDLETGEVVEEFFSVNFRKRKKDGMYDDIKLKGNTTKSELQNILKDKPTKWFDELHDDNKKVTNLQLLWEIIYDITNSDVTKVGSIIKKHFDFDDEVCLTLAKVQFDDTGMANLSAKAIRNLLPLMSDGKNYSNKTKAKVNELISLNGSETDVDTDEKLSGLKDFVTDKRARIRLSKFTTENEFKYLNYWEAAAIVYGSHSSKGKSETKLMERVKNHSMNNPVVEKIVNETISIVNQLKEIYGFDEVRIELSRELRASADERQQMWEGMNKGSAKNEWAKKMLREIKQAMLEDDRDISLLDTEISGSNLDKIKIIEDVVKYQKPAEFKTKEKEYKLTEPSNAEVTKYLLWLEQNFKCPYTNQPIPLTDVFARGKVVEIEHILPKERYYSNAYSNKVITWREVNQAKGSKTAYEFIVSRRNQTETIKIGKRELPLVLASQWENHVKEMFDKGGKRNNLLRKEIPEEPIERTLKETQYINKKLKEKLGELVGSNKVWVTSGAITDMLREKWKLNDIWKELVKERYNSFKSPTGKKTFQLKSISKQQEFLNELKKSNFLDEEFNGIKIKVGKKDFDFNSKEEILKIIDEVEPILNANLIYGTTKITPYKYSSSEESFEMKNLIYTTKHFNTKTNQYEDVEKFAGMSKRIDHRHHALDAIIIACTKQNHIQYINNLNTINSADIENDDSKKAKYKDLKTDVCIGNSSSKFKFPWDENKFIPEVKKALQSILISHKNTNVLISPSKHRNNKDINSGKVASVRGELHLQTNYTKKKYFENEKIDIAKLIPLLFKKKMENQNQTLVHFKSFNEIIKEMVLKEKYQNILIPLFEEYDAEKLNEQLVKDFAKKVLKRIEDDKLFIHERTGEKMTWLSTFIEKNASVRPMGLSMDLNSEKEVKDISNPRLRKIAQYRLSYINKKIEEIKALKLPFKEEENTKIREVKEIPLYNNAIYEVRVKQKDGKHIWIEIKDVQESELENIEYAKLETTVAIKNKLKEFSLDELKQRYIDDPIFLSEKPTLVKKARQKSFFQDLYELNDGRYVYSRDVFMTYVFIPEESKRKDTKREIEFLKFFDAVKIITLEKPDKIDYKKLIKKEGYKLLFTLAKNDIVYLPDEVLIDEQISEINWNDRSEIIPKLFVVKDMNPSRNEILFQHIYKSDSIRVNGDEAKNILNTEKLEEEIKYGDANMWKRCIKVNIDKLGKGIKPYWEK

SEQ ID NO: 3181 - protein, 1461 aa, unidentified
  REGION 1..1461: note = Description of Unknown: Cas Enzyme sequence
MRKNILGLDLGVTSIGWAYVLEGETPNESEIKQIGSRIIQFDNFDKVDKKGNVSESRDAQQDFALGRGLSPNADRTKKRGARRLLDRYQIRRKNLIEVLKKSNIINDDTILLEDGKNTTHETWRLRSKSGKERIELNEFARVLLSINKKRGYKSSRKTKNSEDGCAIDGMGIARRMYDENITPGQYVFQNMLEGRKNVPDFYRSDLEREFDKVWNFQMQFYSEILTNEFYKNLKGKGLRATSSIFWAKYDFNTAEIKDIDDNLINIKTIKYSKRDQKKLQAYKWRNDAVSKKLDREQMAYVIADINNNINNSSGYLGAISDRSKELYFNNETVGQCLYKQLQHDPHTSLKNQVFYRQDYLDEFEQIWSTQANFYSQLTDKLKEEIRDIIIFYQRKLKSQKNLISFCEFESKEVMINNNKKTIGLKVAPKSSLLFQEFKIWQNLNNVEFKKSRIKKQLSESDKRESSNRDKSNKFTLDFEAKKLLFNELNIKGKLKSKAILEILGYKAKDWELNYTELEGNNTNSALYNAYLKILEIEGYNEDLLKLSNNDEINVTELTTSSSEIKDMVKCIFEVLGINTKILDFNAELEGKEFENQVSYQLWHLLYSAEDDYRKYSKEDILLYGNESIGLKKQLCARFGFAPEHAKILANVTFQDDYGNLSTKAMRKIYPYIKESIYSDACSFAGYRHSKHSLTKEEIDKRVLKDKLEILKKNSLRNPMVEKILNQMVNTINTLIDKENDKLEKADKPRDFHFDEIRIELARELKKSANEREKMTRNINAANNAYEKINKLLQSEFGIKTPTRNDIVRYRLYEELKSNGYKDLYTNNYISREKLFSKQIDIEHIIPKSRLFDDSFSNKTLSFRRDNLEKGSETAIDYIELKYDEDEINKYLARVEKLFELGNKNADEGITKAKYHKLLKRGSEIGEGFIERDLRDSQYIAKKAKEMLFEVTRSVVSTSGSITSRLREDWGLINIMKELNIPKYRALGLTEMQERKDGQMKEVIKDWTKRDDHRHHAMDALTIAFTKHSHIQYLNNLNASRDENHKLHGNILYIKEKETELIEDSNGNKKRKFISPIPNFRQLAKEHLENVLISHKAKNKVLTNNINIIKTKQGNKKILELTPRGQLHKETVYGMIKRPVIKEMKVGAKFTRELIEHITNPNYKKILLDQLTKYDNNPKKAFTGSNALSKSPIYINDSKTEKLPEKVNLLYYEDCFTIRKDIAPDLKIDKVIDAGIRLILQNRLIQYNGNSNEAFSDLDKNPIWLNKEKGISIKRVTITGVNEVEALHSKKDHFGNFILTEEGNKIPVDFVSTGNNHHVAIYEDTEGNLQEKVVSFYEAVERVRQNMSPIDKSYNEHLGWKFLFTMKRNEMFVFPNKETGFDPIEINLLDPSIKKDISPNLYRVQKIATKNYFFRHHLETSVATQSELKNVTYKPQLGLKAIKGIVKVRINHLGDIVSVGEY

SEQ ID NO: 3182 - protein, 1498 aa, unidentified
  REGION 1..1498: note = Description of Unknown: Cas Enzyme sequence
MKKTILGLDLGTNSIGWSLINQNFAEKQGEILGLGSRIIPMTQDVLDNFGSGKPSTTSTADRTCYRSVRRLRERNLLRRERLHRVLNILDFMPKHYSNNIDFENRLGKFLPKTETKLVYNEDNQFIFKKSFEEMLEEFRSKHPELLSDGKKIPYDWTIYYLRKKSLSQKIEKEELAWIILNFNQKRGYYQLRGEEEEENPNKLVEFYSLKVTDVIADEARKGNDKIWYSIVLENGWVYRRESKYPLFDWKDKVRDFIVTTDLNEDGTIKTDKDGKEKRSFRAPSEDDWTLLKKKTEKEIDNSQKTVGEYIYNALLKNPSQKIKGKLVRTIERKFYKEELVKILKKQTGFHKELQDEKLLNTCIEELYPRNEERQKLLKTKDFVYLFVEDILFYQRPLKSQKHNIGKCSLESRKFKKNGVETTEFLKTISRSHTLFQEFRIWQWMQNLKIYEKLSDENVTDKFLSNEEDFANLFEFLWNRKEVDHKALLEYVVKRKYEDLKPKQVTAKAKEFRWNYVYDDVKDESKNYPVGETFSMIKSCLEKIENLPKNFLSQEILEKIWHIIYSVTDKIEYEKALRTFAKKNHLDEEQFVENFKKFPPFKSDYASLSLKAIKKLLPLMRMGKFWDASTIDEETKRRLNSIKERLESIDFDEKKLDEISDDDILKPVLKSFSKFKNRSLEKGLNTYQASYAVYNKHSEGSSTKWNSVKDLEKYLEDFKQHSLRNPIVEQLITETLRVVRDIWQEYGNGEKDFFKEIHIELGRDLKNNSDERKRITEFQTKNENTNLRIKLLLTELLNAGVENVRPFSPMQQEILKIYEENSIQNIADEDFDNENLKSENITFDEIIKISTMQQPTSSQLQRYKLWLEQKYKSPYTGQVIPLNKLFTSEYEIEHVIPQTKFFDDSFTNKIICESAVNKRKDKQLGLEFIKNCGGEIIELGLGKKVTILFEEQYKDFINTHYSKNKAKRNKLLLEEIPEKMIERQLNDTRHISKLVMNLLSNIVRSEDGKDDGVNSKNVLSLSGKITSELKHDWGLNDIWNELILPRFERLNTLTNSNDYTAFNEKHQKDLPTVPLHLEKGFQKKRIDHRHHALDALVIACSTRNHINYLNNQNALDSNYKKKFLTKEEYRERFQKAREDLRRDLCDKKVDVENLKNYQWIFKKPWQNFTKQAKDNLETTVVSFKQNQRVINKTVNYYEKYNDEGKKVMVKQTKGDNWAIRKPLHKETVSAKVDLPRIKVPKGKILTASRKSLDTSFNLKNIESITDTGIQKILRNYLKEKENPELAFLAEGIEELNENIAKYNDGVPHKHIYKVRVFETGSKFPLGETGNKKDKYVESAKGTNLFFAIYQDEKGKRNFETIAFNIVLERLKQGLKAVPETDEKGNRLLFSLSPQDLVFVPTEEEIANPNLVDFENLDKNQVNRVYKMVSTTQNKLECVPMSYSKSILENEMGSNNKNERIQNFYDGKTIFDEKQNPIQIKSVCWKLEANRLGKIIKVIK

SEQ ID NO: 3183 - protein, 1268 aa, unidentified
  REGION 1..1268: note = Description of Unknown: Cas Enzyme sequence
MIKNILGLDLGVSSIGWALIEVDENNIPIRIIAMGSRIIPLTASDKEEFQRGLSITKNHSRTVSRTQRKGYDRKQLKKSDLKKLLIKYDIFPSEELLKLPMLDLWKLRNDAANPNENISAEQLGRIFYMLNQKRGYKSARSEANADKKDTDYVQAVKGRYAQLKNENKTIGQFFYNGLNNANLNNSYFRIKEEVYPREAYIEEFDTIIKAQKGKHNFITDEFIHQLRNEIIYYQRKLKSQKGLVSVCEFEGFEKTVFDKEKDKNKTVFVGPKVAPKTSPLFQLCRIWEVVNTITLKIKNPEGSKYKWGEKIPTLEEKELIAEYLLKNESLSFTKLLEILNLKKDDVYVNKQILKGIKGNETYASIHKILGDNNLLNFDVSIIPTEKTSILVDKQTGEILEERAGLELDASLEKQPLYQLWHTIYSLKDLEECKNALTKRFGFDEEISEKLSKIDFNKQAFGNKSNKAMRKILPFLMEGYDYSESCSLAGYNHSNSLTKDEREQQKTIDRLELLTKNSLRQPIVEKILNQMINVVNAIIEQYGKPSEIRVELARELKQSKDERNDADLQNSKNKKLNEEIGKRLTELGLPATKRYIQKYKFIFPSLSKNLKEAKVNNQCIYCGESFNLTEALSGDAYDVDHIVPKALLFDDSQTNKVLVHRKCNATKTNQTAYDYMATKGDEAVRIYAERVDDWFNRGIISYSKMQRLKVSHKEYLERKKLGKETETDKKLWENFIDRQLRDTQYISRKAREILQKVCNNVTTTEGGVTAKLRNLWGWDDVLMNLQMPKYKELGQTVTKEWTSEHGKRKHQKEEIENWTKRDDHRHHAIDALVVACTKQGFIQRINTLNSSETKDLMQREIKEAKKLLGENYNEKEFEQDNALVKNHKERLSQLDDYLRLQKPIKFDTKYVEKEADKILVSFKAGKKVATVTKFKATGKNKITGVIVPRGALHEAGLYGIRTLYSKGGIAEKHIIKKYKVGVSAQDHIFTGKETYTVKKDKNGNEKIDDKIKIVLDSIVDNKVREVVLNRLNRGFNVGDDYRKDVKKALSNFKNLEEDPLWYNESKGIKILSIKLKTGLKDSVVPIRLNEKDDVITLVKTGNNHHIAIYEDKDNKLIQHSCTFWHAVERKKYKIPTVIKNSSGVWNELLNKELPESFLNKLPADQLTLKFSMQQNEMFILGLSKEEFDEAIKNNDKPVLSKHLYLVWSIAEGDYWFRHHLETKNSELKKTEGAKEGKRFYRLSTKGFIDLNPIKVKLNHLGEITKIGEY

SEQ ID NO: 3184 - protein, 1451 aa, unidentified
  REGION 1..1451: note = Description of Unknown: Cas Enzyme sequence
MKRILGLDLGTNSIGWALIKQDFENKQGEILGMGSRIIPMSQDILGEFGKGNSVSQTAERTGYRGVRRLRERYLLRRERLHRVLNIIKFLPEHFANEIDFDKRFGKFKSDNEPKIAYNTDGFVFKNSFEEMLSDFKMHQPQILKNEKDEVKLVPYDWTIYYLRKKALSQKIEKEELAWILLNFNQKRGYYQLRGEEEEENPNKLVEFYSLRIVEVTADEPQRGKSDIWYSLMLENGWVYRRASKTPLFDWKNKTRDFIVTTDLNDDGSIKKDKDGNEKRSFRAPAETDWTLVKKKTEQEIDNSHKTVGTYIYDTLLQNPKQKIKGKLVRTIERKFYKAELKQILEKQAAFHPELQNVDLYNDCVRELYKNNDAHQLTLSKKDFVHLFLEDIIFYQRPLRSQKSSISNCTLEFKKYKDKDGVEHTQYLKAIPKSNPYYQEFRIWQWMYNLNIYRKDDDENVTKEFLNSYEDLENLFEFLDERKEVDQKALLKFLLEQQDFKGKVLTAEIEKYRWNYVEGKAYPCNETKTMIATRLSKVENISDTFFTRGIEQQIWHIIYSVNDKIEYEKALKSFAKKHNLDEISFFEAFKKFPPFTSDYGSFSEKAIKKLLPLMRVGKHWSYANIDEHSKARIDKIITGEYDENIKNKVREKTLNLTTESHFQGLQLWLAQYIIYGRHSESSMIGKWNSADELELFLKGFKQHSLRNPIVEQVITETLRVVKDIWVQYGKGAKDFFNEIHIELGREMKNTADDRKKITNQVTENENTNLRIKALLAEMMNDANVENVRPFSPMQQEILKIYEDGVLNSDIEIDDDILKISKTAQPSSSDLKRYKLWLEQGYKSPYTGQIIPLNKLFTPEYEIEHIIPQSRYFDDSFSNKIICEAAVNSLKGNKLAYEFIKDPVLQTVEVGFGKSVPILKPDEYEEFVKKHYAKNRSKKAKLLLEEIPEKMIERQMNDTRYISKYISGVLSNIVRVEDGTDEGVNSKNIVPGNGKITTTLKQDWGLNDVWNDLILPRFERMNQLTNSTDFTAWNENYQKFLPTVPIELSKGFSKKRIDHRHHAMDALVIACATKEHVNLLNNQSAKSDNKRYDLKKKLMKFEKAVYNDAKTGERIEREIPKQFLKPWETFTVDAKNSLENIIISFKQNLRVINKATNYYESYKDEDGNIRLGSDGKPKKDFISQKGTNWAIRKPMHKETVSGKVHLPWVKLPKGKILTATRKSLDTSFDMKTIGSITDTGIQKILRNYLAAKGSSDLAFSPEGIEDLNRNIKQYNNGKDHQPITKVRVFEMGSKFQVGYSGNKKDKYVEAAKGTNLFFTVYEDEKGKRSYESVPLNIVIERQKQGLDVVDLKGDKDFYLSPNDLVYLPSGDELENSNNIDFENLSKQKKQNIYKVVSFSGNQLFFIRQDVATSVVNKAEFSTLNKMERAIDGLMIKETCLKLKTDRLGNISKA

SEQ ID NO: 3185 - protein, 1530 aa, unidentified
  REGION 1..1530: note = Description of Unknown: Cas Enzyme sequence
MTKNILGLDLGTNSIGWALVKQDFENKQGEILGMGSRIIPMSQDILGEFGKGNSVSQTADRTNYRGVRRLRERFLLRRERLHRVLNVLNFLPEHYASQIDFEIRFGKFIEETEPKLGYNKEGFIFKNSFEEMLSDFKNLDANQKVPYDWTIYYLRKKALSQRIEKEELAWILLNFNQKRGYYQLRGEEEEENPNKLIEFYSLKIIDVLADEPQKGKSDIWYSLVLENGWIYRRASKIPLFDWKDKTRDFIVTTDLNDDGTIKTDKDGNEKRSFRAPSENDWTLVKKKTEQEIDKSHKTVGTYIYETLLQNPKQKIKGKLVRTIERKFYKEELRQILEKQKEFHPELQNDDLYADSIRELYRNNEAHQLTLSKKDFVHLFLEDIIFYQRPLRSQKSSISNCSLEFREYKKYKLDEKGNRIKDENGKYIFEKDENNENKKYKEYLKAIPKSNPYYQEFRIWQWVFNLNIYKKEDDSNVTKEFLNSTEDYESLFEFLNNRKEVEQKPLIKFLLERKDFKGKLLNAEIENYRWNYIEDKVYPCNKTRWSILNCLQKGHSINLSKENEIKIWHLLYSISTKAEIDEVFKDKINRTQKKKKENQFEINNLIRAIGFNEEEISRLKNVKILEPAYGAFSEKAIKKLLPLMRLGKFWDDNEILKYSDVYFKNIEYLLGVLQQKDENISDDDRKNWNKTINNKLREELENFQNAEIESFQGLRLHIAQYILYGRHSEASMIGKWNSVEDLEEFLKDFKQHSLRNPIVEQVITETLRVVKDIWLKYGNGEKDFFNEIHIELGREMKLPSEERKSLTNKITENENTNLRIKALLSELLNDSTVENVRPYSPMQQEILKIYEDGVLNSGIEIEEEYLKISKTAQPSPSDLKRYKLWLEQKYKSPYTGQIIPLNKLFTPEYEIEHIIPQSRYFDDSFSNKVICESAVNKLKDNYIGLGFIKRFGGTILELGFGKNVKVFEIDEYEDFVKKHYTNNRGKRNKLLMEDIPEKMIERQLNDTRYISKYISGVLSNIVRVEDGTDEGVNSKNIVPGNGKITTQLKQDWGLNDVWNELILPRFERMNQLTNSTDFTAWNENHQKFLPIVPIKYSKGFSKKRIDHRHHALDALIIACATKEHVNFLNNQNALDEKYKKKTESKEAYLEKRQKARQDLRAILCDKKYNIDSKENYKWIFKKPWKDFTVEAKNNLETIIVSFKQNLRVINKATNYYEKYVEKNGVKTKEKVEQKGTNWAIRKPMHKETVSGKVDLPWVKVSKGKILTATRKNLDSSFDLKTINSITDTGIQKILKNYLEYKGSSELAFSPEGIEDLNKNIEKYNDGKPHQPITKVRVFELGSKFQVGQTGNKKDKYVEAAKGTNLFFAVYEDKNGKRSYESIPLNEVVERQKQGLNVVPLENEKGHKLLFHLSPNDLVYVLTDGFHENNGRIGIDYIDKTQAKQIYKFVSCTGGEGHFVPYTNATEIMKNENGTNSKSERIQDFKDSNCAYDKAGKPLMIKENCIKLTVNRIGIIDKLSSDKLKNIFDEYQ

SEQ ID NO: 3186 - protein, 1458 aa, unidentified
  REGION 1..1458: note = Description of Unknown: Cas Enzyme sequence
MKKILGLDLGTNSIGWALVDKDNQKILGMGSRIIPMGKDKIDYEKGDGVTKNAMRRAKRSTRRMNKRYKLRRNKLLYILHTLGMLPEQFQFKKLNEKDKYGSLLRLNGTKENNSFKETNNGIPVPTKIQELELLPISKKTLQADSISFCQLKVDALTKAIDIKDFGRILYNFNQLRGYSGGDSDERSKKENDEEESLGNKNYEVITRKVGIISVEKSEDTFKIRGGKNKGQQLNKFIIVISLDDQELEGTTELQDFKEKVGQEEELQITTKRDKNGEVTSRIITLPQKSDWRKEMEANEKILKEDRLFISELKLRDLQNNGKWTKIRNRVFLRNRYKEEFDKMWDTQAQKYNFLKECPKETLEKIANYIFPGKSESQQKLRKNAIEGGLKYIIKDQIIYYQRPLKPQTELISNCRFEKSEKVIAVSHPLFQEFRCWKQINNLYITSKQQVWNEKKKKNVWQYTNRYLTNEQKQRIYEKLQNQKGISFNEVKKIVEIKDDKIEYLNGLHVKARLIGCDTLISIKKQLGDYAESLLEKDISIIEKIWDAIFDVRNHEGSEYDITSKRVAPIFEILKEYLDDSQKAEELALKLAQKVKFVRKYGSLSAKAIQKVLPLMQLNPQNISEQITDKFNTIKNFISTGEILDNTDYNFQDYVIDFVEKKPNALENGGLMEYLAISLAYDKHTAETMEAQISNYHDINYEKRNLRNPIVEQLMNETMQVVKAIWKQYNIDTKELEIRIELARDLKNSAKERKAIYDGQSNNQKENNKTKERLKENQIALTSENILKYRLYAQQKETSPYTGKPIDFSKLFDNKEYDIDHILPKSRYYDDSFSNKVICEKNINEEKSNRTAWEYISQQNSKHKILSIENFIKHVNNNYFGKRKKNLLAEKIPTNPVSRQLKDTQYISIAVKNELAKIVGSENIKTSTGEITDFLRSRWGLKKLFMEMTEERFKRMELWDLDENGNPTTTTKWVTKEVMNDGEKNKNVYEIKNWSKRYDHRHHAIDALIVALTEQSHIQRLNNLNKYIQDQLERRKEEFKITTGEDETVFEAFCNLEEGRRDEILQKMESSRYFEKPFLYTNKKGEIVSSLCRQVKEHLETMIISQKPKDKLSISEDTLDPNTPNKKLKKQLKIRAAIHEDTYYGKTNERDTKRIKLSALSASDIDKIIDKSLASEIKEHKKKYIKKEDAFIGEGLKEFNDNRIKKNKQPVYNVKVWYNKNEKKKDSLQRLYDNNEKQSVITGDNYLFIVMEKETKKGVSRVFDIAPLYDSVALAKEYLKEDKRNFKQLICEDYRLKHTDKPQKVLFYLQQNDLVYLPTSSNDPVLNMTNNELKEWLNKDCENKKSFARRIYKVVKMTGKNCFFIPNNYATTISTPKDLSKEDLEKLHKEYKDQDKDIPKHKKNYEEFGSFGSSIKTEINDNFVKELVLKEKFDGNQPIKIQDTCLKLKIDWLGNIEFA

SEQ ID NO: 3187 - protein, 1506 aa, unidentified
  REGION 1..1506: note = Description of Unknown: Cas Enzyme sequence
MFSQRNNPYCELLSNSATKVSVIFFISKFFLIFFVFISFLLSLPHQNIKRMKRILGLDLGSNSIGWALVQQDFENKQGKIIATGSRIIPMDQGILGDFEKGNTVSQTAERTTYRSMRRLRERHLLRRERLHRVLHILGFLPPHYDAQIDFTKRYGKFIDNAEPKIAYNNGNFIFMNSFNEMIEDFKKYQPQLFYKKSNGEESKIPYDWTIYYLRKKALSQKITQQELAWLILHFNQKRGYYQLRGEEETENPNKEVAFHSLKVVDVEAEAPNKKGEIWYTIRLENGWIYRRTSKNPLDDWKGKTRDFIVTTDLNDDGTIKVDKEGKEKRSFRAPDENDWNLLKKKTEHDIDFSGKTVGAYIYDHLLQNPNQKIKGKLVRTIERKYYKDELKAILAKQIALQPELFTETLLADCIRELYRKNETQQQNLLSKDFLHLFVEDIIFYQRPLRSKKSTIANCTLERRSYIDKETNERKDTPIKVCAKSNPYYQEFRVLQWLQNLRIYEIETDREVTAEFIETAEDYEALFNFLMSQKEIDNEGLLKYFLFAKNPQIKDKVAKSELKKWLTTYRWNYVYDAADNSSKKYPMNETGYELQRYLQKVEGLPANFLTFDTTYRLWHLLYSVKDKVEFEKALKKFAQEYQLDEASFVDSFKNFKPYPNEYGSFSEKAIKKLLPLMRFGNHWDFNRIDVSTQKRIDDLINGVANEDIRTIIREKAEKYQLNSETCFQGLPLWLAQYVVYNRHAEATDIEKWTSVNDLEAYLEDFKQHSLRNPIVEQVVTETLRVVRDVWQQYGRGQANFFDEIHIELGRELKKTAEERKQLSDKNQQNENTNLRIKKLLAELKEDASIQNVRPYSLVQQELLKIYEEGVFSATDEVEEDIQKIRKKAEPTTPEIQRYKLWLEQKYKSPYTGEVISLTKLFTEEYEIEHIIPQSRYYDDSLSNKVICESAVNKLKTNQLGLEFIQNHHGEKVRITGNKEVTIFTEEQYKEFVKKHYANNSAKQQKLLLNEIPEKMVARQLNDTRYISKYISEILSKIVRSDEKDEGVNSKNIIPCTGKITTALKQDWGLNDVWNELILPRFERMNQLTQTQLFTSYNDRLQKNLPTVPIEYSQGFQKKRIDHRHHAMDALVIACATREHINYMNNQHALDKSKDKKEKQQSRIDLRTILCEKKNNNWQFKKPWATFTQEAKESLEHIVVSFKQNLRVINKATNYYEKWEEKNGVLVKKKVKQEGTNWAIRKPLHKETVSGKIILDKKISKDKILTATRKAVDITFTEKIISSITDTGIQKILLNYLKYKGSPEVAFSAEGLEELNKNIAQYNDGKKHQPIYKVRIFEEGSKFSLGETGAKATKFVEAAKGTNLFFGVYQGKGKRTYATIPLNEVIERQKQGLPSVPERNEKGEPLLFSLSPNDLVYVPMEGEATETIDFNNLSKEQKERIYNVNDFSSTTCYFTPNRVAKAICPKEIDKKGKDSGSFDTKTASIEGVQIKEVCIKLKVDRLGNITKA

SEQ ID NO: 3188 - protein, 1514 aa, unidentified
  REGION 1..1514: note = Description of Unknown: Cas Enzyme sequence
MKKILGLDLGTNSIGWAVVNAEEICRENETSYLKPTAISASGSRIIPMSADILGDFDKGNSVSQTAERTGYRSVRRLHERNILRRERMLRALKLMGFLPDHFASQIDRYGKFVNHSEPKLPWRKGIDGKMEFLFEDSFNEMLADFAANQPQLVADGKKVPYDWTIYYLRKKALSQKITKEELAWILLQFNQKRGYYQLRGEEEEQEDKLVEYLAQKVISVEATNEKKGDEVWYNVHLENGMIYRRTSKEPLDWVGKVKEFIVTTDLDKDGSPKKDKEGNIKRSFRAPKEDDWTLLKKKTEADIDNSQKTVGCYIYDTLLQKPDQKIIGKLVRTVERKFYKEELRQILEAQKSLIPELKDDVLYKACIEELYPNNEARRNNIAKPDFTNLFINDILFYQRPLKSKKSLISNCPYESHFDKDGNEYPVKCIAKSNPLFQEFRLWQFVQYLRIYQREDDIDVTQKFLKSEDDYVKLFEWLNDRATIKQDTLLNSYFKVKKQKGQEQYPYRWNYVEEKEYPCNETRAVILNGLTKCAINTDFLTPEIEKHLWHILYSVEDKIEINKALAKFAEKYGLSGSFVEVLSKVKPFKKDYGSYSEKAIKKLLPLMRMGTYWVESAINPEIRNQIEKIISGEYDENIKTRVREKAISLTDISHFRGLPVWLACYIVYCRHSEAKEIEKWGKPEDIDLYLKDFKQHSLRNPIVEQVITETLRTVRDIWKQEGQIDEIHVELGREMKNPADKRKKMTERILENENTSLRIKAMLMEFMNPEMGIENVRPYSPSQQDILRIYEENALDNLTKEDKDFDFVNKISKMAQPSKSDIIRYKCWLEQKYRSPYTGEMIPLGKLFTATYEIEHVIPQSRYFDDSFSNKVICEAEVNKLKDRQLGFEFIKAHHGEKVQLSQGRVVEILSVEAYEKFVKDHYSNNRTKMKKLLLEDIPDDFIERQLNDSRYISKVVKGLLSNIVREKLDNGEYEPEAVSKNLISCNGSITDRLKKDWGMNEVWNSIILPRFQRLNEQTGKDCFTKIINGHEVPDMPLELQKGFNKKRIDHRHHAMDAIVIACTTRDHVNLLNNEAAHSKHNANRYQLQRKLRRFEKIVIDGKEREIAKEFAKPWDSFTTDAKQALENIIVSFKQNLRVINKTTNHYQHFDNVGKKLMVKQVKGDSWAIRKSMHKDTVFGEVNLRMKKMVSLNEALKKPERIVNKEFKAKVKELLRDGRDAKYIKKYVEDNKDVWSDINISKIEVYYYTKETKDRYFATRKPIDTSFDRKKIQESVTDTGIQKILLAHLELKGNNTELAFSPDGIDEMNRNIIALNGGKYHKPIAKVRVYEKADKFSVGRNGNKSTKFVEAAKGTNLFFAIFSSEKLNKETGETENVRSYLTIPLNVMIDCQKQYGSQWREKIEGYLKDKELVSADVKLLFILSPNDLVYLPTNNDMKNGIVEMDKKRIYKMVSCTGNEGHFVPEIIANPILQTTELGSNNKAQRAWTGEMIKETCVPIKVDRLGIIIELNGQKL

SEQ ID NO: 3189 - protein, 1470 aa, unidentified
  REGION 1..1470: note = Description of Unknown: Cas Enzyme sequence
MKKLGLDLGSSSLGWAILDIDESKIIKQGVITFDTGMLKTQGGYTSPTRDRRITRSGRNLIRARKYRKWSLLKILIKHDFVPLNEEELNDWSKYEKGKIRKFPSNTRFLKWLACDFSYQQNGKKYKNPYELRVKAIDEKLTKHELGRALYHLIQRRGYKDIGGQDDDTKKQLERRSKEGLDSAIKENRTLAEALQKDFLQKNKKARTQYPYRYEYENELEVICKQQGYSIDKDNKGNYQDGLVEKLWKAIIWQRPLRTQKGNIGKCTFEPSRQRCPISHPIFEVFRAWQYINTIKYFDQDDNKQPLPIEHKRELFDFLLKKDENFKFEEVKEFLDKKAGKDQKYNYISKEGKYDSSVSGMPICKELINLFGDKAKKAILSIEDEDENNSSKIVKSKIKRENKKEAEADYSIYDLWHFLFNFDKEFLETFAQNNLGIANELSKKGVESNPMVKIQEKMTQGYADLSVKAIRKILPFLKEGYLYDKAVLLAKIPDILGDRWIEHKSLILEILEQSYNTYIYRKQIIDITNKLIDKHKGLPCEDKFAYKDYSYTIDQYDETDIECCCENHFGEKSWPKVENRDEIKRDVKEQYQSYFADNKRAYKTIPSLTEVFKKLLNDNKIALNGELYHHSNRENIYNKKLDINYKTGEKQLPIRKNSQGIEIEILPIPLIDSIKNPMFNKAMSILRKLVNELILNGDIDQDTEIIIELARELNDNNRRIAIERYQKARRNERDKIRTFLEQYKTEENQHFNIEEKIPVFELWTEQIFDKPKENKHFNKAQEILSKEEKERYKLWLEQKGQCMYTGKMISITELFSNETDIEHTIPRSKLPDNTMANKTIAFKWYNEQIKRDKIPSECPNYLKDEEVGTAIIPRLDKWKELRDRYQKLYEDRKKAKGREDENAKNKRIQDKHYYKFYFDYWNDKVSRFEATEIKSGWVRRQLTDTQLTSKYAREFLKLYFKKVFVQKGSITSEFRKILGIQGQEEIKERGRHTHHTIDAFVLTLIPTNSSYKEDMLKKYYLWLKSKDNNILKELEKSKKVLLQGISIQKTIQTIENTTLAYNFHKDIILVQSNKIVRHRGKIQYVKNKSGQYILDKNGNRIIKRTKGDTVRSELFAQTYIGKIRDVERDEKGNPIRENGDWKYKTGKEEFVFVKREPINSVKSSEKNINSIVDPQIRKLVKEQKNNSVIRDSQNNIIRHVRIQTKAGREVKQRINYESKYDYKNKFYSEAGSIPYAILLQKIHKGKNIKNIIPIPSFEIAKIHKQKGKFDIESCIQTLHPNYKDNNWNKQLLKVGQKVLVLKDDSEYSQIENIDFITKRLYVIKQFKTDNRIVLEYHLNAIPEQDIDNAIKKYKDNLLLEYEKKYGIPEVVEDLSIKDEKERDKDYKNRKYSFNNLGDFRLSRLTNIIGREETLKVTHILGSYKKYSSTIEKDGDTPLLLMSRNNWNFLYEGIDFDTTITGNLNFKKANNL

SEQ ID NO: 3190 - protein, 1429 aa, unidentified
  REGION 1..1429: note = Description of Unknown: Cas Enzyme sequence
MKKILGLDLGTTSIGYAYVIEDEQYQNSEIIQIGVRVNPLTTDEQTNFEKGKPISINADRTLKRGARRNLDRYQERRANLIHALFKGDIISKETKLAEFGKRTTHSTWKLRAQSAKERIEKEDLARVFLTINKKRGYKSSRKAKNEDEGHAIDGMEVAKKLYEENLTPGQLAYSFLMESKKQIPDFYRSDLQAELDKVWDFQKQFYPEIFTDEFKKELEGKGQRATSSSFWGKYKFNTAEIKGFRDEKKIQAYKWRSEAVSQKLEKEEVAYVITEINNNLNNSSGYLGAISDRSKELYFNKETVGQYLYKQLLKNSNTRMKNQVFYRQDYLDEFETIWNEQRKYHLELTEDLKQEIRDIVIFYQRKLKSQKGLVSFCEFESREIEIENGKKKTIGLKVAPKSSPLLQEFKIWQIVQNLLIKNKGSKKRIAKNEKEANLFEEEQEIFPFDLEEKMKLFEELNLKGNLSEKTLLEILGYRNQDWEINYTQLEGNRTNKALYEAYLKILDIEGYDVKDLLKIKSNKDEVELGDLNISAHDIKMMVKQIFETLKINTGILDFNPELEGKEFDLQPSYQLWHLLYSYEGDESASGNEKLYDLLEKKFGFKREHGQVLANLTLSDDYGNLSSKAIRKIYPYIKENNYSTACELAGYRHSASSLTKEEIANRPLKDKLEILKKNSLRNPVVEKILNQLVNVVNALIEKNSKRDENGNIVEYFKFDEIRIELARELKKNAKERAEMTTNINATKLAHEKIFKLLTSEFGVKNPSRNDIIRYRLYEELKNIGYKDLYTNTYIPREILFSKQIDIDHIIPQAKLFDDSFSNKTVVFRKDNLDKGNKTAIDYIESKYGEKNLVDYLNRVDSIFEVGKKNKEEGISKAKYLKLIKKESEIGDGFIQRDLRDTQYIAKKAKNMLYEITRSVVSTTGSVTDRLREDWDLINIMQELNFDKFKKLGLTELVEKKDGTFKERIIDWSKRNDHRHHAMDALTIAFTKHSHIQYLNNLNARKNEKNKLHGNVIGIETKETHIMIDDHGNKNRVFNLPIPNFRQVSKEHLENVLVSHKAKNKVVTKNKNRTKSKTGDRIKIELTPRGQLHKETVYGKYRYYESKLEKVGIKFDLDTIEKIADPHYKKLLLERLSDNANDPVKAFGGKNSLSKKPIFLNDGKTKTLPEKIKLVWLEEDFSVRKDLTPENFKDEKSIEKIIDVGVKKILLSRFRKFGSDPKKAFSDLDKNPIWLNETKGVSIKRVTISGVKNAEPLHNKKDHFGNEILDKEGKSIPVDFVSTGNNHHVSIYRDEKGDLQEKVVSFFEALERVNQGFPVVDKTYNQHLGWQFLFTMKQNEYFVFPNSSIDFNPREVDLLNPENAKIISTSLFRVQKFTIKDYFFRHHLETNVEDHSKLKGVTWKREGLIGINNIVKVRLNHLGEIVKVGEY

SEQ ID NO: 3191 - protein, 1527 aa, unidentified
  REGION 1..1527: note = Description of Unknown: Cas Enzyme sequence
MKKILGLDLGTNSIGWGLIEQDFENRQGKILGMGSRIIPMSQDVLGEFEKGNSISQTAERTRMRSVRRLRERHLLRRERLHRVLNVLGFLPKHFANQIDFKERLGKYIEKAEPKISYHEGDFVFKNSFSEMLEEFRKFQPDFVEGGKKVPYDWTIYFLRKKALKEEIEKEELAWIILNFNQKRGYYQLRGEEEDEKPNKLEEFYSLKVVEIVVDESPNKKGDTWYSLTLENGWVYRRSSKISLDDWLGKTRDFIITSDIDEEGNLKLDKEGNPKRSFRAPSEDDWGLRKKKTEKEIIDSSKTVGQFIYEHLLANPIEKIKGQLVRTIERKFYKDELKKILLSQQRFHPELQDPGLLIDCIRELYKNNASHQNFLGNKNMLHLLVEDIIFYQRPLRSQKSTVANCSLEHKIYQQEGVEKKASYKVAPRSHPLFQEFRLLQWVSYLKIYRKEDDSDSTDRFLGSIDKTTALFDHLMTQSEIDCAKLMTFLLSSEGYKGKELKVEVTKFRWNYVYDSERGESKLYPGNTTRAEFLKRLGKVENFLAQMYSVQFEEALWHVIYSVTDKIEFEKALRKFARKNCLEVNSFADSFRKIPPYKSEYASYSLKAIKKLIALMRFGSSWNLGNIDKDTISRIEKILNGEYDPEIKDKVREISRNFKDKEDFRGLPVWFANYLVYGRHSEASELVKWKSSAEMADFIQDFKQHSLRNPIVEQVVVETLRVVKDIWEKYGNGQKDFFDEIHVELGREMKNPAEQRAKLANQISENENTNLRIKSLLVELLYDPSIENVRPYSPMQQEILKIYEEGVLKSNVEVPDDILKISKTAQPSQSDLERYKLWLEQKYRSPYTGRVIRLSRLFTPAYEIEHVIPQSRFFDDSLSNKVICESSVNKLKDKMMGMEFIKNFHGQRVALGFGEEVEIFSESAYKAFIQDNYAKNPAKKRKLLMDELPELMVERQLNDTRYISKYITSILSHIVRSEENDTGFNSKNIIPGNGKITSTLKQDWGLNDVWNELILPRFERMNQLTGSSAFTSWNENHQKFLPTVPLEYAKGFQKKRIDHRHHALDALIIACANRDHVNYLNNEHALGKKTQEEKQNKRYDLRQKLCHKKKNGHSNQHFEWIFTKPWVSFTIDAKDHLERIVVSHKQNLRVINRTSNKYLSYKDESGDLRLDKNGNPVKALTRQTKGDAWAIRKSMHKGTVIGKIKLREVKTVKLSVALNHYENLLDKKLKKKISELVKLNYDKKLLNKFFKDRNYLFEGKDVSKLDIYYFEEDLAASRVNLDSSFNEKKILSVTDTGIRKILLNHLIRYEGLKDEKGNLMPAETIAFTPEGIEELNKNIQQLNGGKFHQPIHKLRTYEPLGNKFQVGFQGNKSSKFVEAAKGTNLFFSIYISSDGKRTYETIPFNVVMERLKQGEGPVPPFNEKGDKLLFHLSPNELVYVSDSEENATVANLSNLSKEQVGRIYKMVSSTGPECHFVRADISALIKGYDAKTKIGELGSLNKQELSIDGLSRIKEKCWKIKVDRLGWVC

SEQ ID NO: 3192 - protein, 1375 aa, unidentified
  REGION 1..1375: note = Description of Unknown: Cas Enzyme sequence
MEQIFGIDLGTNSIGATLREGREFPWYGVYTFKKGVGEGKAGEYSFAAERTSNRSSRRLYNARRYRIWATLDFLIKKDYCPLTLEKLDKWRNYSKGDGRIFPVDDDAFQDWIKLIFKKGGKPDYSSPYQLRRELITNKLDLSDIKNRYKLGRALFHISQRRGFKSSRKTGSSEKLAIFEGSSKTGTVGRNEYEQLLIDHKSLGGAFAFLEDSGIRIRNRYTLRSDYEKEVDLICQVQGLENEQFTDHIKKAIFFQRPLRSQKGLVGKCTLEPQKSRCPISHPSFEEFRAWSFLNNIKYFEAETGKMESLPLNLKESLYEEKFFLKGKNDFKFSQINKHLQKISSKKWILNYKDESTVPACPVSARLRSIFGKEWRNVSFSRTLEKYGKSKKITYEIDEIWHILFSFEDEECLEEVFRSYFQLDEDQLEEVKVLWNSFPAGYAALSLKAINNILPFLRDGLIYTESVLIAKIPDVIGKEKFQENDSFLKIRVKSAIDENRKEKKIISIVNRLISDYHLSDYKQGFRNPSYFLDEDDFKDIQKAIFGNFGKEAWEKEGEKDFYLLKVKDLYQEFFHSKERHHFSSPHLLDHIKEVLENEFHIDEKELEKLYHPSQIEIYPPAKRSEDGMLFLPNPKTGAFKNPMAYKTLFQLRRLINDLLEQGKIDEDTRIVVEVARDLNDANKRWAIEAYQRIRENENREIAFAISQLLSDPDFSGNADPDSQTDREKLRLWTEQSNDPNEFWKEVLATKDDVKKYRLWKEQGCKCMYTGKPISFTKLFDQNVIQFEHTIPRSKSFDNSLANLTVCYTHYNNDIKKTKLPVELPNYLFETKDGKAIKPQLVDWEKRVDSLYIQIEAAKSRSKNAMDKSQKDDAIRKRHMLQMELDYWKNKLDRFTRVDVPSGFKNSQLIDSQIISKYAFHYLKTVFNRVDVQKGTVTALFRKIYGIQPKGENKDRGKHFHHAIDAAVLTMISKTSERESILKKYFEDSENNQTRDYPLLPFEGFKYQLLEEIKEKILINNLANKDQAFSPGTKIVRKRGRIVWLKNEEGNLILNENNEKIPKVMQGDSVRGQLHLDTFYGKIRAVKRDENGAPMRGENGEFEFNKVNGKDEMWVVGRKSITDLKIEADVIVDPYLENHIRKQLEDGVSISELKDFGGKIIRRVRVRVKAGRGFLDANNVTELKEQTYKSKYDYKNTYYTNSGDNYAFGFYKGINQRKVVSINLLEASKIVRLNDSSKLEDLFEKSLVLGSGKNHEVVNLYHVFQVGQKVLLYSEDRSELKDLRPEEFSDRLYFIKKLADAKAQRILFQHHLEARDDQQLMIDFEKAEFGTKGKDGFSSFSQDFIAPRLLLTPSNYNFLIEGKDFEMNLSGEIDFKF

SEQ ID NO: 3193 - protein, 1395 aa, unidentified
  REGION 1..1395: note = Description of Unknown: Cas Enzyme sequence
MIKNILGLDLGVSSIGWAVVQEDSKNPENNKIIKLGVRVNPLTVDEQLNFEKGKPITTNAGRTLARGARRNLQRFKLRRVNLISVLKKNNILKETDLLTEVGKNSTFQTQELREISANERIGLSDFARVLLLINKKRGYKSSRKAKNEDDGQIIDGMAVAKKLYEENLTPGEYSYQILQEGKKQLPDFYRSDLQSEFDKIWNFQKQYYSEILTDDLYKALEGKNKNVTWAILKDPFSLVGIKQTGTMQEKKIEKYLWRSEAVKKQLDFESLAVVLQEINSNINHSSGYLGAISDRSKELYFNNQTVGEYLYQQLKINPHTKLKNQVFYRQDYLDEFEKIWKVQAQYHKELTKELKEEIRDIIIFYQRKLKSQKGLISICEFENREIEITENGKTKRKTVGLKVAPKSSPLFQEFKIWQILNNLQFQNIESKEIFPIDLECKQSIFDEVNIKGKLSAKDVLYIIGYSGKEWKTNFKDIEGNNTNENLYTAFLKIIASEEIEFPKEFKLTIDDEIKVSKVYSSAKIIKEFVREKLSELGINTSILDFNPDLDGTDFEKQSFYQFWHLLYSYEGDDSPSGNEKLYELLEKKFGFKKEYSKILADVGFPQDYGSLSSKAMRKIYPYIKEHKYSDACNLAGYNHSKNSLTKEQLENRVLKEQLEILPKNSLRNPVVEKILNQMINLVNEVSKEYGKPDEVRIELARELKNNAEERANMTSEISKATSLHQKYAEILKKEFKIPVPSRNDIIKYKLYLELANNGFKDLYTDTPVKEILLFTNEYDIDHIIPQSRFFDDSFSNKVLVPRGANLKKGNFTAFDYLEMEGKEKLEKFLNIIKELYDKGFITKAKYEKLQKKGTDIGDGFVERDLRNTQYIARKAKEILFGITNHVTPTSGNITSKLREDWNLVNTMKELNLEKYKKLGLTETVINSKGEEKQRIIDWTKRNDHRHHAMDALTVAFTTHNHIQYLNYLNARKDESHKQHLVISNIENLITKVFEKKNGSKQRRFIEPIKNFRIDAKKHLEDVLISHKAKNKVVTKNINKIKKKGGIVAKTELTPRGQLHKETIYGSSKFLTTKEEKVSGKFNSEMIDKVQNEKFRKALSLRLKEFDGDSKKAFTGKNILAKNPIYFNEEKTEQVPEMVTLAWYETSYTVRKAVNPDNFKDYKNIEKIIDKGVRDILRDRLKKFNGNSKEAFSDLEKNPIWLNESKGIAIKTVTITGISNTEALHYKKDHFGNEILDKNNKRIAVDFVSTGNNHHVAIYEDIDGNLQERVVSFYEAVERVNQGFTIIDKDYNNSLGWKFLFTMKQNEMFLFPSEDLNPKEIDLFDEKKLSLISNNLFRVQKIATKDYFFRHHLETTVEDNSTLKGITWRREGLNGIRNILKVRLNHLGKIVHIGEY

SEQ ID NO: 3194 - protein, 1405 aa, unidentified
  REGION 1..1405: note = Description of Unknown: Cas Enzyme sequence
MTKIIGIDAGSNSLGWAIRDTNKEENQIIDCGVLTFDKGVATEKGNEFPKVQKRTDSRGKRRNYQAEKYRKWELLKFLIENKMCPLTVRELKEWSKYEKERPRKYPQSEEFINWLRFDFNGDGKPDFHLFEKDKHESYYIFRTCSVDENFKNVFDSNPYILGRVLYQLVQQRGFKGRDEVEAKTMLQGSEKTGTPGRNEIAYYIDKHKTLGAALYYFQKENGGRIRQRYNLRKDYEAELKEICRVQDIDEIGYQKLWKAIIWQRPLRSQKGLVGMCIYERNKKRAQVNHPLYEEYRTWNFINNLKIEIPEDWERESYLSEKIYPLFYRASDFELNAILKQLEKDGAQMRAKFSLKTKVLSARLLNSFQDIFGEDWKEKYGWNEIHIRDNQPKKKVNGGYNFEDIWHALNTFDGQENLKKFALEKLNLDEQNANKFSKIKLNKGYATLSLSAIKKIIPFLRKGFLYSQAVYLANLYKVLGTDEITDDLIDYFAEEVNKIIQNNGERKMLNSIINSLIRDELNNENRYSIEVDRPLDYAELRMMDAKIIDVFGEKTWNSFDKDKKTEFLNYVSNQFKSFLKKSVLSKKNVFVEQPRLHDQIFTFIKENYNVVDERIKYLWHPSEQESYEVAKEYQEYTLNNKNVYITENKVETFQSRYPNAEYQGRSIKLLGSPEPISKGFKNPMALKTLHKLKQLLNYLLKVNKIDEDTRIVVEIARELNDKNKRKALENWNKNREKENESYRKMIDEINTECNTNFDENDKTLLRKIRLWIEQNKLCPYTGKTINSCDVFNGTLYDIEHTIPASISFDSELKNLTLADTNYNRGIKKKSFPAQLANYEDDTIISGQTYTAILKNIESIFGKRTVTKKKIKGKEAEIVRWEKIEHLEKLFEEWKNKSAYASTKDYKDYCIQKYQEIKLDLDYWKAKLKTFTIYEYKAGWKNSQLRDTQIITKYALPYLKTVFKKVSVEKGEVVNQFKEIYNVKLPFDKKNRSVHSHHAIDGAILTLIPSFYERDKILQKYNEEKDKKTGNIYHEQPKDWERFNASKILSIEREMLINNLPENNTTLPTFKKIRKQGKIVWLDKENKIPKMAKGDTIRGQLHGESLYGAIKQPKRDKNNKILFNEDGKMLLGDEIYVVIRKDLLYKKDANSSGFKTLEEIEKVIVDRALFDMIKKQVEEASDFKTALSNGIFMLDNKGTPVNKIRRIRCKERMKYDTTVKVHTHYFASDKEYKRNTLAVNGENVLCLFYKNDAGKAMNILNISQIAELKFKNDRQYFEEPHYNQIDTGRGKNKTTIPLYAILRSGQKVLFYKETKEELQELWKDGMREDLSKRMYKIYQFESDGRIKFRHHLAAGIDTELKKENKEYSYFDLKEDQVFLRLRQKEWNFAIDGIDFEMKLDGSIEFKE

SEQ ID NO: 3195 - protein, 1663 aa, unidentified
  REGION 1..1663: note = Description of Unknown: Cas Enzyme sequence
MKRILGLDLGTNSIGWALVEQDFEAKIGKILGMGSRIIPMSQDILGNFDVGNSVSQTAERTGYRGIRRLRERHLLRRERLHRVLNVLGFLPEHYANQIDFEKRLGQFFNETEPKLAWNNRDFQFTKSFDEMIEDFKRNGHNIRIPYDWTIYYLRKKALTEKIQKEELAWIILNFNQKRGYYQLRGEEEEKIDVKEYCELLKIISVEKGEKDKKNDKRTWYKITFENAWEYSATFTAEPNWLNTEREFLITEEYDENGNIKIVKDKKSDTTGKEKRRITPLPSFDEINLMNKKDQDKIYKKIKARTEITICNSGTTVGSYIYESLLQNPTQKIRGKLVRTIERKFYKTELEQILKKQIELQPELFTEELYNDCVRELYRNNEAFQTTLSKRNCFVHLFVNDIIFYQRPLKSQKSSIGNCPLEYRIHKINKLDEKGNPIKNVFEKDADGKDIEIKEYLKCIPRSNPYYQEFRLWQWLYNLRIYTREDDIDVTTMFIKNTADLENLFGFLMSRKKVGNKDVVEFLIEESNKNEVEQQIRAQFPKLNDEKIKSKINSELGKKVKELLSKYRWNYVFDNSKEKEEDKSKEYPCNETGYEIRKLLKEVKNVPVDFLEIIDMKEVEYKKKNEQGVRIKTGKKGIENLGTREYQLWHIIYSVKDKNEFKTALGNFAKKHKIDVASFVSIFEKFKPFPSEYGSFSEKAIKKLLPLMRLGKYWSENAISDSVKERAKSIKERLDCIQEEQTIDSVADDDVQRRVLKSFFKFKNTDIENYVKGLQLYQASYLVYGRHSESDVAGKWGMSYDIQKYLYKFRQHDLRNPIVEQVITETLRVVKDIWEHHAEQNNIQPVMVYDEFKKKQVKNYPNVFDEIHIELGREMKNTAEDRRAITNNVLSNETTNLRIKKMLLEFSSDDDFRSENGENTVRPYSPTQQDILKIFEDDVLSHFSEQELKNQNFETTGTDEAKNVFEITRKSQPTRAEVIRYKLWLEQKYCSPYTGEIIPLSKLFTTAYEIEHVIPQSRYFDNSYTNKVICEADINKLKDNNLGLEFIKKFYGQKVKIDNRTVKIFTETQYKDFVSQHYKNSNKKRGNLLLEEIPDKMIDRQLNDTRHISKFVSKLLSNIVRNETKDDGINSTNLIPVTGKMTSKLKQAWGLNDKWNELILPRFERMNQLTNSLTFTTKNKEGHTIPHIPLELSKGFQFKRIDHRHHALDALVIACTTKRHVQYLNNENAKSQKFHLQRDLAKKIREFETVAIEKMTKNENEIWIKSNKTETREVPKAYCKPWDNFAIEARNELEKIVVSFKQNVRVINKTTNKYQAYANGKKIVKSQGKGDSWAIRKPLHKDTVYAKVSLRKIKKVRLSEALKDWKMIVDKEFKNEIKRIIAQYGKFDALLINKYFKDRKYLFNDTDISKVDIYCFETENAATRKALDTSFNIKTIEAITDTGIQKILLKHLENKNNNPESAFSPEGIEEMNKNIVQLNDGKVHQPVYKVRIYEPIGNKFPIGSIGNKKDKYVEAAKGTNLFFAIYADENEKRSYETIPLNIVIERMKQGLNAVPERNEKGHDLLFYLSPNDLVYVPTEEERENPQNADFENLNEHQVQRIYKMVSSSGSQCFFVRSDIASSIVNKFEFSTLNKTEKSIDGVMIKDICWKLRIDRLGKIYSLEK

SEQ ID NO: 3196 - protein, 1346 aa, unidentified
  REGION 1..1346: note = Description of Unknown: Cas Enzyme sequence
MKKILGLDLGTTSIGWSFINEADNDNETSSIINAGVRIVPLTTDEEADFKKGNTISINADRTLKRGARRSLQRFKQRRNALLEIFNRIKFISSTFIYAESGVATTFTSYKLRAKSATEAVSKEELVKVLLMLNKKRGYKSSRKAKTAEEGEAIDGMAIATSLFENNLTPGQWVYNSLSNGGKFIPDFYRSDLQKELEKIITFQNQYHPEFINKILLEEIQGKSRTLTSQYFTKILKIELAENKGTREETKLQHYKWRNEAFINELDLKILAFIITEINYQINQSSGYLGAISDRSKELYFNKETVGQFQYKQLQDNVHSKLKNQVFYRQDYLDEFEKIWETQAKFHPELNDKLKSEVRDITIFYQRKLKSQKHLISHCEFEKGHKAIPKSSPLFQEFRIWQNLNNIIVKNETTKEPFLLSEELKQQIAEELQFKDGLTDIQLMAFCELKKGSHSVNFKKIEGNRTNTALFKAFEKILEVEGYDELDITKLDAIEVNKIIKSVFLDLEINTDILDFDPTIQGNNFDKQPYYQLWHLLYSAEEDEFLKKSLMYKFGFKENHIPFLLNINLQADYGSLSAKAIKKVLPHLMDGQIYDKACLMTGYNHSSSLTTEQNNDRVLKNTLDLLKKNSLRNPVVEKILNQMINVINAIMKDPAMGKPDEIRVELARELKNNNEQRSEMTKQINKSTEEHEQIRKLLHHEFGIARVTRNDIIRYKLWKESDGISLYTGKPIEPSKLFSKEYDIEHIIPKSRLFDDSFSNKTICERKLNIDKSNKTAYSFLQEKLTPEEFDQFEKRVKSLFGKISRTKQNKLLMADNEIPEGFIDRQLRETQYIAKKAKEILLEVSRNVTATIGSVTDKLREDWELIDVMQELNWDKYNKLGLTHIEEGKNGERLRKIKDWTKRSDHRHHAMDAITVAFTKPAYIQYLNNLNARDINSKKGNDILGIEFKYLKRDKNNKLRFIAPMPNFREEAKKQLESILISYKAKNKVVTTNKNITKIKGSTNEKIQLTPRGQLHKETVYGKLQQYATKEEKVSASFTKEYILKVAKKDYREALLKRLEENDNDPKKAFTGKNALTKNPIYLNTEETDAVPEKVKIVWLEADYTIRKDITPDLKIDKVIDVGLKAILRDRLAEFGNDPKKAFVNLDENPIWQNKEKGIAIKRVTISGVSNAQALHTKKDNFGNEILDKNGNPIPVDFVSTGNNHHVAIYRDDKGNLQEEVVSFYDAVVRRNLGLSVINKNHGKGWEFLFSMKQNEFFIFPSESFNPHEMNLLNSNNYHLISPNIFRVQKIATKNYMFRHHLETTVEEVNELKDIAYKSVRSTSPLNGIIKVRTNHLGKIVQLGEY

SEQ ID NO: 3197 - protein, 1533 aa, unidentified
  REGION 1..1533: note = Description of Unknown: Cas Enzyme sequence
MKRILGLDLGTNSIGWALTNNDFDNKLGNIAGLGSRIIPMSQDVLGKFDSGVSISQTAERTKYRGTRRLVQRFLLRRERLHRILNILDFLPKHYSEAIDFDKKFGQFKPEREEKLSFYKNENGKNQFLFMESHQEMLSEFKLINPDLKQVPYDWTIYYLRKKALTQKISKEELAWILLNFNQKRGYYQLRGEEKEENKNKLEEFHTLTVVNVIEREKGKSGIWYNVILENGWIYKRESKIALFDWVGKQKNFIVTTELNDDGTIKRNKDNEEKRSFRSPKEDDWGLVKIRTEQTINQSDKAVGTYIYDELVKNPNQKIKGELVRTIERHYYKSELKQILETQIEFHTATLKDRNLYKKCIDELYKHNDSHKTSIKDRGFDYLFLDDIIFYQRPLKSKTALISDCSLEFRPIKDKKGVLVKDINGKQIVKPLKCIAKSNPIFQEFRLLQFVKNLKIFRKDIANDVDVTNDYLKTEEDAAELFNWLNDKAEISQKQFVAYPKFKLKDDKYRWNFVEDKIYPCNETRNQFLNAIAKIDVDKSFFDTKNTQDLWHILYSVTDKTEITKAITTFANRHSLPDGFIVNFSKLKPYKKDYGSYSEKAIKKLLPLMRFGNHWNEKNIDTKTLVRIDKIETGEFDENIKTRVREKALHLNVLSDFKGLPLWLTSYIVYDRHSESSDISKWKTPADIEHFLKHDFKQHSLRNPIVEQVITETLRVVKDIWQYYGEGKENFFNEIHIELGREMKNNAADRKRITDNISQNENTNLRIKAILTELKNDGVNDIRPYSPSQQEILKIYEEGIYSSENNKEKLEEVEKIRKNTKPTTSEIIKYKLWLEQGYISPYTGKLIPLSDLFTTKYQIEHIIPQSRLFDDSLSNKVICESEVNDLKGNKTALEFILKNEDRIVTLTGGKTVKIFTKDAYNQHITNYYSKNKNKQKRLLSEDIPEKFIERQLNDTKYISKIVKNLLSKIVREDDEQEVTSKHIVSLNGSITSRMKQDWGLNDVWNKIVTPRFERLNAITNSTDFGKLEFKKDEFGNTGKQVFQTTVPDAIAKGFSKKRIDHRHHALDALVIACVNRTHINYLNNLNAKDENDKTIKHELRNKICFKTKPDVNGNYKWEFYKPWDNFTKNTEDELNQTIISFKQNTRVINKTVNKYQVWKEEDGAMKKVTTKQTKGDNWAIRKPMHAETVSGKVFLKRIKQSHITIANAIEQIELIVDKEVKKQLVAKIKQYPNNDAGLKKHLKAFPVMIDGKAIDKIQIYETIEATATRKTLDITFDEKRIEKITDTGIQKILLNHLQQEIYQNAIDENGRKIPAHEVAFSENGLDELNKNITALNNGKKHQPIKKVRVFEEGSRFGLGQVGNKSDKYVEAAKGTNLFFAIYQDEKGKRNYKTIPFNEVIERQKQGLCSALEIDENRNRLLFTLSPNDLVYIPTEDEKDNLTHLNFDKISKEQAERICKFVSCTGGEGHFVTHNYSKEIISNENGSNNKNERMLEFNTSNTIYDEKEKPVMIKSVCWKLEVDRLGKIKKLSDDK

SEQ ID NO: 3198 - protein, 1442 aa, unidentified
  REGION 1..1442: note = Description of Unknown: Cas Enzyme sequence
MALRNILGLDLGTTSIGFAHVIEADTSKQSSIKKIGVRVNPLTTDEQTNFEKGKPVSVNADRTLKRGARRNLDRYQDRRANLIDALAKATIITKNTILAENGKNTTHSTYAFRAKAVINKIEKEELAKVFLAINKKRGYKSSRKAKNEDEGQIIDGMAVAKKLYEGNLTPGQLAYQLLKEGKKYLPDFYRSDLQTEFDKVWNFQKQFYSAILTDEFYKELKGKGQRATSAFFWIKYGFNIAENKAKSREEKKLQAYLWRSEALDKQLEKEEVAFVITEINNNLNNSSGYLGAISDRSKELYFNNQTVGQYLHKQLQESPHTKLKNQVFYRQDYLDEFEKIWETQAKFHLELTEELKTEIRDIIIFYQRKLKSQKGLVSFCEFESKEIEIEKNGKITKRTIGLKVAPKSSSLFQEFKIWQVLNNVLVRKKGSKKRVVKETNQPALFDEEKEIFVFDLETKQKLFDELNIKANLKSAKIIELLGYKSADWEINYSELEGNRTNKLLYDAYLKILESEGYDEDLLKLQGKDDIDVSELKAPASEIKDMIKRIFEILNINTEILEFNAELDGKDFENQISYQLWHLLYSYQEDNSKTGNDTLFRLLEEKFGFKKEHGQILANVAFSDDYGSLSTKAMRKIYPHIKELTYDKACFQAGYKHSTSSLTKEEIENRPLKNKLELLKKNSLRNPVVEKILNQLVNVINTIIEINSKKDEEGNITEYFKFDEIRVELARDLKKNAKERAEMTTNINASKIAHEKIFKLLQNEFHVKNPTRNDIIRYRLYEELKNNGYKDLYSNTYISREILFSKQIDIDHVIPQSKMFDDSFSNKTVVFRKDNLEKGNKTSYDYILGKYGENGLEEFKQRIEMLFEQGKKNKEEGISKAKYQKLLKQESEIGDGFIDRDLRDSQYIAKKARNILYEICKKVTPTTGGVTNRLREDWDLINIMQELNFDKFKKLGLTEMLEKKDGSFKERIVDWSKRNDHRHHAMDALTVAFTKHSHIQYLNFLNARKNENHKEHNTIIGIEDKETTWKYDNEGNKKRVFNLPIPNFREQAKEHLVNVLVSHKAKNKVVTKNKNKTKSKNGVKVKVELTPRGQLHKETVYGKYQYYVNKEEKVSAKFDEETIRKTASPVYRKLLLQRLFENNNDPKKAFAGKNTLSKNPIYLNEEKTEILPEILKLKWLEEDYSIRKNITPENFKDLKAIEKTLDEGVKRILHDRLNEFGNDSKKAFSDLDKNPIWLNKSKGISIKRVTISGIKNAEFLHFKKDHLGNHILDDNGNKIPIDFVSSGNNHHVAIYRDEKGNLQDRVVSLFNAVQLVNAGESVIDKNYNQGLDWQFLFTMKQNEYFIFPNENEGFNPKEIDLLDPKNKKKISPNLFRVQKLSKVEYGNSAVREYVFRHHLETNVEEKKELKEITFKNIKSLGYFENIIKVRLNHLGDIVKIGEH

SEQ ID NO: 3199 - protein, 1532 aa, unidentified
  REGION 1..1532: note = Description of Unknown: Cas Enzyme sequence
MKKILGLDLGTNSIGWALINNDFDGKLGNIEGLGSRIIPMSQEVLGKFDIGVTTSQTKDRTKYRGTRRLVQRFLLRRERLHRVLNILDFLPKHYSEAIDFDKKFGQFKPEKEEKLSFYKNENGKNQFLFLDSHQEMLSEFKLIHPNLKQIPYDWTIYYLRKKALTQKISKEELTWILLNFNQKRGYYQLRGEEKDENKNKLEEFHTLIVTNVVEREKGKSGIWYNVILENGWIYKRESKVPLLDWIGKQRDFIVTTELNDDGTIKLNKDNEEKRSFRSPKDDDWGLVKIRTEQTINQSEKSVGSYIYDELLKNPNQKIKGELVRTIERHYYKSELEKILETQINFHSEVLKDRILYKKCIDELYKHNDSHKTSIKDRGFGYLLIDDIIFYQRPLKSKISLISDCSLEFRPIKDKKGVLIKDVNGNQIVKPLKCIAKSNPIFQEFRLLQFVKNLKIFRKDIANDVDVTNDYLNTEDDFVALFDWLNDRAEINQKQFLAYPKFKLKEDKFRWNFVEDKIYPCNETRNQFLNAIAKIDVDKSFFDAKNTQNLWHILYSVTDKIEISKAIKTFAKKHNLPDEFIVNFSKLKPYKKDYGSYSEKAIKQLLTLMRRGGIWSQDTISEKVKSKIISIKERLESINYDASIIEKVSDSDIPKQVLKSFINCTDFNKGLNTYQASYLIYDRHSEASDISKWKNPSDIEHFLKHDFKQHSLRNPIVEQVITETLRVVKDIWQNYGEGKENFFNEIHIELGREMKNNASDRKRITDNINLNENTNLRIKAILTELKNDGINDIRPYSPSQQEILKIYEEGIYSSENRKEKIEEADKIRKNAKPTTSEIIKYKLWLEQGYISPYTGKLIPLSDLFTTKYQIEHIIPQSRLFDDSLSNKVICESEVNETKDNMTALEFILKNEGRIVTLTGGKTVKILTKEAYIQHITSYYSKNKNKQKRLLSEDIPEKFIERQLNDTKYISKIVKNLLSKIVREEHEQEVTSKHIVSLNGAITSRMKQDWGLNDVWNKIITPRFERLNSITNSSDFGKLELKKDEFGNTGKQIFQTTVPDAIAKGFSKKRIDHRHHALDALVIACVNRTHINYLNNLNAKDEDDKTIKHELRNKICFKTKPDANGNYKWEFHKPWESFTKNTEDELIQTIISFKQNTRVINKTVNKYQVWKKEDGVMKKVTTKQTKGDNWAIRKPIHAETVSGKVFLKRIKQSHITITNAIEQIELLVNKEVKKQLKEKIRQYPNNSEGLKKHLKAFPVMIDGKAIDKVQIYEIIEATATRERNNLDITFDEKKIEKITDTGIQKILLNHLKQEIYQNAIDESGKKIAPQEVAFSEIGIEELNKNIKVLNNGKNHQPIKKVRVFEESKRFPLGHIGNKAHKYVEAAKGTNLFFAIYQDEKGKRNYKTIPFNEVIERQKQGLSSALEIDENGNHLLFTLSPNDLVYLPTEDEMENLKQINFDKLSKEQAQRVFKMVSFTGIQAFFIANNIATSIIDKKEFSALNKMEKSVDGIMIKSLCLKLEVDRLGKIKKIIR

SEQ ID NO: 3200 - protein, 1346 aa, unidentified
  REGION 1..1346: note = Description of Unknown: Cas Enzyme sequence
MKKILGLDLGTTSIGWAFVHEGEEKEQSEIIKTGVRIVPLTTDEEADFKKGNTISINADRTLKRGARRGLQRFKLRRDALLNIFKSNNFIKQDYVYAEEGKDTTFSTYALRAKAAVEAVSIEELVQVLLMLNKKRGYKSSRKAKSEEEGVAINGMAIAKALFEKNITPGQWVYNSLISGGKLTPDFYRSDLQAELDKIVRFQSQFYPDVINEKLLEDVKGKSRTLTSQHFSKTLQIELAENKGSREQTKLQHYKWRNDALHEQLSLKEIAFVVTEINNQINQSSGYLGAISDRSKELYFNNETVGQHLYKQFAENSHAKLKNQVFYRQDYLDEFNRIWETQAKYNNELTDALRDEVRDITIFYQRRLKSQKHLVSLCEFEKQHKAIPKSSPLFQEFRIWQNINSIVIKHSETKETVLFDEDNKKQLAEALNYNDNFSDAQLFDFLVLKKREHEVNFKKIEGNRTSTALYKAFESILKLEGYDELDVSKLEHEELIKITKSAFVDLGIDTDILDFDAEIQGNDFDKQPYYQLWHLLYSGEDEEKLKEKLISKFGFKNEHTGYLVNIPLQADYGSLSAKAIKKILPHLKDGHKYDKACLMAGYNHSSSLTKEENSNRPLQDRLALIKKNSLRNPVVEKIINQMINVVNAIIADPEMGTPDEIRVELARELKANNDQRKQATTDIGKATAEHERIRKLLSTEFEIKRVTKNDIIRYKLWLETGGVSLYTGKPIEASKLFSKEYDIEHIIPKSRLFDDSFSNKTLCERQFNIDKSNRTAFSYCGEKLNEFEFAQYQARVKDLFKTGKIKYTKYKKLLMADDEIPEGFVDRQLRETQYIAKKSIEILREVARDVTSTIGSITDRLRDDWELVDVMKELNWDKYHKLGLTKEEEGKNGERLYKIIDWTKRNDHRHHAMDALTVAFTKPAYIQYLNNLNAKTKDDKKGGEIYGIESKYLVRDKQNKLRFIKPIPDFREQAKKHLAAILISYKAKNKVVTKNKNRTKIKGSTTEKIQLTPRGQLHKETVYGKIKSYATKEEKVGANFTAEAISKVAKKQYREALLIRLAENGNDPKKAFTGKNTLAKNPVYLDAEKTIAVPEKVKLVWLEDNYTIRKEITPDLKVEKVIDEGIRKILLARQLEYGNAKLAFSNLDEIPIWLNEEKGIAIKRVTISGISNAQALHTKKDHNGNEILDNDGKPLPVDFISTGNNHHVAIYRDEKGNLQEEVVSFYEAVTRSNLGLSVINKNHEKGWEFLFSMKQNEFFIIPSENFNPAEVDLLDTNNYALISPYLFRVQKLGTKDYTFRHHLETQLTDNKLLNNIVYKRLTSLKQLSHLTKVRINHTGKIVQIGEY

SEQ ID NO: 3201 - protein, 1343 aa, unidentified
  REGION 1..1343: note = Description of Unknown: Cas Enzyme sequence
MKKILGLDLGTTSIGWAFIHEGEENETSRIINTGVRIVPLTTDEEADFKKGNTISINADRTLKRSARRGLQRFKQRRKALLEIFKEIKFISDDFTYAETGKDSTFSSYQIRSKAAKEKVTKEELVKVLLMLNKKRGYKSSRKAKTIEEGVAIDGMAIAKELFENNLTPGQWVHNSLTTRGKHIPDFYRSDLQKEIEKIVKFQSKFYSEINNVLIEDLKGKSRTLTSQHFTKTLKIELAENKGAREETKLQHYKWRKEALETRLDLNVLAYILTEINNQINQSSGYLGAISDRSKELYFNKQTVGQYLYNQLKENKHSRSKNQVFYRQDYMDEFETIWETQAKYYPELNDKLKNEVRDVTIFYQRKLKSQKHLISHCEFEKGHKSVPKSSPLFQEFRIWQNLNNIIVKNEVTKEPLLLSEELKKQIAKELTFKDNMTDAQLIDFCGLKKNTYSVNFKKIEGNRTNTALFKALEKILIYEGYDELDLSKLDTNDIVKVFKNAFKDLKLSTELLEFDASIQGNEFDKQPYYQLWHLLYSSEEDEPLRKILMTKFGFKPEHVPFLLNISLQADYGSLSAKAIKKIIPHLKDGHIYDKACLLVGYNHSSSLTKEENNKRELKNKLDLIKKNSLRNPVVEKILNQMINVINAIMEDSSMGRPDEIRVELARELKNNNEQRNEMTKAINKSTAEHEQIKKLLHTEYGIARVTRNDIIRYKLWKECDGISIYTGKPIEASKLFSKEYDIEHIIPKSRLFDDSFSNKTICERQLNIDKSNKTAYSFLKEKLSTEEFDQYEKRVKNLFGKISKTKQNKLLMADNEIPEGFIDRQLRETQYIAKKAKELLLEVSRTVTSTIGSVTDKLREDWELVEVMKELNWDKYHKLGLTVEEEGKNGERLYKIKDWTKRNDHRHHAMDAITVAFTKPVYIQYLNNLNSRTKEDKKGAEIYGIETNYLKKDKNGKLRFISPITNFREEAKKQLESILISYKAKNKVVTKNKNITKIKGGSLEKIQLTPRGQLHKETVYGKIQQYVTKEEKVNANFTADYITKVSKKQYRDALSRRLEENDNDPKKAFTGKNVLSKNPIYLDTNKTIVVPEKVKLVWFEDDYTIRKDITPDLKIEKVIDVGLKTILQNRLTEYGGDAKKAFVNLDENPIWLNKEKGISIKRVTISGISNAQALHTKKDHLGNEILDKNGKPIPADFISTGNNHHVAIYRDEKGNLQEEVVSFYDAVVRKNLGLSVINKNHEKGWEFLFSMKQNEFFIFPSESFNPHEIDLLNPKNYHLISPYLYRVQKFTIKDYFFRHHLETTVEDKKELKDISYKRLGLNGVNNIVKIRINHLGQIVQLGEY

SEQ ID NO: 3202 - protein, 1358 aa, unidentified
  REGION 1..1358: note = Description of Unknown: Cas Enzyme sequence
MKRILGLDLGTTSIGWAYINEAEGDNETSSIINSGVRITRFDNFSKVDKSGKITESKNPEADFNAGHGLSPNADRTLKRGARRGLQRFKQRRNALLQTFRGINFINSNYVYAETGKQTTFSSYKLRAKSATEKVSKEELVQVLLMLNKKRGYKSSRKAKSAEEGDAIDGMKIAKELNDKNQTPGEWVYNSLLNGGKFVPDFYRSDLQSELERIINFQNKFYPEIVNLKLLEDIQDKTRTATSNHFTKNLNIELSENKGTREEIKLQHYKWRNNGLSIELDIKIIAFIVTEVNNQINQSSGYLGAISDRSKELYFNHETVGQFQHKQLELNKHAKLKNQVFYRQDYLDEFEQIWETQSKFHSELDEKLKIEVRDITIFYQRKLKSQKHLVSFCEIEKGHKAIPKSSPLFQEFRIWQNINNITIKNELTKEIYVLTEEFKNEIAEELQFKENLSDIQIITLCGLKKGQFTINFKKIEGNRTNTALFKAFEKIVEMEGYDLDFSKMNSFEIKEAIEPLFDTIGINTNLLNFDTFIEGNDFDKQPYYQLWHLLYSSEDDETLKISLKKFGFKTEHIPFLINVNLQADYGSLSAKAIKKVLPHLKDGHIYDKACLLSGYNHSSSLTKEQNESRILKDNLELLKKNSLRNPVVEKILNQMINVINAIIEDPTMGKPDEIRVELARELKANNEQRNDMTKAINNATKNHDDIRKLLAVEYGISRVTRNDIIRYKLWKETGGISLYTGKPIEPSKLFTKDYDIEHIIPKSRLFDDSFSNKTLCERTLNIEKSNKTAYSFLQEKLSPEEFDQFEKRIKSMFGKISKTKQNKLMMADDQIPEGFIDRQLRETQYIAKKAKEILLEVSRNVTATTGSVTDKLREDWELIDVMQELNWNKYDKLGLTYEEKGKNGERLYKIKDWTKRNDHRHHAMDAITVAFTKPAYIQYLNNLNARTNTDKKGNSIVGIENKYLKRDKNNKLRFIEPMPNFRTEAKKQLESILISYKAKNKVVTNNKNITKKSGGTNQKIQLTPRGQLHKETVYGKLQQYATKEEKVNASFTQEYITKVAKKEYREALLKRLAENDNDPKKAFTGKNTLVKTPIYISLEDNIVVPEKVKMVWLENNYSIRKDITPDLKLEKVIDVGLRKILENRLNEFNGDAKKAFVNLDENPIWQNKEKGIAIKRVTISGVSNAQSLHTKKDHFGNEILDQNENPIPVDFVSTGNNHHVAIYKDEKGNLQEEVVSFYDAVVRKNLGLSVINKTHENGWEFLFTMKQNEFFIFPSESFNPEEYDLLNPINYHLISPNMFRVQKISTKNYMFRHHLETMLEDKNELNGIAFRSIRSTTPLTYIIKIRINHLGQIVQLGEY

SEQ ID NO: 3203 - protein, 1515 aa, unidentified
  REGION 1..1515: note = Description of Unknown: Cas Enzyme sequence
MIIYKKLTMMKTQLDLNEDRLYKHVLGLDLGVTSIGFAHVVEYENRNESEIKQIGVRVIQLDNFDKVDKSGKISESKNPAGDFAAGKGLTPNGSRTKKRGARRNLDRYQDRRDNLLEVLTKSGFINSETKRTEDGKHTTHQTWEIRAKAVSEKVEKEEFARILLAINKKRGYKSSRKAKNEDEGQAVDGMAVAKRLYEENLTPGQYAYEVLSGGKKSIPDFYRSDLQAEFDKIWNFQKQFYPNILTDEFYEVLKGKGQRATSAAFWKIHQFNTADIKDLEDELKNERTIKLSKRDQKKLQAYKWRSEAVVKQLGKEEVAFVLTEINNNLNNSSGYLGAISDRSKELYFNKQTVGQYLYKQLKENPHTRLKNQVFYRQDYLDEFETIWEKQAQFHPELTQELKEEIRDIIIFYQRKLKSQKGLISFCELESKEVVINDTKKTIGLRVAPKSSPLFQEFKIWQNLNNILVRKKGSRKRVVKAQNQHSLFEEPKEIFSLDLTSKEKLFEELNLKGNLSAKNCLDILGLNSNEWELNYTHLEGNRTNKSLYEAFLKILDIEGYDVKDLLKVKSSKDEVELDDLKVPASEIKNMVREIFSTNNIATEILDFDAELDGKAFEKQASYQLWHLLYSYEGDDSQSGNEKLYELLAEKFGFMREHAQILANVSLVDDYGNLSSKAMRKIYPHIRENNYSTACELVGYRHSKHSLTKDELKDRVLEDRLELLRKNSLRQPVVEKILNQMINVVNALIEKNSERDENGNITKYFKFDEIRIELARELKKNAAERAEMTTNINAAKLAHEKIFKILQNEFGIKNPTRNDIIRYRLYEELKGNGYKDLYSNTYIPREILFSNQIDIDHILPQSRLFDDSFSNKVVVFRKDNLKKGNQTAFDYIGSEVGEEGLKNFIERVESLYELGKKNKEEGISKAKYQKLLKSASEIGDGFIERDLRESQYIAKKAKELLFKVTRSVVSTSGSITDRLREDWGLINVMKELNLPKYKSLGLTEVQERRNGHQVEVIKDWTKRNDHRHHAMDALAVAFTKRSFIQYLNNLNARRKDKYEDGVSNTNNRKSIGASDLKISTRDVLGIEEKELYRDEEGKWRFNLPIPNFRQVAKEHLENVLISHKAKNKVVTKNKNKISGKEKSQITLTPRGQLHKETVYGKYRFYQSKDEKVSAKFDLETIEKVANPSYKAALLQRLNENENDPQKAFSGKNALSKNPIYISMENDIKVPDTVKLVWLEEDYSIRKDVTPENFKDEKSIEKILDEGVKRILKNRLKEFGGDPKKAFSDLDKNPIWLKEEKGISIKRVRISGVKNAEPLHYKKDHFGNDILDENGNKIPADFVSTGNNHHVAIYKEPEFDKKGQPVLDELGNQKYNLKEKVVSFFEAVERVNQGLPIIDTTYNHHLGWQFFFTMKQNEMFVFPNEKIGFNPIEIDLLDSKNKKLISPNLFRVQTLSIVQYGNNTVRDFKFRHHLETVLDDMRELQGVTFQQLKSLPPLKNIIKVRVNHLGDIVSVGEY

SEQ ID NO: 3204 - protein, 1483 aa, unidentified
  REGION 1..1483: note = Description of Unknown: Cas Enzyme sequence
MKTELDLNKDRLYKHVLGLDLGVTSIGFAHVVESENRNESEIKQIGVRVIQLDNFDKVDKSGKTSESKNPAVDFAAGKGLTPNGSRTKKRGARRNLDRYQDRRDNLLEVLTKSGFINSETKRTEDGKHTTHQTWEIRAKAVSEKVEKEEFARILLAINKKRGYKSSRKAKNEDEGQAVDGMAVAKRLYEENLTPGQYAYEVLSGGKKSIPDFYRSDLQAEFDKIWNFQKQFYPNILTDEFYEELKGKGQRATSAAFWKIHQFNTADIKDLEDELKNERTIKLSKRDQKKLQAYKWRSEAVVKQLGKEEVAYVLTEINNNLNNSSGYLGAISDRSKELYFNKQTVGQFLYKQLKENPHTRLKNQVFYRQDYLDEFETIWEMQAQFHPELTQELKEEIRDIIIFYQRKLKSQKGLISFCELESKEVVINDTKKIIGLRVAPKSSPLFQEFKIWQNLNNVLVRKKGSRKRMVKAQNQHSLFEEPKEIFSLDLASKEKLFEELNLKGNLSAKNCLDILGLNSNEWELNYTQLEGNRTNKSLYEAFLKILDIEGYDVKDLLKVKSSKDEVELDDLKVPASEIKNMVREIFSTNKIDTEILDFDAEIDGKAFEKQSSYQLWHLLYSYEGDDSQSGNEKLYELLAKKFGFKREHAQILANVSLVDDYGNLSSKAMRKIYPHIRENNYSTACELVGYRHSKHSLTKDELKDRVLEDRLELLKKNSLRQPVVEKILNQMINAVNALIEKNSERDENGNITKYFKFDEIRIELARELKKNAAERAEMTTNINAAKLVHEKIFKILQNEFGIKNPTRNDIIRYRLYEELKGNGYKDLYSNTYIPREILFSNQIDIDHILPQSRLFDDSFSNKVVVFRKDNLKKGNQTAIDYIGSEVGEEGLKNFIERVESLYELGKKNKEEGISKAKYQKLLKSASEIGDGFIERDLRESQYIAKKAKELLFKVTRSVVSTSGSITDRLREDWGLINVMKELNLPKYKSLGLTEIQERRNGHQVEVIKDWTKRNDHRHHAMDALAVAFTKHNHIQYLNYLNARKNESHKLHGNIIAIETLETEVKIDDLGNKKRVFKEPIPNFRQVAKEHLENVLISHKAKNKVVTKNKNKISGKEKLQITLTPRGQLHKETVYGKYRFYQSKDEKVSAKFDLETIEKVANPSYKAALLQRLNENENDPKKAFSGKNALSKNPIYISMENDIKVPDTVKLVWLEEDYSIRKDVTPENFKDEKSIEKILDEGVKRILKNRLKEFGGDAKEAFSDLDKNPIWLNEEKGTSIKRVRISGVKNAEPLHYKKDHFGNDILDGNGNKIPADFVSTGNNHHVAIYKEPEFDKKGQPVLDELGNQKYNLQEKVVSFFEAVERVNQGLPIIDKTYNQHLGWQFFFTMKQNEMFVFPNEKTRFNPIEIDLLDPNNKKLISLNLFRVQKIANKNYMFRHHLETNVDDKKEMKNIAFIHIQSCNLLKEIIKVRLNHLGDIVSVGEY

SEQ ID NO: 3205 - protein, 1055 aa, unidentified
  REGION 1..1055: note = Description of Unknown: Cas Enzyme sequence
MAKIFTLDLGTHSIGYVKRDTELACSLNEQLELFGSVIFKKGVGNGKTGEFSYAAERTKHRSSRRLYQARKYRIWKTLKVLIEYGFCPLSIEDLDKWSKYDKEKGLKRQYPVDAIEFEQWVRLDFDGDGKSDYSSPYELRAELATSQLDFSVEINRYKLGRVLYHIAQRRGFKSSKGETLKEQEEATKETLDNSEAADVEMLKKSEEKKSKNLSEYQTNNNLPTVGCAFYQLEKEGVRIRGSIYQAVRSQYREEIKHIFDFQNQLDVYSDFFKRIYRDKKEDSIFYKRPLRSQKGLVGKCTLETSKYRCPISHPEFEKFRAFAFINNIQYRSSIDAEWINLSSDQKLRLFNDKFLRTKNNFTFSEIREWIETDTFIKLPYKDNKSQSLINYKDKTNVSGCPISGRLKNLLGKDWESSVYETTTEKTRYSKTKGKQTHCLTYSMEDIWHICFSYDDDEHIAEFAKTQLHFDDKQTKSLVNLWVAIPQGYSMLSLKAIQNINRFLVPDVNKEGYSGLIYTNATLLAKIPEIIGENLWTENEQLFFKEIDNLTTKNRSEKRLLNIVNSLIANYKTLEYEEQFAYKNTDYQLDNLDFKEIEKYTEEAFGTKTWEVTENKNEILNDVKEKYQRFFASSKRDYYKLPKLGDTIKQFLSNKFDFLQCENNGIDPKTKLPCRCAACKKLNKLYHPSMVEFYKPAKEKQINYNGVQLSKKLLENPVIGAFKNPMAMRTLHELRKLVNSLLLEGKIDEETRIVVETARDLNDANMRWAIKAYQDEREAENKEIAAAIKELRGEERDNDDIDKARLLIEQNPDYLFDKIRYDHEKEQNDDDKKKRKITGKTKDFQYKKDVTKYRLWLEQGMQCIYTGNIINIKNLFDENATDFEHTIPRSQSFDNSLANLTICDAYYNRHIKKNRIPTQLENYDRPAVINGQNYSAIKPRLEKWEQKVEQLKNNIEFWKLKSKQAQTKDVKDQAIRQRHLWQMELDYWQNKLDRFTMTEVTSGFKSSQLNDTRLITKYAYHYLKSVFNKVEVQKGSITADFRKMLGIQSANEKKNR

SEQ ID NO: 3206 - protein, 1280 aa, unidentified
  REGION 1..1280: note = Description of Unknown: Cas Enzyme sequence
MKTILGLDLGTNSIGWALIEVDENNIPIRIIAMGSRIIPMDSKHSSQFLEGKSITLNQDRTVSRTQRKSYDRKQLKKSDLKKFLIKYNIFPSEELFKLPMLDLWKLRSDAANPNENISAEQLGRIFYMLNQKRGYKSARSEANTDKKDTDYVQAVKGRYTQLKDKNQTIGQFFYDGLNNANLNNSYFRIKEEVYPREAYIEEFDTIINTQKDNHDFLTDEFVNQLRNEIIYFQRKLKSQKGLVSVCEFEGFEKNVFNKEKNKEKTIFVGPKVAPKTSPLFQLCRIWEVVNNISLKIKNPEGSKYKWGEKIPNLEEKEAIAEYLFKNDNLSFTKLIEILKLKKDDVYVNKQILKGIKGNETYATLHSILGDNELLNFDVSIIPSDKTSMLVDKKTGEILEERAGLELDAILEKEPLYQLWHTIYSIKDLDECKNALVKRFGFNQEIAEKLSRIDFNKQAFGNKSNKAMRKILPFLMEGYDYSQSCSLAGYNHSNSLTKDEIEQQITIDKLELLPKNTLRQPIVEKILNQMINVVNAILEQHGKPSEIRVELARELKQSKDERNDADLQNSKNKKLNEEIGKKLTELGLPATKRYIQKYKFIFPSLSKNLKEAKVNNQCIYCGETFNLTEALSGDAFDVDHIVPKALLFDDSQTNKVLVHRKCNSTKTNQTAYDYIATKGEEAARVYSERVDDWFKRGIISYSKMQRLKVSHKEYLERKKLGKETETDKKLWENFIDRQLRDTQYISRKAREILQKVSNNVSTTEGGVTATLRNLWGWDDVLMNLQMPKYRELGQTVTREWTSEHGKRKHQKEEIENWTKRDDHRHHAIDALVVACTKQGFIQRINTLNSSDTKDELRQEIEKQKKLIGKSFNEKIFEHQHNTKLTLLEDYLRSQMPPNFTTRYIEAEADKILISFKAGKKVATITKYKATGKNKDTGVIVPRGALHEQSVYGKIRVIEKDKPLKYLFENSDKIVDAKIRNLVKTRLSENENNSKTAISNLKKNPIYLNEEKSDILEKASCYNEATVLKYKLQNLKASQVDDIVDGKVKFLVKERLALFNNKEKEAFKETLWFNKEKQIPIVTVRLFARPDANNLQAIKKDENGKEIGFVVMGNNHHIAIYEDKNSKHVQHSCTFWHAIERKKYKIPTVIKNTSDIWNELLKKELPESFLNKLPADHLNLKFSMQQNEMFILGLSKEEFDEAIKNNDKSLISKHLYLVWSISNNDYYFRHHLETKNTELKNISTAKDAKRYYRFKSVGALIVMNPIKIRLNHLGEIAKIGEY

SEQ ID NO: 3207 - protein, 1429 aa, unidentified
  REGION 1..1429: note = Description of Unknown: Cas Enzyme sequence
MMKNILGLDLGTNSIGWALIRQDFQNKQGEILGMGSRIIPMTQDILGEFGKGNSVSQTAVRTGYRGVRRLRERFLLRRERLHRVLNVLRFLPQHYALQIDFEKRFGKFKEETEPKLAYHNEGFIFKNSFQEMLEEFKVHQPQLSENNKKVPYDWTIYYLRKKALTHKIEKEELAWILLNFNQKRGYYQLRGEEEEENPNKRVEFYALKITDVLAEEPQKGKSEIWYSLVLENGWIYRRPSKTPLSDWKDKTRDFIVTTDLNDDGSVKTDKEGNEKRSFRAPGENDWTLIKKKTEQEIDKSHKTVGTYIYETLLDNPKQKIKGKLVRTIERKFYKAELKQILEKQKEFHQELQNDDLYSDCIRELYRNNETHQLILSKKDFVHLFMDDIIFYQRPLKSQKSSVSNCTLEFRKYKDENGTEHIQYLKAIPKSNPYYQEFRLWQWIFNLTIYKKDNDENVTGEFLNTTKDFENLFEFLNNRREVDQKSLLRHLKLSEKTHRWNFVEDKKYPCNETRAMISSRLEKVENISQDLLTRETQQKIWHIIYSVNDKTEYEKALKSFAAKNNLDENAFLEAFRKFPPFKSEYGSFSEKAIKKLLSLMRLGKYWTYENIDHGSRDRIHKIITGEYDADIKDKVREKAIHLTTENDFQGLQLWLAQYVIYGRHSEASMTGKWNSPDDLEEFLREFKQHSLRNPIVEQVITETLRVVKDIWMKYGGGTKDFFSEIHIELGREMKNTAEDRKQITGVVTENENTNLRVKALLAEMMNDRSVENVRPYSPMQQEILKIYEDGILKSDIDIEDDILKISKTAQPSPSDLKRYKLWLEQKYKSPYTGQIIPLNKLFTPEYEIEHIIPQSRYFDDSFSNKIICESAVNKLKDNYIGLGFIRQFGGTVIELGLGKRVTVFKVDEYEDFVKKHYAHNRSKRTKLLLEEIPEKMIERQLNDTRHISKYISGVLSHIVRVEDGTDEGINSKNIVPGNGKITTRLKQDWGLNDIWNDLILPRFERMNTLTDSTDFTSWNENHRKLLPTVPVEFSKGFSKKRIDHRHHALDALVIACATRDHVNLLNNQSAKSDTQRYDLKKKLMSFERAVYHHPHTGNIVEREMPKHFLKPWDHFTVDAKNSLEKIIVSFKQNLRVINKATNYYEKYVEKDGVESKEKVEQTGTNWAIRKPMHKETVSGKIDLPWVKVPKGKILTATRKSLDSSFDLKSINSVTDTGIQKILRNYLNGKGSPELAFSPEGIEDLNKNIEKYNDGKPHQPINKVRVFEMGSKFSLGQSGNKKDKYVEAAKGTNLFFAVYEDKNRKRSYKTIPLNEVIERQKQGLSVVELKGPGDFYLCPNDLVYVPLEDELEYINHIDFKNLTPEQSGRIYKVISFSGSQIFFLRQDIATSIVNKKEFSTLNKMERSVDGLMIKEYCLKLKVDRLGNIIKT

SEQ ID NO: 3208 - protein, 1077 aa, unidentified
  REGION 1..1077: note = Description of Unknown: Cas Enzyme sequence
MKKILGLDLGTTSIGWALVNEAENDNEKSSIIKLGVRVNPLTVDEQQNFEKGKSITTNADRTLKRSMRRNLQRYKLRRENLIEILKENGFISDETILSENGNYTTFETYRLRAKAATEEISLEEFARVLLMINKKRGYKSSRKAKGTEEGTLIDGMEVAKTLYNENLTPGQFCLQLLQDNKKYLPDFYSSDLQAEFDKIWAKQQVFYSDFLTEKLKDDLRGKNEKATWAICKENFKWQETEKNWNNDEGKNEEIITEKTLVGIKREGNTQEQKVENFEWRAKAISEKMHPEQIAIILSKINSQINGSSGYLGAISDRSKELFFNKQTVGQYQMAVLAENPNASLRNMVFYRQDYLDEFNTIWEKQAEFRRGEPARSPFTEELKNEIRDVIIFYQRRLKSQKGLISFCEFESRQIEVEINGKKRIKTVGSRVIPRSSPLFQEFKIWQILNNLEVSVKGRKIKKQKGTSLFAEQENSLEIYGKRELYQEEKELLAAELSVREKLTKSEILKLLFDNPQELDLNFREVQGNLTQAKLFGAYVKIIEHSTGEIIDTKKSADEILKNIEDTFKILNYNTDILHFNSDKELDRQPMYKLWHLLYSFEGDNSVTGNENLINKIAEILTAPRHCGLDPQSPEKQEILKQVQNDSDLKSYATILANIVFQDDYGSLSAKAIHKILPHLKEGNKFDVACEYAGYRHSKSSLTKEEIENKVLKEKLEILPKNSLRNPVVEKILNQMINVINTIIDTYGKPDEIRIELARELKKNAKEREELTQAISKATAEHEKIREILKKDFGLSYISRNDIIRYKLYEELKDNSYKTLYSNTYISPATLFSGDFDIEHIIPQSRLFDDSFSNKTLELRSINLEKGNQTAYDFVKEKYGEDGLENYLNRIEILFKEKKAKLRKLKMQEKDIPEDFINRDLGNTQYIAKYAKTMLEELVRRVISTTGSVTDALREDWQLIDVMKELNWDKYNTLGLTYYEENREGKQLKRIKEWSKRNDHRHHAMDALTVAFTKDVFIQLFNNMNASLKPNSNEFALKNLYLENGKVKPPMPLNEFRAEAKKHLENTLISIKAKNKVV

SEQ ID NO: 3209 - protein, 1527 aa, unidentified
  REGION 1..1527: note = Description of Unknown: Cas Enzyme sequence
MRRILGLDLGTNSIGWALIEQNFDAKSGKILGMGSRIIPMGQEVMGNFDKGNSVSQTAERTGYRGTRRLRERYLLRRERLHRVLNVLDFLPEHYANQIDFAKRLGQFLGEKEPKVTWKEVWNEQKNKNEFVFLFQNSFNEMVDDFKANKPELFYTKNNGEETKIPYDWTIYYLRKKALSQKITKEELAWILLNFNQKRGYYQLRGEDDEKTDIKEYCELLKIISVEKGEKDKKNDKKTWYKMTFENGWEYSATFATEPNWLNTEREFLITEEYDEDGNIKIVKDKKTDTTGKEKRRITPLPSFDEINLMSKKDQDKIYKKIKARTEITITNSGTTVGAYIYETLLQNPTQKIRGKLVRTIERKFYKEELIAILKKQIELQPELFTEDLYNDCVRELYKNNEAQQTTLSKRNCFVHLFVDDIIFYQRPLKSQKSSIGKCSLEFRNYNGKEGNKIKEYLQAIPKSNPLYQEFRLWQWLFNLKIYKKDDDKDVTEQFIINIADKEKLFDFLNNRKEIEQKPLLKYLLEQKDFKGKLLNIEVEKYRWNYVEDKKYPCNETKTMMLTRIEKVENVPVDFLTSEIEQKLWHIIYSVTDKNDFEKALKTFANKHNLDEVSFVENFKKFPPFKSEYGSFSEKAIKKLLPLIRLGKYWNWELIDTKTKNRINKILTGEYDAEIKNRVREKAINLKQETDFQGLQLWLAQYIIYDRHSEANIAGKWKTVADLEKYLEEFKQHSLRNPIVEQVITETLRVVRDIWKKHGDFSEIHIELGREMKNTADERKRLTNIVTENENTNLRIKALIMELKESDDVENVRPYSPIQQEILKIYEEGVINSNIEIPEDIIKISKTAQPSKSELQRYKLWLEQKYRSPYTGQMIPLGKLFTEDYQIEHIIPKARYFDDSLSNKVICESAVNQLKDKQLGFEFIKNHHGQMVDLGFGKSVKIFEEEAYQTFVKEHYSKNYKKRTNLLLEDIPEKMIERQLNDTRYISKFVSQLLSNIVREDKDDDGVNSKNVLPGSGKITDTLKRDWGLKDVWNDLILPRFERMNTLTNSNLFTAWNEKHQKFLPTVPLELSKGFQPKRIDHRHHAMDALVIACATRDHINLLNNQSAKSETSRYDLQNKLRNKEHKEAIGKDVFTEFKKPWDNFTVDARNELEKIVVSFKQNLRIINKTTNKYQTYENGKKVIKSQTEGDSWAIRKPLHTPMPYGKKTYDFDILKIADAVGKREFIIDTDIQNKVETVLKECNGKITEAQKRLKKFPIIDDDGNPVIVTTFKINAEKFRQRQPISKLSNRGQGGIKTSDDAIKFINKIADLKLRTELFNHLKNNDNNIDLAFSAEGIEKFNSNRKIPVYKLPIAESGSSRFRVGDSIGTRHKWVEAETGTNLFFAIYADENGNRSYETIPLNIVIERLKQGLKEVPERNEKGHNVLFHLSPNDLVYVPTEEEKENIQAINWENLDKEQLNRVYKMVSSSSNQCFFIRQDIANSITNKEKKIFEFSPLNKMERSVDAVMIKEHCIKLNIDRLGNIKPL

SEQ ID NO: 3210 - protein, 1450 aa, unidentified
  REGION 1..1450: note = Description of Unknown: Cas Enzyme sequence
MKKILGLDLGTNSIGWAVVNEAENADEQSSIVKLGVRVNPLTVDELANFEKGKSITTNADRTLKRSMRRNLQRYKLRRENLIEILKAHGFITDDTILSENGNRTTFETYRLRAKAATEEISLEEFARVLLQINKKRGYKSSRKAKSTEEGQLIDGMEVAKRLYNENLMPGQLSLELLKGGKKYLPDFYRSDLQAEFDKVWDIQKHFYPDQLTDGLKDELQGKNKSQTWAICAQPFGIVGIKRTTKGFEQKIENFQWRCKALSEQLGLEELAIVLQEINGQISNASGYLGNISDRSKELYFNKMTVGQYQMSELDRNPNYSLKNQVFYRQDYLNEFETIWETQARFHKELTAELKKEIRDVVIFYQRPLKSQKGLISFCEFESRQIEVEVDGKKKLKTIGLRVCPKSSPLFQEFKIWQRLNDVEVSGMLIPNQQQDLFGYSKDYTYGKRWLLPEEKELLFAELNYKEKLSKAEALKMLFPHQKEVDMNFKELEGNRTQAELFKAYQTIAEMSGHDVGDLSKKSAKEMINCIADIFGTIGINIEILSFNSDLEGKEFEQQPMFQLWHLLYSFEGDNSSIGNEKMIEKLHGTFGFEKEYATVLANVVFKEAGDYSSLSTKAIRKILPHLKDGNDYSVACEYAGYRHSKQSLTKEEIENKVLKDKLELLPRNSLRNPVVEKILNQMVNVVNGVIEEYGKPDEIRIELARELKKSAKEREEMTKSINETTKLHEELVKKLQNEFGLSHVSRNDIIRYKLYEELKNNGYHTLYTNTYIPCEKLFSKEFDIEHIIPQAKLFDDSFSNKTLEARQANLDKSNTTAFDFVATKYGEDFANGEYKNRIDKLLEDKNISKTKHDKLLMKEADIPSGFINRDLRDSQYIAKKAREILEELVRFVVPTTGSITDRLREDWQLVDVMQELNWDKYNQLGLTEIIEGRDGQRIRRINDWTKRNDHRHHAMDALTIAFTKRSFIQYLNNLNARVQKGVDDWIDLDMVEFADLNKEDKTKAVYAIEKKELYRDNRGKLRFNPPMPLNEFRAEAKRQLENTLISIKTKNKVVTRNVNKAKNSVTSEITDKDGNKKTIKGQVVKTPRGQLHLETIYGSSKRYVTKEEKVNASFDVNKIQTVASKRYREALLNRLNQFGGDAKKAFTGKNALDKNPIWLNAQHSDKVPEKVKTVSFETIYTIRKEVSPDLKLDKVVDVRIRHILQSRLDEFGGDAKKAFSNLDENPIWLNKEKGIAIKRVTITGISNAEALHDKRDKEGRLILDENGNGQPVDFVNTGNNHHVAIYRKPKLDKNGQPALDENGNIMYELDEKIVSFYEATSRAMQHLPIIDKEYKREEGWQFLFTMKQNEYFVFPRYDAAGNMTFNPLDHDEAWYKNPENYAAISPNLFRVQKFSYKNYVFRHHLETTIDLSGYNLRGITWMDFRSSKGLDTILKVRVNHIGQIVSIGEY

SEQ ID NO: 3211 - protein, 1049 aa, unidentified
  REGION 1..1049: note = Description of Unknown: Cas Enzyme sequence
LGCPRRAYEAEFDQIMDCQKVFYPEILTEKEIDKLRNEIIFYQRKLKSCKHLVSICDFEKREYENKEGKIVFGGPKVAPKSSPLFQICKIWEAVNNITLKNRKNDELYITLEQRKAMVDFLETHEKLTLKDVYSILGISKQDGWWGGKAIGKGLQGNTTKIALKNALGDFENAEKLLQFNLKNTDSGLIDEVTGEVIQMIDAKVEKEPLYDLWHTVYSISDKAELTNALKKKFNIYDEDIINSLYAIDFVKQGFGNKSAKAMRRILPYLQQGMKYSDACEYAGFSHSDSLTKTENEARQLLEKLPPIQKNALRQPIVEKILNQMINVVNALMVEYGQFESIRVELARELKQSKDDRNTTFLQNEAMERLNEAIAKRLTSEGITPTKRIMEKYKFIFPTKGCIDKKTGKFVTKNFDALATVNQCIYCGKPFSLSSALNGEGYEIEHIIPRDMICDNSQSNKVLSCRSCNSKKSNKTAFDFMRSQDKAMFDDYIKRVEKWFDDGIISPSKRERLLLSHEDYMERKKKGKTTEEDKKYWEEFVSRQAGETQYISRESIRILKQCCRNVNATSGTVTATLRHLWGYDEILHQLNFERYKQAGLTETVTWTSNHGKNEHSKEQIVDWSKRIDHRHHAIDALVVACTQQGFIQRINTLNADDTKDLMRKQIESAGIKFEEKKVLLDKYLASFVPFTTKAVTDEVNKILVSFKAGKKYASTGKRIKYVKGKKEVLQEGVFIPRGALHEEGVYGQIEINGEKEIVKKYKLGKGAQGFVFTGKETYEEKVNKKTGKVQVDDKIKNVLDSIVDGNIRAKVLQRLNQGFEEGKDYRNNVKKALDNLNNLDKNPIFADENNTIPIRTVRCRTGLSAVVPVKHNEQGKPIGFVKPGNNHHIAIYRDKEGQLQEHIVTFWHAVERKKYGLPVIIKNPTEVWDSIMDRQLPESFLEKLPDVNWTFEMSLQQNEMFVLGMEDEIFENAIQEKDYTLISTYLYRVQSISELDYWFRLHVETQNDKTPSAKLAKKYYRVKSLKGFYELNPHKVYISVVGKVLELQHA

SEQ ID NO: 3212 - protein, 1396 aa, unidentified
  REGION 1..1396: note = Description of Unknown: Cas Enzyme sequence
MSQKILGIDLGTNSIGLSLRDVDKGNQLKQQLVYFSSSIFRSGVGKDNKGKEFSYAAERTQYRMAHRRLQNRHRRLWATLQLLIEYDCCPLSRESLKKWKKYKKDGEGHIYPIDDLSFDNWIKLDFDADGKPDYTSPNQLRKALTEQQFDFNQQVDRYKLGRALYHIAQRRGFKSSKGEFLNDVKADDSVDIVSLMKESELMKSSELSEYMKKHDLVTPGQAFAHLESDGVRVRGSEYQAVRSQLKDEITYIFTFQNQLSTDSDFYHHLTSEKKEEGTIFYKRPLRSQKRLVGKCTLEPNKYRCSLSHPEYELFKAWSFINNIKIRKNQGEVLEQLDLSLRQELYNKLFISKVREYFPFKEIRLEIQKKFGGVTFAYNQDKKLQTINFADNYSVDGCPVTRRFINLLGDDWQHAMLKSNKIRKGHHSSMHQVYYSANDLWNVCMSADEKEEITTFAKERLGWSEDDKQTQKLILLYSAVSKHSQYGMLSLKAIKNINAMLVRGFKYSDAVLLAKIPDIVSVGDKQIGELAQYFDSILLPKAKYQRMVARIANRLIANYKSLNVEYRFADKNTEYQLQDSDFVDIVRVIREEIGASEYEALSEGKRNQIKNDVAQLYQLFFHSLNRDFVKAPTIKDMWASYLHEQYPFVPEKEWSKLYHPSQINYFRKQQDGKLGSPNLGAIKNPVALRTLKILRSKINSLIEDGTISPDDTRLVVETAREMNDANMRWAIREWNEQREKENKEIEKILSELNIESDNLNKDKVRYAFEQSDFDKYDVKNKMYKINVAKYKLWKEQGCRCMYTGKVISLSKLFDGHSFNIEHTIPRSLSLDNSDSNRTICDAHYNQHIKGTLLPSALPNYEHSQVIDGVEYSAIKPRLEKWEEKLKHLEDRVSFWRWKARHAQTKDNKDFCIRQMHLWNFDAEYWRQKVQTFKVTEVKQGFRHSQLVDTRVITRYAALYLRSLFPNVDVQKGEVTSVFRKILGIQTENQAKNRSNNAHHAIDATMLTLMPVPAKRERMLQLFYQKQERRRAGLDTQYEENELKEEIKGLNIGKDVHNIATYIMDRILVEHPKHWDALDPSTHIVVGKKNGKKYREVVTEKNVIRGQLHEQTYLGVITQWKKDKDGTVIRDLQGRPAADLNNKLLVYRMPLRFKANANEKGFKSWDDLESKIVNKDLITMIKKQFEEGTSFKKACESGIYMLNKKGEKVNRIRTVRIKSNVSLASAPIIKAQTYKSSKDYKNYFRAKVGQLYAGCEYSNGEETEFRVYSLMDIANNRQKHLADIPDSISGKKGNILKLNPNRTLKVGDTVLFYQNSVNELHKLGNKEYGRRLYVINALESDGRITFVKSSYADKPGKGIAIKDFKHLPDVIRTTYSMVKYIIENHEFTLKNGKIIINK

SEQ ID NO: 3213 - protein, 1416 aa, unidentified
  REGION 1..1416: note = Description of Unknown: Cas Enzyme sequence
MSRKIIGIDLGTGSLGLSLRNPELGENIQDQLEYFSVTTFNSGTGASQTGEYTLASDRRLHRQSRRLKEHSRWKRWNTLALLIEYEMCPLRKESLDRWRVYDRVRGLKREFPFDDEPFVQWLRMDFDGDGVSDCTAFQLRRDLVEKQFDFTTPIDRYKFGRAIYHIAQHRGFKSSKGETLSSQEDNKKDFSTIDADNLENEMQKSEAKKSKDILEYKNSHGFRTVGQAFAALEEEGVRIRNSRFQAVRKDNIDEINEFFSFQKGLAASKYEELHRRLVGTTKREKATLFYKLPLQSQKGNIGKCTFEKNKRRCPISHPEYEKYRAWGFINSIRFRGNLEEGWQELPIELKRKLYQKEFVAYVRKDFTFDKIRIFLERQLGMSFKNAEGEKTINYKDNTLVSGCPVTARLNNIATIFDTEITRLTVHGSKTRLSHSKKNGEKHIVVYNAEDLWHVCFEADEIEDVKRFSQHSLGWDDKATDALCKLWASIEQGYAPLSKKALKNTNRFLEYGLKTSDAIFLAKIPDITGEMDVEKIIKFFHENVRTPVEASQRIARVANSLISNYKSLSLDERFAEHNFEYQLQGEDKKEILSCLHSNVSSFESMDVTEKQSMIAEVTRLYQDFFANPKREYVKVPRTADVLLAELRILYPDIKDKKWERLYHPSMVSDFTRKKEDEGLLGSPNIGSIRNPTVLRALNVLRKTINKMIVEGLVDPKETRLVVETTRVNNDINKRWTIKKYNDERRDENIAIKNILKEYYPEKDINDEDIDAARYVLEQGGEDIFTNDKPNDLHYRHQIKKYKLWLEQGCCCLYTGRIINLSNLLSENYCDIEHTIPRSLSFDSSDKNLTVCDSYYNRHIKQNRIPIQLPNYNCDVTIDGTTYTAIKPRLEKWVQQVEKLSKNVLFWKNRARRAQTEDSKNACIRQKLLWQMEYDYWRQKLDRFKMKPENLTDGFRNSQLVDTGIITRYAVLYLKTIFNSVDVQNGQSTAAFRKVFGIPIKDRSSNSHHAVDASILTMIPVAAKRDRILKLFYQIDEYRRNGYDTIGLDYQLRKEVSSCGLGSGLAGIEDFISQRVMVDFYKQDRTLQKNVKPVIRKGKPLMQKTESGKLASVTFCSDSIRGELHKQTFYGAIKQRGEEKLVFVVREPLKYKTSNNDNGFKDWKELNDRLVDLNDDNKGDRIKPMVKMMMDQFPEGTSFKDACEQGIYMLDKNGRKVNQIRHIRCYAKNVTNPIKVKRHTCLSDKEYKQYVWAALGEGGIYALCEYVNENNKVYKRYTYMDISENRKHREEDIPSTITDKKGLILTLRRKICKGDMLLIYKDSPDELLLMDSAELSKRLYKVQSFERKNDIVLRHHLLSSAETNEDAEVKKKKRDKGESIKDFAKLPDIIRSSIASFHYLQKDVDFEFGKNGLRLMTI

SEQ ID NO: 3214 - protein, 1399 aa, unidentified
  REGION 1..1399: note = Description of Unknown: Cas Enzyme sequence
MSRKILGIDLGTGSLGMSLRNPELGDNIQDQLEWFSVTTFNSGTGTNQTGEYSLAAERRSHVQSRRLKEHSRWKRWSTLALLLEYDMCPISKESLDKWRTYDKSKGMKRTFPIDDTSFIQWLRMDFNGDGISDCTAFQLRRDLVEKQFDFTIPNNRYKLGRAIYHIALHRGFKSSKGETLAEQEENEKNVSVINADNLEKALIASEEDRKKELSDYMDSHGFITVGQAFASLEGEGKRIRNSRYQAIRKQNTDEIDEYFKFQKGLASYKDLHGRLVSTKKGVGTLFYKQPLRPQKGHIGKCTFEKSKQRCPVSHPEYEKYRAWSFINNIKYREREDGVWIELPLTLKQELYREVFSSKVRKDFAFESVRKFIEKRLGLTLKNADGVKTINYKDNILVAGCPATARLQNIAKLFDATIDNLKIQGLKTRPIHATKPGSEKHQVTYDALDLWHFCFEAEEIEDVKRFAKQSLRFNDNATDCLCKLWTSIEQGYTTLSLKALRNINCFLEYGLKTSDAIFLAKVPYITGEKDIEKIINLYYEKVKIPVEESQRIARIANKLIADYKSLALDERFAERDFNYQLQKEDKEDIVRCIQSTDSSFELMDADEQQTLITEVTRLYQAFFADKKRRSVKMPIIADVLVNELKKLYPDVKDERWGTLYHPSLVSCFIRDKDDSSHLGSPIIGAIRNPTVLRALNALRKNVNKLLDEGLDPQETRIVIETTRVNNDINKRWAINKYNEERKDENREIEKILIEQYGAANEENISAARYVLEQTGEDLFTADNPTNRHYRHQVKKYKLWLEQGCQCLYTGHIINLTNLLSDNMFDMEHTVPRSISFDSSDKNLTICDAYYNRHIKQNRIPTELPNYDTDVTIDGHVYTAIAPRLKKWQDKVERLSQNVTFWKNRAKRAQTEKSHKDCMREMLLWLIEYDYWRQKLDRFTMRSKDLTDGFRNSQLVDTGIITRYAVLYLKTLFEQVDVQNGQSTSAFRKIFGFPQKDRSSNYHHAVDATILTMIPMPAKRDRMLKLFYQKDEFLKRFGETYGLEHQLDREIKSCKLGLNPADIDDFISQRVLVDFYKQDRTLQKDLHPVIRKGKLLKHKTKDGKSEPVTFSSDSIRGELHNQTFYGAVKRRDEEKLQYVVREPLRYKASKKDNGFKSWEELNERIVDLGHPTDSKELKPMVKMMLSQFPEGTSFKEACEKGIYMLDKNGHKVNQIRHVRCYDKNVSNPVKVKKHTYQSKKEYKQYVWAALGDGSAYALCEYSDGHIREYKKYTYMEISENRKSGLEDIPTVLSCKKGQPLKLVRKIIKGDMLLLYQNSPDEVLNLVPSELSRRLYRVISFEGKCRINLLHHLLPKFDKKGESVKDFNNLPQAIRCSINGLSFLQKDVDFDFSRGGITLKEY

SEQ ID NO: 3215 - protein, 1158 aa, unidentified
  REGION 1..1158: note = Description of Unknown: Cas Enzyme sequence
MKKSEEKESKDLTEYMEFHQLKTVGQAFAYLEDEGVRIRNSRYQAVRSQNVDEINEYFQFQHGLSGFQELHKRLISTKKGIGTLFYKLPLRSQKSHIGKCIFEKNKRRCPISHPEYEKYRAWAFINNIRYKASVEDVWQELSLEIKNQLYQEVFVSKVRKDFNFEVIRKFLEKHLCLTFSNTEKAKTINYKDNTLVAGCPVTARLKKIADYFGTDIEHFEQKGTKTRDTHTKRQERERHTVVYHTMDLWNFCFDTDEKEDVTAFAHNSLGWNEQATDKLCKLWNAMDQGYATLSLKALRNINRMLVYGLKTSDAVFLAKVPDITGMSEEGVKDLIDIYLGRVKGQVNQKVRDCRIVNTLIANYKSMPVRDRFADHNYDYQLGIDDREAVVKCIVDNDKDFSLLDATAQKEMIDRVTNLYQSFFADIHRDFVKAPRTVDALKEELCKRYSGIDDSKWERLYHPSMLSDFPRDKDNANHLGSPNIGAIRNPTVMRTLNVLRSVINKMIDEGLIDPQETRLVVETTRVNNDINKRWAIQKYNEERRDENKAIKDILQEYYPEKDINDDDVDAARYVLEQSGEDLYGENDRFQHLIKKYKLWLEQGCQCLYTGHIISLSNLLNGEMFDAEHTVPRSISFDSSDKNLTMCDSYYNRHVKKNMIPSQLPNYEHDVVIDGHTYTAIKPRLQMWEEKVERLSKNVTFWKNKAKRAQTESYKNTCIRQKLLWLMEFDYWRSKLDRLKMKTSDLTDGFRNSQLVDTGIITKYALLYLKTLFKSVEVQNGQSTSAFRKIFGIPEKDRSTHYHHAVDAAILTLIPTSAQRSRMLKLFYEIDEMKRGGHEYSGLQFQLNKEIESCGIGKGVAAVDQYIEDHVFVNYYKQDRTLQDANNIRGKLHAETFLGAITQWNGEEKKYVKRVELKYKKSSLDSGFKSWEDLECAIVNKQLVQMMKSQFPKGTTFQEACEQGIYMLNKRGEKVNRIRHIRIEVKEKHPLAIKKQTNLSVKDYKQYYYAGMGDLYVTCEYQNQQEREFIVYSLFSIAENRKMGVEDNPTTIIGKKGIRLTLDRIIKKGDMILIYKNSPEELYGLDTNSLSKRLYMVCNPESDGRLNLCHHLCAKQEKGQSIKDYDHLPQNIRCGAKTIKFLQMGKDFSIVKGKIEFKQS

SEQ ID NO: 3216 - protein, 1269 aa, unidentified
  REGION 1..1269: note = Description of Unknown: Cas Enzyme sequence
MTKNILGLDLGIASVGWALIEVNGETYKPLRILGMGSRIIPLGTEDKTQFERGQSITKNQDRTKARTQRKGYDRKQLKKSEDFKYSLKKELEKFGIYPDSVLMNLPMLDLWKLRSDAASEPISVEQLGRIFYMLNQKRGYKSARSEANADKKDTDYVAEVKGRYAILKEENKTIGQHFYNKLSTSFLNNEYYRVKEQVFPREAYLEEFDTIINVQKKSHDFLTEETINRLRNEIIYYQRKLKSQKGLVSVCEFEGFEKEIENKEKSTNKIVFVGPKVAPKTSPLFQLCKIWEVVNNITLKVKNPEGSKYKWSDYSPTIDQKEKIANYLSTNALLSYSELLKILELRKDDVFVNKQVQKGIQGNITYAELNLILKDESLLQFNIFIEESTNEALLVDKKTGEILEEKKRLIVARDFEKEPLYQLWHTIYSIKDLDECREALIKRFNLEEEIADKLSRIDFNKQAFGNKSAKAMRKILPYLMEGFGYDKACSLAGYNHSNSLTKEEQESREVKERLELLPKNSLRQPVVEKIINQMINVVNAVIDEFGKPDEIRLELARELKQSKDERDQADKANSNNKKQNELIAQRLNAMGIAATKKYIQKYKFIFPAKDKKWKEADVVNQCIYCGEHFSLSEALTGDNFDVDHIVPKALLFDDSQTNKVLVHRHCNSKKLDKTAYDYIAKKGEAELEKYIQRVDDWFSRGILSYGKMQRLKVSFEEYQERKKLKKEREADKKLWENFIDRQLRESQYIAKKARQILEQICNKVTVSEGTVTAKLRKIWGWDDVLMNLQMPKYKSLGQTKMIEWTSEHGKRLHNKEQIINWTKRDDHRHHAVDALVIACTKQGYIQRINTLNSSDVRNEMLKEVEEAKIQYNEKLTLLEKYFNTEKPFTTSEVEKEADKILISFKAGKKVATISKFKAKGKNKEQGVIVPRGALHEQSVYGKIKVEEPDKPLKYLLENPSTIKDEKIKRKVFDRLQQFENDTKKALSSLKKEPIYLDEKQEIVLEKAICYKDATVMKYDLLSLNAKQVNDIVDEKVKSIVKDRLAQFGNKEKEAFKEILWYNEEKQIPIKTVRLFARPDANGLQPIKKDENGKNIGFVVQGNNHHIAIYTDKDGKQVQHSCTFWHAVERKMNSIPVLIKDSSSIWDNLSNERLPQEFLNLLPEDGLNLQFSMQQNEMFILGLSDDEFNDAIRSNDKSTLSKNLYLVWSIAEGDYWFRHHLETKNTELKKTEGAKESKRYYRLSLKGLNDLNPKKVKINHLGKIVHIGEY

SEQ ID NO: 3217 - protein, 1280 aa, unidentified
  REGION 1..1280: note = Description of Unknown: Cas Enzyme sequence
MKNILGLDLGTNSIGWALIEVCDNNIPIRIVAMGSRIIPLSSSDKQEFQRGLSITKNQSRTVSRTQRKGYDRKQLKKNDLRKLLIRYNIFPSEELLKLPMLDLWKLRSDSANPNKNISAEQLGRIFYMLNQKRGYKSARSEANADKKDTDYVQAVKGRYAQLKDKNQTIGQFFYDGLNDANINKYYFRVKEEVYPREAYVEEFDAIINAQKDKHDFLTDEVVHRLRNEIIYFQRKLKSQKGLVSICEFEGFEKTIFDKEKAKNKNVFVGPKVAPRTSPLFQLCRIWEVVNTITLKIKNPEGSKYKWGEKIPTLEEKEILVDYLFTNEILSFTKLLEILNLKKDDVYVNKQILKGIKGNETYVALQNILGNNELLNFNVSIIPSEKTAILVDKKTGEILEERAGLELDASLEKEPIYQLWHTIYSIKDLDECKNALIKRFGFDEKIAEKLSRIDFNKQAFGNKSNKAMRKILPFLMEGYDYSQACSLAGYNHSNSLTKEEKEQQVTLDKLELLSKNSLRQPIVEKILNQMINVVNVILEKYGKPSEIRIELARELKQSKDERNASDLQNSKNKKLNEEIGKRLAELGLPATKRYIQKYKFIFPSLSKSLKDAKVNNQCIYCGETFNLTEALIGDAYDVDHIVPKSLLFDDSQTNKVLVHRKCNSTKTNQTAYDYIASKGEVQLKVYSERIDDWFKRGIISFSKMQRLKVSHKEYLERKSLKKETETDKKLWENFIDRQLRDTQYIARKAREILQKICNNVTTTEGGVTAKLRNLWGWDDVLMNLQMPKYKELGQTIMKEWTSDHGKRKHQKEEIENWTKRDDHRHHAIDALVIACTKQRFIQRINTLNSDETKDELRKEIEEQKKLVGKSFNENDYEHLHKEKLTLLENYLRSQMPPTFNTKYVEREADKILISFKTGKKVATVTKFKATGKNKDTGVIVPRGALHEQNVYGKIKVIEKDKPLKYLFENSYKIVNPKIKNLVETRLLENENNPKKALSSLKKAPINLNEEKKEILEKASCYEYVTVRKYPLSTIKVSQVDDIVDEKIKLLVKERLTQFNNKEKEAFKDTLWFNEQKQIPIITVRLFARPDANNLQAIKKDENGKEIGFVVMGNNHHIAIYEDKDQKLIQHSCTFWHAVERKKYKIPTVINNSSNVWNQLLNSELPESFLNKLPADNMNLKFSMQQNEMFILGLSKEGFDQAVKNNDKSLLSKHLYLVWSISNNDYYFRHHLETKNTELKNISTAKDSKRYFRFKSLGAINGMNPIKVRLNHLGEIIRIGEF

SEQ ID NO: 3218 - protein, 1238 aa, unidentified
  REGION 1..1238: note = Description of Unknown: Cas Enzyme sequence
MNKILGLDLGSSSIGWALISENDENRQILGMGTRIIPLTVDDKNEFSSGNAISKNQKRTTKRTQRKGYDRYQLRRKYLINELKANKMLPDDSLVNLSKMELWRIRSTAVTEKLTLKEIGRVLLHLNQKRGYKSARSEANLNKKDTEYVSEVKGRYEALKEEGLTIGQKFYSELEKDQYYRIKEQIFPREAYIEEFDKIIRNQQKYYKEIITDQLIARIKDEIIYYQRKLKSQKGLVSVCEFEGFITKINKGGIEKELFAGPKVAPRSSPLFQLCKIWESINNISLRYKTGSFVEITQEQKQAIFNYLDTNERITFTSLLKLLNIKKEEVYGNKLLINGLQGNKTKVSILGCFDNIDAYRNLFDLEIKVVETDKEAFLIEKATGEVTKSKIKKYVDPLVEEEPLYKLWHTIYASVDKETCKHTLINKFSLPEQTAGSLASLDFVTAGHSNKSHRAMRKMLPYLIEGENDYNARSYAGYYHTISASKHENYQRILLNKIKLLDKNSLRQPVVEKVLNQMINLVNAIIDKFGKPDEIRIELARELKQSREERNDSYKFNTQREKENKEIEKRLEEYGLRASRNNIIKWRLYHEISNEDKKINAICIYCGQPISLTSAILGEEVDIEHIIPQSKLFDDSQSNKTLAHRKCNADKKDQTAFDFMSSKSEAELNEYIERINSLYHSRIIGKAKRDKLLMKGKDIPDDFIDRQLRETQYISRKAREILQSICFNVWCTSGNITSELRHIWGWDDVLMNLQLRKYRELNLTEVITIESNGRTIKKEIIKDWSKRDDHRHHAIDALVIANTQQGFIQRINKLNSGKVRNDMLKEIKDAKANYDNKKNLLENYIYAKRPFTTESVEKEADKILVSFKAGKKSASTGTRKIRKDGKKVIVQNNIIIPRGALSEESVYGKIKIIDKGKSVKFLFENPHLILKDYIRQLVETRLEAFNNNPKDAIKSLKSEPIYLDSEKKIPLIHGTCYKEEVVIKKEIRLLNEKQVEDIIDPVIRKKVLDRIDQFGGKAKDAFKDLSSNPICYNEELRIPINSVRCFTGLSAIEAVSKDADGKEIGFVKPGNNHHLAIYSDENGEKVIKGCTFWHAVERKKYGFPVIINHPDEVIDRILEEPEDTYTDNFLSKLPMAQWNFIESYQQNEIFVLGITNDAFNEAVNGKDYSFISEHLYRVQNVSHNDNQLEINFRYHLETQSDKSSSAKESKRFFRIRSIDSLYKLNPIKIKINCLGDIIN

SEQ ID NO: 3219 - protein, 1183 aa, unidentified
  REGION 1..1183: note = Description of Unknown: Cas Enzyme sequence
  MOD_RES 1144..1147: note = Any amino acid
MEKILGLDLGTNSIGLAVRDFDNSIPLTEQIQLVGTNIFPCGVGKGKSGEFSFATERTKKRTVRRMYQARKYRLWATLELLINNKYCPLSIEDLDKWRKYDKNLGLKREYPINAEKFEKWVRCDFGDGIKTNPYKLRNELMTRQFNFEDEIERMKLGRALYHIAQRRGFKSSKGETNSDKDNDKEKDFDIVDDNNEVDLSAMMKKSEEKASFNLKKYMDDNNYLTVGCAYYHLIDNGIRVRNSDFQAVRSQYKDEIRKIFEYQNQLDTNSDFYKHLVSEKKNEGTIFYKRPLRSQKGLVGKCTLEPNKGRSPISHPDFETFRAWCFINTIKFGQDCQQELTVEQKKKLFDEKFMLLKPDFDFKAIREWIEKQIGKHLDYYAKTINYKDKTSVSGCPVSARLKKLLGDNWQSWKYETSFEKKKGEIKHACYDAYDLWHVCFTAEDEAFVKMFAIEKLKFDENKAKQLVSLFGAIKQGYSMLSLKAIRNITRFLEKGMLYSHSALLAKLPDIFGEEKWVENESQIVSLLQNATDENRKQKTIYYIVNSLIANYKSLEPNEQFARNNTDYVLFESDKNDVLTMAKKTFGEHNWQSKSAEERNEIIATAEKLYQDFFASSNRDYYKLPKLADALAECIKTKYDFIDPKQLKKIYHPSMIEYYAPAKEQNIGDGRYVKLLGSPVIGALKNPMAMRVLHSLRKMINKLLTTNDENGNPLIDDTTRVVVETARELNDSNMRWAIEAYQRQREAENKVFEEMITQYSRDNKDVDKVRLLMEQSKNEGDTVEEKYYEKYKKNLITKYRLWTEQKFMCLYTGKFISISDLFADNAFDIEHTIPRSKCFDDSLANLTICDAHFNRSVKKNQIPSQLDNYDEILARIQPWKDKIEHLKDNVDFWTAQSKRAMDKDRKDQCIRQKHLWQMELDYWKNKVERFEMKEVTDGFRNSQLVDTRIITKYAFHYLKTVFNKVEVQKGNVTANFRKILGVQIDEKKSRDYHSHHAIDAAILTLIPTAAQRDKMLELFYKKLENKHLGKNDSNLEQQLNLERRKCGLGGDASSIVPYIEKNILINHQSKDQTLTPAHRRKRIRGKVVKDKWLTGDCIRGQLHGESFYGAIKLGKTDADGKSLLRNPDGSIVQEDEIKYVIRREXXXXSEVQHQHYRVVNCFQINIFVSSDTTPQISCRRRQRL

SEQ ID NO: 3220 - protein, 1489 aa, unidentified
  REGION 1..1489: note = Description of Unknown: Cas Enzyme sequence
MKNILGLDLGTNSIGWAVISHDGMCYSGIKCAGSRIIPMDAATMGDFDKGVTKSSASERTQQRGIRRLNERSLLRRERLHRVLDIMGFLPEHYSRNLTRYGKFISEKVKLAWTDEGRFLFDASFNEMLHEFRSQHPSLMESGKKIPYDWTVYYLRKKALSYPINKFELAWILLNFNQKRGYYQLRGEEDDEKASNKWEEYMSLKVLRVEDSGEKTGKYTWYRVHLDNGMIYNRKSNIPLDWEGKTRDFIVTTELNNDGTPKTDKEGNFKRSFRSPSENDWTLIKKKTEADIEKSQKTVGTYIYESLLQNPTQKIRGKLVRVVERKFYRSELKLILEKQCRFLPELQDAALLQACLEELYPHNRMHRDIISNKGFTSLFIDDIIFYQRPLKSKKSLIGNCPYEWHSYVDKTTGKTKTVYNKCIAKSHPLYQEFRLWQFLSNLRIYSKGTYEQDVTTRLLPDQESYAALFSWLNDRTSIKQKDFLNYSGFKLTKTEQKNYRWNYVEDKTYPCNETRGEILKRILDCNLPEIFLTKERELSLWHILYSVEDKEQYKKALEKFAEKNSIDSADFVAAFEKMAAFKKEYGSYSAKAVSKLLPLMRRGSSWSETEIDKNTLERINKLIDGEYDEQLCEQAYEGVAGLSDVSQFQGLPVWLACYIVYNRHSEATDVSRWESPDDIDKYLSDFRQHSLRNPIVEQVVLECLRTVRDIWRQVGHIDEIHVELGREMKNPADKRKKMTESILENEKANLRAKAMLMELMNPEMKVEGVRPHSPGQQELFRIYEENVLNSEKVPDDITEILAKFNQTDNAKRPTSSEVNRYRLWLDQKYRSPYTGEMISLSKLFTSAYEIEHIIPQSRYFDDSFSNKVICESEVNKLKSNLLGHEFIKKHQGEKVQLSMGKTVEILSVEAYEKFVNEHYSYNRVKKEKLLMDDIPEKFIERQMNDSRYISKLVKALLSNIVREEGEKDATSKNVISCTGGITDRLKKDWGINDVWNGIILPRFIRMNEIDKTNSYTAINTSGNIIPDMPFEYQRGFSKKRIDHRHHAMDAIVIACASRNVVNYLNNSSAAKESEAGRMDLRNKLCNKNYTDDKGNYKWIIRKPWETFTQDVKETLQDIVVSFKQNLRIINKSSNRTLHFEEGKKKLQKQTKGDNWAIRKPMHKDTVYGEVNLQRTKEVSFKEALKPDYAIVNRDLRKKVLSLQASGYDVKQMMKYFESEKDVWQDVDFKKIKVRYFTKTTNDRYFATRKPIDSSFNKKKIEESITDTGIQKIMLRHLENMGGNPELAFSSDGLDEMNKNIRALNNGRFHQPVYKVRIYEKADKYAIGEKGQKAKKFVEAAKGTNLFFAIYENETVDKSTGEILRKRSFTTIPMNIVMNRLKQGLSPVPANDCGKDAKYVLSPNDLVYVPTKAELEHGVDMASLDKDRIYKMVSADRSNSHFVKESVASPIVNKVEFGSHNKMQCAVTGEMIKEICIPLKVDRLGNIIKMG

SEQ ID NO: 3221 - protein, 923 aa, unidentified
  REGION 1..923: note = Description of Unknown: Cas Enzyme sequence
FVEVFQKCPPFEKEYGAYSAKAIKKLLSLMRCGKYWNEQEIDDTTKKRIERILTGEWDENISNRVREKAIHLNELYDFRGLPLWLACYVVYDRHSEASEVLKWNTPDDVEQYLKAFKQHSLRNPIVEQVITETLRTVRDIWRQVGQIDEIHIELGREMKNPADKRKRMTERALQNENANLRIKALLMEFMNPEFEIENVRPYSPSQQDILRIYEEGVFNSVSELPEDISAILKKFNESDIKKRPTRSEVLKYKLWLEQKYQSPYTGEMIPLGKLFTPAYEIEHIIPQSRYFDDSFNNKVICESEVNKLKDNSLGYEFIKKHHGEKVELSFGRVVNIFTEDQYEDFVKRHYASNRDKMRKLLMDNIPEEFISRQLNDSRYISKLVKALLSSIVREEGEEEAISKNVIVCTGGVTDRLKKDWGINDVWNKIIIPRFQRLNELTGTNQFTTYTTNGHEVPSMPLELQKGFNKKRIDHRHHAMDAIVIACANRNIVNYLNNESASAKAKTSRHDLQALLCDKVKTDANGNYKWQIKKPWDTFTQDVYAALNEIVVSFKQNLRVINKATNYYTKYDEATGKKAICKQGGINEPINWAIRKPMHKDTVFGEVNLRKKKAVSLNEALKQPQRIVEQDFKKRVIALLREGWDAKRIKKFFEENKDVWADINLAKIEVYYFTKETKERFFATRKQIDTTFDRKKIETSVTDTGIQQILLRHLENNGGDPVLAFSEDGIDEMNKNITLLNGGKYHHPIRKVRVYEKADKFSIGQGGNKATKYVEAAKGTNLYFAIYEKEFVDESTGKVSKKRTYATVPLNIVIERLKNGLSPAPADDNGNEPKYVLSPNDLVYIPFEGEDKKTMVIDKKRIYKFVSCTSNEAHFIPSYIANPILQTIELGSNNKAQKSWSNEMIKEVCVPITIDRLGNIRLRD

SEQ ID NO: 3222 - protein, 1373 aa, unidentified
  REGION 1..1373: note = Description of Unknown: Cas Enzyme sequence
MKKILGLDLGTTSIGWALVNEAETSLEKSSIIKIGVRVNPLTADEKKEFETGKSITTNAERRQKRGMRRNLQRYKLRRKNLIECLKDNGFISDESVLCEDSNSKIFETYKLRAKAASECISLEELSRVLLMLNKKRGYKSNRKANSSDDGEALDGLSVAKELYENDITPGQFALQLFEKGKKYSPDFYKSDLYSELLKIWNCQQKFYPEILTDDIFKQIEGKSGQQIEGVFKNKFKLSSSDIKGKDRKISLLRLRVKSLSNKIDIEDLISVLRDLGSKINSSSKLLGSMSDRSKDLHFSNSTIGQYLMKQLENNPNVSLKNKPFFRKDYLDEFEKIWEVQSKYHKELTYDLKKEIGNFIFYQRPLKSQKGLVSICELEQKIVEIEKDGRIVKKIIGQKVCPKSSPLFQEFKIWQKLNDIRVTDEQTRESYPLTLAQKEALAEELSVKEKMKKNDIVKFLFKRDKTKDINFQEISGNTTNALLFKSFQNIIEMTGHEQNLGKLDSCSAKAYVKRIFKGLGFETNILDFDSSLPKHELEKQPYYLLWHLLYSYEGDKSTTGSASLIDKIYKLFKFDNIVYAKEIAKINFPNEYGSVSAKAIRNILPYLKQGYDYSEACLKAGYKHSRQSLTKNEIEEKELVDSLELLHNNSLRNPVVEKILNQMINVVNAITQTYGKPDEIRIEMARELKKSAAEREAMTKAINSSQREHEAYKEILMKPPFNLSYVSRNDIIRYKLYLELESNGYKTLYSDTYIQKEQLFSDSFDIEHIIPKAKLFDDSFSNKTIEARDVNIKKKDMTAYDFVKNNYGVEKLKQYVDKIEELFKNNKITKKKHDNLLRAEGDIPTDFLNRDLNDTQYIAKKAKEILGGLVKVVTSTSGAITDKLREDWQLVDIMKELNMPKYEDAGLVETFIDHNGKTIKKIKDWTKRNDHRHHAMDALTIAFTKPAYIKYLNNLNARSNKDGEIYAIERSELIRDPKNNKLVFKAPMENFRKEARNHLEGILVSIKAKNKVVTINTNVIKTKNKDKKIIQHTYTPRTALHNETIYGKRKRYAIKEEKIGTSFNEEKILTVAKKIYRDALLRRLEEFNKDVKKAFTGKNALEKNPIWLDSNKTYSVPSKVEVLYIEEYYTIRKPITKDLKIDKVVDCGIRKILKERLEKYDNDSAKAFSNLDENPIWLNQEKGIAIKSVTIDAGLSNPEPLRVKRDNKGNVIRNIEGIAIPSDYVQTSGNHHVAIFEDAEGHLQEHIVSYYEATARAILGIPVVDKDFNKEEGWNFKFTMKQNEYFVFPSDDFNPSEIDLTKEENYSLISKHLYRVQKLSSKDYVFRHHLETNVDDNNALKDKTWKRIQSLDKLKNVVKVRVNNIGKIVYVGEY

SEQ ID NO: 3223 - protein, 1365 aa, unidentified
  REGION 1..1365: note = Description of Unknown: Cas Enzyme sequence
MKKIIGLDLGVSSCGWAYVIEAEKENEKSEILRLGVRVNPLTVDEQSNFEKGKSITTNAERQMKHSARINLQRYKLRREHLIDYLTKAGFINEETLLCEHGNRTTFETYRLRAKAANEEIGLTEFARVLLMINKKRGYKSNRKANGSEEGALIDGMEVAKYLYENDITPGQYAYDLLKKGKKYLPDFYQSDIKDELDKIWNFQKTFYPDILTDDFKQVLTGKSKTNSSKIFLARYSIYTAQNKEKDKRMQAMKWRSDALIRKLDIEQLAYVICDLNGFINNASDYLGKISDRSKELYFQNLTVGQYQMKMLEENPNVSLKNMVFYRQDYLDEFERIWETQAKFHPELTRERKKEIGNMIIFYQRPLKSKKSLISICELEGKTIEIEVEGKKKTITVGSKVCPKSSPLFQEFRIWQRLNDIKLTHLPTRQEYFLSQGQKELLAKELEYKTKMTKQQMLKYLSLKPKEYDMNFKEVDGNTTQAVLFDAYRKIIEISGHGEHDFSKMPANDITTLVENVFDALGFNTNPLHFDAQAADISQDSMYLLWHLLYSYESDNSAMGNETLIHKIQKLFHFDSDEYAKILAGISFKPEYGSLSAKAIKKILPFMKEGNDYSTACVYAGYNHSKRSLTKEELDNKQLKDHLDILSKNSLRNPVVEKILNQMVNVVNSLIDTYGKPDEIRIELARELKKSAKEREAMTDAINTANRENEEYKKILETEFGITHVSRNDILRYKLYLELKDNGFHTLYSDTYIPREKLFSRDFDIEHIIPQANLFDDSFSNKTLESRSINIEKSNSTAYDYVKGKYGEEGAKTYEKRVEDLFKSGKISKTKMTKLLMTADDIPTDFINRDLRDSQYIARKAREILEDIVRVVVPTTGSITDRLREDWQLVDVMKELNWDKYDQLDLTETFEDKEGNTIRRIKDWTKRNDHRHHAMDALTIAFTKPSFIQYLNNLNARGDRSQSIYGIEHKELYRDKHNKLRFNPPIPLDEFRSEAKRHLQNILVSIKAKNKVVTRNINKSKSKQGFNTKVQLTPRGQLHNETIYGSQQRYATHEEKVGASFTADKIATVANKKQREALLARLQAYNNDAKKAFTGKNALDKNPVWLNEAHTASVPLKVMCLTMETIYTIRKPINKDLKLDKVVDSRIRQILQQRLDEYNGDANKAFSNLDETPIWLNQEKGIAIKRVAINAGLSNPEPIHEKKDKQGNNIPVDFVQTSNNHHVAIFVDEQGHLQEHIVSFYEANSRAIQKLPVIEKDYNAELGWKFLFTLKQNEYFVFPDIENGFNPKEIDLTNVENYTIISPHLYRVQKISSKDYFFRHHLETTVENNNALKEITWKRIKALDKLANIVKVRVNHIGQIVAVGEY

SEQ ID NO: 3224 - protein, 1216 aa, unidentified
  REGION 1..1216: note = Description of Unknown: Cas Enzyme sequence
MKNILGLDLGTNSIGWAVIEVNEQTNNPTHILGVGSRIVPLSSNDANEFSTGNAISKNSDRTHNRTQRKIYDRYQQRRSNLKKILSERNMLPGKELMSLPLIKLWQLRADAAIEGQQKSLMEIGRLLLLLNQKRGYKHSKSDDTDTKQKEYVATINERFSILKKEDKTIGQFFYFKLKENENSNPNGNKYYTYRTKDKVFPRQAYIDEFDKIISVQKVFYPDILTDEFINILKNRIIYYQRGLKSCKHLVSLCELEKKEYENSTGKIVFDGPKVAPKSSPLFQVCKIWEEINALMLKNRYGQVLNIPIEKKRELFHFLDNNEKLTLKDLYRILEINKSDGWWGGKAIGKGLQGNITKTLLKKALGGGSEELLTFNYHVIDSDLVDTVTGEIFKEVCNDYQNESLYQLWHVVYSISDKKEFERTIKKRFQIEDEEIIDKLYHIDFTKLGYGSKSVKAIRKILPYLEDGMFYSSACQSAGYNHKKTITLAEKLPLIQKNELRQPVVEKILNQMINVVNAIIDKYGNIDEVRVELARELKQSREERKDTDINMRLRERQNAHIAQIIEESGMQSSKNRILKYRLWEESGHKCFYCGQSVKCKEFLNGFDVETEHIIPKGLLFDDSFSNKVCSCRQCNQSKGMRTAYDFMSRKPEFEEYISRVEQYYLDKKISKTKHDKLLMSQSNIPNDFIDRQLRQTQYIARKSQEILAQVCHNVYATSGSVTEYIRRVWGYDNVLTMINLERYRKSSLTTFVEYTHNNQTHNEERIDNWSKRMDHRHHAIDALIIACTKQSIIQRLNNLNANRDAKFVESDKQSDEWKIKNVSLEKWLALQSHFSTSTVKDAIEQIIPSFKSGKRVAVWGKRFKYYGNKRITLQKNIIIPRGALSDQFVYGKISVIEKCKPIKYLFENNNLIVKSYIKNLVRQRIAAYNNNIKDAISSLKEHPIYLDKNEEDKLEYATCWRQEYVIKYPINSLKSKDVNSIVDIHLREIIQKRLSDFGNNEKEAFKETIYYDTNKTIPIHTVRCFTGLNAVKPLRYDENKKAIGFVKPGNNHHIAIYVDQEGVRHEHIVTFWHAVDRKKYGIPVIITKPLEVWNKLQEGNYPESFLKEIPDIRWKFEMSIQQNEMFILGMPEDAFNDAVHNNDYIALNKYLYRVQNISESTYRFTLSTCTQFDLKSANKPDERFYNIQSLKALYAMNPHKVKVSLLGEIKCLKHNAI

SEQ ID NO: 3225 - protein, 1219 aa, unidentified
  REGION 1..1219: note = Description of Unknown: Cas Enzyme sequence
MVTEVTAEAPNKKGEIWYSIQLENGWVYRRTSKIPLDDWKGKVRDFIVTTELEEDGSIKRDKEGKEKRSFRAPSEDDWNLLKKKTEQDINTSKKTVGTYIYDHLLQNPNEKIKGKLVHTIERKYYKEELKAILEKQIALQPELFTDQLFADSIRELYSKNEAQQRNLTARDFVHLFVEDIIFYQRPLRRQKSTIANCSLESRSYIDKDSHTRKGAPLKVCSKSNPYYQEFRVLQWLQNLRIYEIDTDQEVTHEFIKTLEDKQQLFDFLMDQKEIDCEELLKYFLNQTYPNAKEKALKSELKKWKDTYRWNYVYDIGEKSSKKYPMNETRYELKRHLEKVANLPDDFLSSEVEYLLWHLIYSVKDKVAYEKGLKKFAQKHHLDKDSFVESFKKFNPYPSEYGSFSEKAIRKLLPLMRFGAHWDFNHIDKNTQKRIEDLITGVENEEIRTILREKAEKYQLEKETDFQDLPLWLAQYIVYNRHAEASSLEKWTSVNDLETYLNEFKQHSLRNPIVEQVVMETLRVVRDIWQQYGQGQASFFNEIHIELGRELKKTAKEREKLSKQNQKNEDINLSIKEKLKELEKYNTKAYSITHQEKYKLWLEQKHISPYTGQIISPENLFTDNYEIEHIIPQSRFFDDSLSNKVVCESIVNKAPYKDRQLGLEFIKNQGGRIVKELSKENKTIKIFTEEQYRTFIKEHYSNNPEKTKKLLLEEIPEKMVARQMNDTCYISKFISEILSKIVRSDEQDEGVHSKNVILCTGKITSILRQDWGLNDIWDNLILPRFERMNNLLQKEKFTIYSIEKQKKIPVVPINDQFKSFQKKRIDHRHHAMDAIIIACTTREHINYINNQHALEKEKDKKEKQEERDKLREKLCIKKYNNRSEGNYSWIFKKPWDTFTQEVRVALEDIVVSFKQNLRVINKATNYYERWVEENGKYIKKMVKQEGTNWAIRKPLHEETISGKIYLDREKITKNDILTATRKTVDSSFDDKRIKKITDTGIQKILLNYLKYKGSPEIAFSPEGLEELNKNLSIYNDGKPHKPIYKVRIYEKGSGRFALGEKGRKYKKYVQGASNLYFGIYQGAKRSFATIPLNEVIERQKQGLPSVPEYNEKGDLLLFSLSPNDLVYVPIEGEIIENIDFRNLSKEQKERIYNVNDFSSTCYFTPNRIAKAIFPKEVDLQRKGDKLSGSYDTKTASLEGIQIKEVCIKLKVDRLGNISKA

SEQ ID NO: 3226 - protein, 242 aa, unidentified
  REGION 1..242: note = Description of Unknown: Cas Enzyme sequence
  MOD_RES 228..231: note = Any amino acid
MKRVLGLDLGSNSIGWGLIEQDFQQKEGKIIASGSRIIPMDQGLLGDFEKGNSVSQTTERTFYRSTRKLRQRHLLRRERLHRVLHILGFLPPHYDKQIDFSKRYGKFLDNTEPKLAYEEGRFLFMDSFQEMLSDFKSHQPTLFYSKKKGEESKIPYDWTIYYLRKKALSQKISKEELAWIILNFNQKRGYYQLRGEEEAENPNKEVTYYSLMVTEVTAEAPNKKGEIXXXXLLLLNGYRGYR

SEQ ID NO: 3227 - protein, 1430 aa, unidentified
  REGION 1..1430: note = Description of Unknown: Cas Enzyme sequence
MTEKKLKKVVGLDLGTNSIGWAVIESDFESKRGRILGMGSRIIPMGADSISDFNKGSLKSAASDRTTFRGIRRLTERALLRRERLVKVLKVLNWLPQDFENGQESAVAYSKENGKSVFRFDDSYQEMKQWFLDQNASIAIMPKDWTVYYLRMKALSTQISKEELAWVILNFNQKRGYFQLRGDEIESDTKTDKSFVNGRVIRIEETGDISRGKKRLLIELEEGIIGQFESSYIPDWLGQNIDFLVTEKKLKDGSLSVTLTTPADTDWTLRKKKTEADLERNHLTVAQKVMNTLVKNPHAKIRGKEIHTIDRRFYKREFDQILAKQAEFYPELSDPQIVDAVAKVLYRSNAKHQAFLKSQTIPWILSNDVLYYQRPLRSKKSEIADCEYEFRSFVKDGERKRSPIKVATKSHPVFQEFRAWSLIHNIRILENSQRQPNGSIKLKVDVSDQVLTPDAKAKLFELFDTNEKVKADQIIQTLGLPKGEYSINYEEGRDLQGNLTKSAILKAFKNAGSLDRGKEFLSDRSKYLKVWHMLYSISNVEYLRNALGLEWLGLNEAEKDALLKIEPFKKDYGSLSVKAMEKMLSVMRCGHLWDPAAFDTQKQSILNHILDATESELVSDEVRKRFAHVSTIEQCQGFSETMAKYAIFGRHSEKAEILIYEKPEDIIRLKPNTLRNPTVEKIINEALLVVRDIWKKYGRPDEIHVEVGREMKLPNEKRNEYTKRRNANEATNLRARAILRELRNEDPNINPYSIGHLEQYKLYEEGVLAQNRNLDPEIKAISVKADPSQAEIRRYILWQEQQYKSPYTGQIIPLSKLFSPAYEVEHVIPQALLFDDSMSNKVICEAAVNKDKSNQLAYQYIQANGGKEITLGNGRTVRLLDAENYVRLVQEMYGYSSPKAKNLLATEVPSGFISRQLNDSRYISRKIMELLDPIVRNPNDRGMISANVVPMVGAITATLRKSWGLSTIWKELMTPRFQRLQAMFPDQEWYIREKDGTVHLKQDGVEMKRLDHRHHALDALVAACCTRSHINYLNALNNEKVRTDLEDKLLDPDKKRREKAFLLPWAGFTLEAKETLEKIIVSFKQNLRIITKTKNYYEKYVPDAQGNLKKRRVAQAAHPDFWAIRQSLHKATVQGRTAMISYPEVQLNTMLETPELIANKQIRNAVKDLLQKYEGDLKKLKKHLKDNPLTINEEVITKVQKIAIDHNVVATRKLLNESITKKNVESIPDPGLRKVLLQHIDKYEGDAAKAFSPEGIQDLNHGRKVPIYKVPISEQLGKKFAVGTKGNKSMKYVEADKGTNLAFVVYRNLETGEHVITEDSTLGFNDLYTLTKERLPLAPEREGHETIILQPLDLVISPASPERGEQKIYKVVNFTKHVCYFIEDKVASLIVDKKEFSISNKYERADNGIMIKSDFQKIQVNRLGEIISRS

SEQ ID NO: 3228 - protein, 1490 aa, unidentified
  REGION 1..1490: note = Description of Unknown: Cas Enzyme sequence
MKKILGLDLGTNSIGWSLIQHNFEKKDGQIEGLGVRIIPMSADVLGKFDAGQSHSQTANRTGYRSIRRLYQRDNLRRERLHRVLNILGFLPTHYSQSIDFEKKLGQFKAGKEVKLNYRENEQGKHEFIFIDSFLEMLADFKSAQPDLFYVKENGEETKIPYDWTLYYIRKKALSKPLTKQELAWLILNFNQKRGYYQLRGEEVEEDEDKEFVQLKVDHLIDSGEQVKGQTLYNVVFQNGWAYDKKIVKKEDWEERTKEFIVTTKTLSNGDIKRTFKAVDSEKDWIAIKSKTEQNIEKSGKTVGEYIYETLLECPTQKIRGRLVKTIERKFYKEELKKILSKQIELQSHLFSKDLYKACLEELYPRNEAHQSNIKDKSFLYLFLEDIIFYQRPLKSQKGTIADCSLEYRSREIENNETGKLELSRVPIKAIAKSHPFFQEFRIWQWLQNLKIYNKEIVEKGDLLDVTHQLLPNEDAWVGLFDFLNTKKELEQKQFIAYFVKLKLIDVKSRDQYRWNYPEDKKHPFAETRAQFINRIEKVEGVIDPENFLDEKTQLGNKLTSPFISRLEQLWHIIYSVSDLKEYKKALVKFAGKHLLDETSFLENFLKFPPFKSDYARYSKKAINKLLPVMRMGRYWDENAISTEIKNRVGAIMERVDHLKLKENYSSKDLAEALSQVSDDDIPKQLVKSFIPFIDKNPLRGLNTYQATYLMYGRHSEVEDIQKWRFPEDINSYLKNFKQHSLRNPIVEQVVTETLRVVRDIWKHYGDSQPDFFNEIHVELGREMKNPAEKRKKLSQQNIENENTNHRIREILKGLMNDSSIEGDVRSFSPSQQDLLKIYEEGIYQNPEADYSKVSEDEILNIRKSNAPSQKDIQRYRLWLEQGYISPYTGKPIRMSALFTSKYEVEHIIPQSRYFDNSLGNKVICESDVNGDKGSQTAYEYFKNKGGSIIYGHKLFTLEQYEAHVNKYFNKNKSKLKNLLSEDIPEGFINRQLNDSRYISKLVKGLLSNIVREGGELEATSKNLIPVTGAVTSKLKQDWGLNDKWNEIIAPRFERLNKLTKSTDFGFWDKNINAFRIQVPDEIKKGFDKKRIDHRHHAMDALLVACTTRNHIHYLSALNAEKENYGLRDKLLIKNNQKSYTKHFQLPWQGFTMQAKNKLEKTVISFKQNLRVINKATNKFWSYTDAKGNLNLAKDGKPKKKLRKQTKGDNWAIRKAMHKETVSGIYDIDTPSGKVATAVRTSLSDIKNEKHLAKITDQRIRKVILPNHLKNYLDEKGKPNFDIAFSQEGIEDLNSQITLLNEGKKHQPIFKVKLYEVGSKFPISENENSSKSKKFVEAAKGTNLFFAVYWDEKKQRRNYETIPLNEVIVHQKQVADFSKVERTSVPPNQKLGKFLFTLSPNDLVYVPSKEELESINFTDFHNFTKEQVKRIFKIVSFTQGRLYGIPNEVAKPVANKFEFSQLNKLEFTVEKEICIKLRVDRLGNLSKAKRT

SEQ ID NO: 3229 - protein, 1546 aa, unidentified
  REGION 1..1546: note = Description of Unknown: Cas Enzyme sequence
MKKILGLDLGTNSIGWALIETDINNKPNSIIGLGSRIIPMDQASISDFERGNSKSQTAERTRYRGIRRLRERQLMRRARLHRILNELQFLPEHYQECIDFEMRLGEFKSDKEPKIAWRRSSQNKMEFIFKDSFQEMLSDFSIRQPELITGGKKIPYDWTIYYLRKKALVERIGKEELAWILLNFNQKRGYYQFRGEDDTDSVRTPKTRKYFDRKVITSIVDTGQEYKGLKILIVELEDGNKGKIFKKEIPGWIGQEKNIIATVDLDKDGNDRKEDGILSQRFSIPTDTEWETEWKLIKLKTEKDLEDSLKTVGSYIYDSLVKNPNQKIRGKLVRTIERKFYREELKAILNKQREFHQELIDRKIFGQCIFDLYPKNEAYRNSIANKDLAWLILDDIIFFQRPLKSKKSLISDCSLEERKYMDKETGELKVVPLKCIAKSHPLFQEFRLWQFLSNLRIYKKGKTDFDVTSELLKTDDDYEALFNWLNNLKEIDQKSLLRYPAFGLRKEAENYRWNYVEDRIYPCNETRSMIMGRLAKTDGISAEGFNSEKLEELWHILYSVEDRFEIEKAIKKFSQKHTLGENFVETFRKFPSLKKEYGSYSAKAIRKLLPLMRMGKAWSIDNIDPKTKDRIDKIINGEYDEQIRNRVRDKAIHLTTPSDFKGLPVWLASYIVYDRHSESKEVMKWEKPEDIDLYLKKFKQHSLRNPIVEQVITETLRVVRDIWKQYAYSETVKDVYGKVSEGVSELAEIHVELGREMKNNKADREKISRINIENENTNLRIKRMLMEFVNPEFEIENVRPYSPSQLEILRIYEDGVLNSGVDIPDFVGDIIKKFRESDVRKQPSMSDVLRYKLWLEQKYRSPYTNEMIPLGKLFTTAYQIEHVIPQSRYFDDSFSNKVICESEINQLKENELGFEFIKNNAGRLVEISFGRPVRIMSVEEYEQFVRLNYSGNRLKMKKLLMDEIPNDFIERQLNDSRYISRVVKGLLSNIVREEGEEEPTSKNMITCTGGITDRLKKDWGLNDVWNTLISPRFERLNQLTGSQQFGYWDTKDGKTVFQIQMPLELQKGFSKKRIDHRHHAMDALVIACATRSHVNYLNNESAKASARETRYDLRRKLRKIETIQRERIIDGRKVLQNIEVAKEFHKPWRTFTEDAQNALSEIVVSFKNNLRVINKSSNYYSIMDSAGRRIKEKQKTRNNWAIRKPMHKDTVYGKVNLRRCRTVPLSSALSDVNLIKDLKLRNKIKELIRIGYDSKRIVKYFRENQIHWKNLNSSAVEIFYFTDNVEKQVATRKFLDESFTEKKIVNSITDTGIQKILLAHLELYGNNPETAFSQEGIEEMNRNLIALNGGKFHQPIHKVRVHEPLGNKFPVGTTGNKSLKYVRAAEGTNLYFAIYQDPEGKRTYESIPLNLVIERLKQKLPPVPDTNATGLRLLFWLSPNDLVYVPAVDEAVLFNGQAHFNKERIYRFIDSSGSTANFVPHSSANIIFSFPKDIAQKYCSGEKLIQDEFGVGSPQSKNQRAITGEMIKEVCIPIKVNRLGEIIQVF

SEQ ID NO: 3230 - protein, 1238 aa, unidentified
  REGION 1..1238: note = Description of Unknown: Cas Enzyme sequence
MKKILGLDLGSASIGWALIAENEVNGNVQREILGLGCRIIPYDGTEGKDFEKGTGESRNSIRTKMRTIRKGYDRYQLRRQYLVKELLKLNMYPSDELKKLSKIQLWELRSKAANQRISLPELGRTLLWLNQKRGYKSGRSNSNLDKKDTEYVAQVKNRHQIIKEQNLTIGQYFYQQLNSNEYFRVKENVFPREAYIEEFDCICKEQKKHYPDILTDEVISKIRNEIIYYQRPLKSQKGLVSVCEFEGFWRKGSDGKEYFVGPKVAPKSSPLYQYEKLWENINNIRIEDKHGHNIELTLEQKQALFEHLDNNEKLTPSDTIRILGLKKNGCFFNKQLSKGIKGNTTKHSILNCFDDVNKYAHLLKFDIEIVESNAQTYLYDKTTGEVIEGKTLKYVHPKVEKEPLYQLWHTIYSISDQDECSKVLQEKFKIEKDVADNLSGIDFTKQGFGNKSAKVIRKIIPYLIEGDGYSEAMCYAGYNHSNSLTKDENLKRKLLEKLKPIPKNSLRQPIVEKILNQMVNVVNAIIEKYGKPDEIRVELARELKQSKEERNETFKKINERERENEQIAKKLQEFGLRATRNNILKWRLYEEMNNEDKKLNAICIYCGQPISLVDAIKGADVDIEHIIPKSKLFDDSQSNKTLAHRHCNSGKGDLTAYDFMKTKPAEVFNAYIERVSMLYANKVISKAKRDKLLMTESKIPNNFIDRQLRESQYISKKAIEILLTISHHVWVTSGSITAELRRLWGWDDVTMNLQIPKYRPLGLTSFVEWESDHGKNIHRKEVITGWSKRDDQRHHAVDALVIACTKQGYIQRFNTLNSSKTKEDLQVDLENKSFEFKEKLSLLEKYIISEQPFSVNEVEEKVANILVSYKAGKKVAVFGKRKIGKKGNKKVVQTGIIVPRGPLSEESVYGKIKKIERKPIKYAFENPELIVLPKIKQLVEEQIAKYGDVKKAITATKKEPLYIDKNGHFTLEYASCFSTDYVIKYKVDTNFDKVDKVVDGKIKKILQARLDKFGGKPKEAFKDIQRGDKIVKWYEDEGLQRPINSVRCFTGLSAVVPAKKDENGNLIGFVKPGNNHHIAIYTNSEGNKTEHVCTFWHAVERKKYGLPVVISNTNEVWDIIQHKPEGTFPEDFLEKLPAPNLTLVLSMQQNEMFILGMTTDEVKNCIGSNDYKVISEKLYRVQKLGGSDYNFRHHLETEILNDEKSRLAKRFLRVASINALYSLNPVKVKIDCIGNITV

SEQ ID NO: 3231 - protein, 1532 aa, unidentified
  REGION 1..1532: note = Description of Unknown: Cas Enzyme sequence
MKKILGLDLGTNSIGWALVEQDFEKKIGTIQGLGSRIIPMSQDILGKFDSGVSISQTAERTAYRGIRRLYQKNVLRRERLHRVLNILEFLPKHYANSIDFEDKLGQFKDGKEVKLNYRRNISGKYEFIFKDSFEEMVKEFETKSKQVKIPYDWTLYYLRKKALNHKITKEELAWIILNFNQKRGYYQLRGEDEKEDENKIEEFFSLKVIEVESTGDKNHKGIWYNVKLENDWIYRRQSKEPLGNWVGKTKEFIITTQKNLDGTLKCDKEGNAIRSFRAVDSEKDWIAIKKRTERDIEKSKKTVGEYIYESILEIPSQKIRGKLVRTIERKYYKEELKKILETQIKYHSELSDNMLLLSCINELYPRNEAHQNLLKEKGIMHFILEDIIFYQRPLKSKKSSISNCQYEFRAFKNKEGKVQKNYLKAIPKSNPLFQEFRLWQFLKNLKIYQKEKIINGKSETDVTNQLLPDEDAWVELFDFLNTKKEIEQKQVLDYFVKKSLLNRREKDQYRWNYVEDKKYPCNETKAMFLSRLKKVKGVDPEIFLSNENEKNLWHIIYSISDKNEYEKALGTFASKHSIDVMSFIENFKKFPPFKSDYGAYSEKAIKKLLPLMRRGTYWEKAKISEGVKQRIDRIIERLRVINFDKKLIDENVADDDIPKQVLKSFAEFENRNYYQGLNTYQACYAVYNRHSETSLISRWKSPDDITKFLNEFKQHSLRNPIVEQVVTETLRVVKNIWEHYGSGAEHFFDEIHIELGREMQNPADKRKKLTERITTNENTNQRIRELLKEIMYDDAIEGKIRPYSPSHQEILKIYEEGIYQNPNTEYFNLSADEIEKIRKNSNPSSKDITRYKLWLEQGYISPYTGQPIQLSRLFTTDYQIEHIIPQSRYFDDSLSNKIICESEVNQLKGNSTAYEFLKNEKGRIVTLTQGKTVKLFTIEHYEEHCNNYFKNNRAKLKKLLSDEIPEGFIERQMNDSRYISKLVMGLLSNVVRHDNELEATSKSVIPLSGSITSKLKFDWGLNDRWNEIIAPRFKRLNMITNSNNFGYWDNEINAFRPTVPDEIARGFNKKRIDHRHHALDALVIACANRRHIHYLNALNAENKNYTLCDLLLIKNKQGDFTKHFILPWSDFTTHAKNKLESTVISFKQNLRIINKTNNKTWQWVEKDGTVNKEMVRQTKGDSWAIRKPMHKDTVSGKVEVRIRKTISFSNGLKDWKSLVDKQLKNKIRELCSQGKNDKEIAKYFKENPYPSNENRFTKVEVYTLTKNATAIRTALTDKFTLKQLENVTDSGIRKILESHLNNYMDENGNKHFDLAFNPDGLDELNKNIKLLNGGKFHHPIHKVRIYEEGNKFKVGESGNKSKKFVEAAKGTNLFFAIYWNTEKQKREFETIPLNEVITHQKWSATLSKDDQKLIPAIPVNHEKGEYLFSLSPNDLVYVPTEEEIANPNLVNFEKLNSEQVNRIYKMVSSTGNECHFIQEHVSTLIISYNSKSKLGEFGSLNKMEIDMYGIRIKEVCWKLKVDRLGNVLEVIR

SEQ ID NO: 3232 - protein, 1360 aa, unidentified
  REGION 1..1360: note = Description of Unknown: Cas Enzyme sequence
MKKILGLDLGTTSIGWAYVHEADNDHEKSSIQRLGVRVIPLTTDENINFQAGKAITTTADRTLKRSMRRNLDRYKLRRANLIVALKQSGFIDEDAILTENGPSSTFETWKLRAAAVERPLTKTDLARVLLMLNKKRGYKSGRKTNNREEGSLIDGMEVARILYDENLTPGQFVYRRLLEGKQSIPDFYRSDLEAELDRAWSQQQRYHPNLFSDENRKRIDGRGKVQTAKVFTDLYKIETPKTKGKPLERKILDYKRRSDAVTDKVSVEEAVAAISDINRDIASSSGYLGAISDRSKELYFKKQTIGQHCLSLLSENPHTSLKNKVFYRQDYLDEFEKIWETQAAYHEEMTRELKSEIRDVIIFYQRRLKSQKSLIRNCEFERYHKAIPKSSPLYQEFRIWQVLNNLIVSGPDGMEDRPLTMEEKEILYLDLTWKDSLTKSEVMKRLGYNPRGTQLNYEKIEGNRTNASFLDIFRKIIENEGYEFDFSKMPGQEIQDTLYSLFGFLGIKQEILDFRFDLQGDHFFKQPSYEIWHLIYSFEGDNTKVGNGNLISKLSERYGFSEEHARFLANLSFPSDYGNLSSRAIRKILPHLRSGLNYHEACLAAGYNHSASLTIEENLNRHLKDHLDNLPKNSLRNPVVEKILNQLINLINEIDDDPSLGKPDEVRIELARELKMNAVERENASRQIREATMDRERIVKILKDEFNIGKVTRSDVIRYRLYRELEMNGYKTLYDNQYIPREKLFSKEIDIDHIIPQSLLFDDSYANKTLSSKDVNIEKGNDTAYDYLKAKLGQQKLDQYVARVKYLFENKKISRAKTDKLLMKREDIPDDFIERELRTTQYIARKAHEILGDWVRVITTTSGSITNRLRQDWQLIDLMKEINLPRYRSLGLTETIDGKNGEEEQILEWTKRNDHRHHAVDALTVAFTRPSHIQYLNNLNSKSEKGGSIYGIAQKELYRDKSNSPRFKPPMPFDELRHSAKRHLDSLLTSHKAKNKVVTRNVNRISFKQGEHKQLTLTPRGQLHKESIYGCRSEYRTAEIRVGALLDYDTALTVAEKKYREALLKRLQQFNNDPRKAFAGQQAPARNPVWVDDLHTEKVPEKVKRVWLEKVYTIRKEINPDLDVSKVVDQGIRCVLESRLKMHGGNPKLAFTNLEQDPIFVNKDKGIVLKRVTITGITTVEPLHDKRDRFGRLILDDQGHTQPVDFVSTGNNHHVAIYRDAEGNLQEEVVSFFEAVQRVNLGLPVINREHPKGWEFLFTLKQNEYFVFPKDDFDPFAINLMDPANYSLISPRLFRVQKIASKNYVFNHHLVTKAVDSELLKNFKNLSGETYYLIRTPVRLAGIQKVRVNHLGKIVHVGEY

SEQ ID NO: 3233 - protein, 1561 aa, unidentified
  REGION 1..1561: note = Description of Unknown: Cas Enzyme sequence
MKRNLGLDLGTNSIGWALIEHDFDNKLGKIIGLGSRIIPMDAATLSDFEKGNTISQTAARTKYRSNRRLRQRTILRRERLHRVLNIIGFLPEHYSRSIDFHNHPGQFKNGLEPKINYKPNEKNVNEFIFKESFNEMIQEFNVTGFNINIPHDWTIYYLRKKALKEKISKEELSWIILNFNQKRGYYQLRGEDLDNEIENKKTEEYYSLEVTKVEETDEKNAKGTWYNVFLENGWIYRRQSAQTLKNWVGNNKEFIVTTIIDKDGTPKLDKKGNIKRNFRAVDSEIDWLAIKKKTEKDIQNSNKTVGEYIYNFLLINPSQRIRGKLIRTIERKYYKEELKKILITQAKFHSQFLDRRLFKACVEQLYANNEAHKEKIKDKDFVYLFIDDIIFYQRPLKSKKSNIASCQYETRIFKKKIYIPDNEKIIEKEIIVNEPLKGIAKSNPLFQEFRLWQFLRNLRIYQRDAEIDGKTEFDVDVTDVFLPNEECWVELFDFLNSIKEIEQNQLLEFFVKKAIITKNKKSNYRWNYVEDKKYPCNFTKAQLITRLNKVEGIITNKFLSSEIENHLWHIIYSIKDKYEFEYALKTFAKKHDIKVDSFFEQFKNLPPFKNEYASYSSKAIKKLLPLMRQGKYWDINEIPEEIFIRGNMIIERLRSIDYNVERIDDKVADDDIPKSILKSFARKKEDNFFRGLNTYQACYLVYNRHSEVSDLIQWKNPKDITNYLTKFKQHSLRNPIVEKIVTEVLRVVKDIWEYYGNGEMNYFDEIHIELGRELKNPAHKRSEISNKIAENENTNQRIRELLQEFKNDSNIMGDVRPYSPSHQEILKIYEEGVYQNPNANYESLSLDDVEKIRKSSSPSKSEIIKYKLWLEQGYLSPYTGRIIPLSRLFTTDYEIEHIIPQSRYFDNSLSNKIICESEINAIKDRRTAYEFLKEENGRIIELARGKFVKLFTVEEYEVHCNDYFKKNRVKLKKLLSEDIPESFIERQLNDSRYISKFIKGLLSNIVREDKEQEITSKNLVTVTGAITAILKNDWGLNDKWNDIISPRFQRLNELTHSNDYGYWDESLNSFRIIVPTSISAGFSKKRIDHRHHALDALVIACTTKDHVNYITSLNTQRNNYSLVNKLRQVNKRQFTDRNTGELKITNVPGNYHLPWCSFPVDAHAFLIKTVTSFKQNVRIINKTNNKTWQWIARNGRLKKELIPQIKGDNWAIRQPLHKETVSGIVKVRVKKEVSFLNGIKNWNYLVNKDLKKIIHKLKVEGKSDKAISHYFKNNPFLIENKPATKVQVYSFTNNATASRIQLSEKFTRKQLENVTDTGIKKILEKHLGRYVDDKGNERFDLAFSTDGLVELNNDLIYLNNGKKHKPIYKVRIYEEGNKFKIGETGNKNKKFVEAAKGTNLFFAIYWNEEFQKREYETIALPDVIEHQKWRATLSKEEQEITPIIPLNHQKGRFLFFLSPNDIVYVPTEEELVNPLMVWFDNLTTEQSDRIYKMVSSTGNECHFVQNNVAALIKSYDAKSKVGEFGSLNKMEVDLNGARIKECCWKLECDRLGNVEKVHRHY

SEQ ID NO: 3234 - protein, 1379 aa, unidentified
  REGION 1..1379: note = Description of Unknown: Cas Enzyme sequence
MKRILGLDLGTTSIGWALVNEAENKDEISEIIKLGVRIIQYDSFSKVDKFGNVSESKNPADDFASGKGLSPNAKRTRQRGARRSLQRFKQRRKNLIEVLKDNGFISSSNALAESGKGSTFETLEFRAKAAVERVEKNELARVFLAINKKRGYKSSRKAKNEEEGSLIDGMGVAKEMYENKLTVGQYVSKLLKGGGKYIPDFYRSDLRNEFDLIWNHQQNYNKEKLTAKLYDDLLGKNKTQTWAICKEPFELVGIKRNAKGAEMKAENYEWRELALTQQLNLETLAIVFQEINNDLNKSSGYLGAMSDRSKELYFNKETVGQNLYKQLQGNPNTSLKNQVFYRQDYMDEFEKIWEIQSAFHKELTAELKMEIRDIVIFYQRKLKSQKHLISECEFEKHHKVIPKSSPLFQEFKIRQMLNILEFKDTKTGDLKVLTEDDRELLFEELNARGKLSINEIINFLGLDKKRWETNFKEGLEGNNTNAALFKAYQKIAEYEGYGFDWNKKSASEIKEEVKVVLSQIGVSAMILECNTDLVGEDFEKQESYMFWHLLYSSEEDESLKNKLQVKFGFMPEYTGIIANVALQPDYGSLSSRAIKKILPFLKAGNEFSKACELAGYNHSSSLTKEELAKRPLKDKLELLKKNSLRNPVVEKILNQMVNLVNQAIDEYGKPDEIRIELARELKKSAKERAEMTTNINAAKTKYEGIRKVLMSEFGVPNPTRNDIIRYRLYEELKPNGYHSLYTNKYIPKEKLFSPEIEIEHIIPKSRLYDDSFSNKTLAYSKPNKDKGDRTAFDFISIVYSSDLKDYENRVDLLFNKGAGTIGKAKREKLMMGGGDIPSDFIKRDLRDSQYIAKKAKLILEEVARTVNTTTGIITAQLREDWDLINVMQELNLPKYKAIDESLVEQIEKKDGTFKTRIKNWSKRNDHRHHAMDALTVAFTTYSHVQYVNNLNASRNEENKVLYGIRNKITKVYESKNGSKKRKFVPPIPNFREVSKRHIESILISFKAKNKVVTKNINKTKVKGKDKYLIKVQLTPRGQLHKETIYGQYAYPVIKEEKVGKNFDLDKINTVTKPKYREALLTRLHEYNGDAAKAFTGKNGLIKNPLCLSEKVDDVVPEKVKTLCYESSYSIRKAIGPDLKIDKVLDEGIKRILQNRLDEFKGNPKEAFSNLEAKPIWLNEDKNIAIKRVRISGVSNAEVLHTKRDHFGNEILIDGVAQPSDFVSTGNNHHVAIYIDEDGKLHDKVVSLYEAVAKVTEGLAIIDKEFNKEQGWKLLFTMKQNEMFVFPSEDFNPKEIDLRDVNNSEIVSKHLFRVQKFSKVEYGNSAVRDYVFRHHLETQLIDNKILRDTTFIVCKSLPYFNEIVKVRIDHIGKIVQVGEY

SEQ ID NO: 3235 - protein, 1454 aa, unidentified
  REGION 1..1454: note = Description of Unknown: Cas Enzyme sequence
MKKILGLDLGTNSIGWALVNTDENGNPCSIAGMGSRIIPMGAELSKFEQGQAQTKNANRRITRGTRKLNKRYKQRRNKLIYVLQQLDMLPEQIQLVEEFSDPNKIDKICIKPIQKKQKQLTAFELVALRVKALTEAIPSKDFGRIIYLYNQLRGYSGGNAEPEKEDNADEDAEEKKFTKENRVVLSKVLSIGEPENIVFKGKNITKRKIQLEIDDERFDETIIEGDTFLDVLKENEVIELQVSVSISKKGTSYFIKLPNKTSWRKKMENLEKELKDRSRELGREYYLSEYFLEILKSSKWAKIRNNVVLRARYEAEFDAIWETQYEQNPDFKRLVDDEEQLQKIVAFIFPERDHSKPETENTFKSKKEIYRTLAIENGLKYLIKKQIIFYQRDLKDQSHLISNCRFEPDEKVIAKSHPVFQEYRIWEQINKLHINKRIEKGRTKKGEIKYTYIDRPVPTLLKEWIYKELQSKKEITFKSIYTKLIKDYNFQEGDEFLNGLDPKVKIKSNETKRLLQKSLKDWWTVLELEKEDNVIELWEILYNGKGNEYDIDSERTSQVLSFLKKRMDNIDNINELAISISKIKFSRNYSNMSLKAIEKILPLVRAGKYFDNDFSDELHDKVIRLLNETVDDPFEKSVQEYLENNIDLLTDGGLVNSYATILVFNKHTAKEYLTEELINDYNKIKRLAPGELRNPLAEQIINEALVIVKEIWMQEKMKPFEVRLELARELKNSAERRKKIYKSQVENQKENERVKIKLQELEEEMTQANIEKYKLWASQENLQERYIQEYKDPSKTEVEKMRLWEEQGHISPYTGKVIPLSDLFNKGKFDVDHIIPKSRYFDDSFTNKVICETAVNKEKGNRTAMEYFDAGSKIPTVRKKDVFVDEVNRMFSGVKRKNLLATKIPDDPILRQIKDTQYIVIRTKEELNKIFGNEHVKTTTGGVTDYLRNHWGLTDIFKKQLKERYEMLLLNDNYIDNEYEKYITQKKEKENNYKGIGKESNDIVLDKEQYIDWLKIDSIKMKKNKLILKDWSKRIDHRHHAIDALVVACTEPSHIKRLNDLNKELQDWLDNHKKEFLPDFEGTPSELLEAIMDLDDAKRIEITTQLDKFSNIPAPWVGFDIDAEDAIEKIIVSQKPKDKLLLQRNIDGKIQIKIRGQLHEGTLYGKSQGNECYRIPLEKLAVKNFATEKTIAKIVNPFLKEAIEAHLNRYSNKEEAFSSEGIIDFNKTIAPHPPVSKIKIFYQDPTKKKRTKGDDDDSDTLQRLDRSKAFNDLLYVKTGDNYLFAVMEKEFFNKKKEATIKRVFDIITFFDAANLLKAEFIKAEDKSKIDKDLLLKQYFEKRNNAKLHFTLKQGDIVYMPEKDEEVILDPESALFESFWNDTKERGKNIYIVQKYSGKQIYFLKHNIANPIKNKIEFGSQNCYEKVGERSIKDYCIKIGIDRLGNIINVNGIDR

SEQ ID NO: 3236 - protein, 1395 aa, unidentified
  REGION 1..1395: note = Description of Unknown: Cas Enzyme sequence
MKKILGLDLGTNSIGWALVNEAENDNEKSSIIKLGVRVNPLTVDELTNFEKGKSITTNADRTLKRSMRRNLQRYKLRKENLINILKQNGWISDQTILSEHGNKTTFETYRLRAKAAIEEVTLEEFSRILLMINRKRGYKSSRKAKSTDEGQLIDGMEIAKKLYHENLTPGQLVLELVKAGKKYSPDFYCSDLQSEFDRIWDFQKQFYPEVLTDEFKKQLAGKGKQNTTKIFLAKYGIYTAANKGANKKLEATQWRVDALSKQLSKEELAFVISDLNGNVNNSSGYLGAISDRSKELYFNKQTVGQYLMEQLAQNPHARLKSQVFYRQDYLDEFNALWETQAKFHNELTPELKGEIRDVIIFFQRRLKSQKGLISFCEFERKQIEVEVEGKKKLKTIGMKVCPKSSPLFQEFKIWQILNNIQVNDKESHAKRFLEQEEKEMLFLELSIREKLTKADALKILFKNHKELDLNYKDIEGNRTQAALFNAYNDIFELSGHDKIDFSKCSANEIVNSVKEVFTALGINSEILFFNSLIEGDKFDKQPIYQLWHLLYSFEGDNSNSGQDKLIETLSSRYGFEKEFAKRIASITFQPDYGSLSTKAIRKILPYMREGNEYSVACVHAGYNHSKSSLTKEELDKKVLKDKLDILPKNSLRNPVVEKILNQMINVVNAVNESYGKPDEIRIELARELKKSAKEREELTTAINQTTAEHDKYRLELQKNFGLSHVSRNDIIRYKLYLELEPFGFKTLYSQTYISPDKLFSGDFDIEHIIPQSRLFDDSFSNKTLETRSINLEKGNDTAIEFIEKKYGKEELANYIAHIEGLFKNNPTKQGKLKKLKMKGDEIPDDFISRDLRDTQYIAKKAKSILEEFVRDVVSTSGSITDRLREDWQLINVMQELNWYKYDKLGLTETIIGRDGQEIPRIKDWTKRNDHRHHAMDALTIAFTKRSHIQYLNNLNARSDKAGSIYGIEQKELERDSKGKLRFKAPMADFRSEAKRHLENTLISIKAKNKVTTININTTKKKGGTNKKKQLTPRGQLHDQTVYGSNPWSRIELSSKISKNEIDNICSDNLKVYIKEHIKQRGSIAKAFTEEELLKLRYNNKPLREVEINIPCYTQRIDIIKFFTDSQRTVSSKIKNLKSVLDIKIREILNNRLDEYGGDFMKAFSDLETNPIWLNKEKGISIKRVTITGISNAQALHDKKDKDGKLILDNEGKPQPVDFVNTGNNHHVAVYRDEKGNLQENVVSFFEATERVNQGLSVIDKEYKKKEGWEFLFSMKQNEYFVFPRTEKKDKVHEETGEIYQIEETVFNPKEIDLLDPDNYKLISPNLFKVQTISKVMYGNSVIRDYKFRNHLETTVKDVKELRDLAFKQYKTLAFCDEIVKVRVNHIGQIVTVGEY

SEQ ID NO: 3237 - protein, 1153 aa, unidentified
  REGION 1..1153: note = Description of Unknown: Cas Enzyme sequence
MYPDDETRSLPKMKLWELRDKAVKSPVSLMELGRLLLWLNQKRGYKSSRCDTNLGKKDTEYVATVKSRHEKIKELNLTIGQYFYMELSTDEFFKVKENIFPREAYIEEFDTICKTQQEAHPEILTNELIDKIRNEIIYYQRPLKSQKGLVSVCEFEGFWHIGKDDKEYFVGPKVAPKSSPLFQLAKMWENINNIKIGSKTGEDLKLTTEQKWAIFQHLDNNEKLTTADLLKILNLKKDDCYVNKQLAKGLNGNITKHAIRQCLGSSDKYENLLKLDLKVVENEKEGYLYDRKTGEILDSKPIKFIDPLVEQEPFYKLWHTIYSINDQEECSRVLQTKFNIEKPIADKLAAIDFSKHAFGNKSAKVIRKILPYLMEGDGYSEAMSYAGYDHSNSQTKEENLQRKLLEQLKPIPKNSLRQPIVEKILNQMVNVVNAVIEKYGKPDEIRVELARELKQSKEERNDADKAMSKRQRENDTITKRLEEFGLRATRNNIIKWRLYEEIDNQDKKLNAICVYCGQPISLTEALKGNDVDIEHIIPKSKLFDDSQSNKTLAHRHCNKNKNDLTAYDFMKGKPEAVFNEYVERVNQLYANHVIGKAKRDKLLMTESKIPDNFIDRQLRESQYIAKKAREILQTICHDVWSTSGTVTAELRHLWGWDDVTMNLQMPKYKELGLTEMVEWESEHGKHKHQKEIITGWTKRDDHRHHAVDALTIACTKQGFIQRFNTLSAAKTREEMFFDVEQRSLEFKEKRSLLEKYIIGEQPLSVDEVEKAVSNILISFKSGKKVAVWGTRKIGKRGSKKVIQEKIIVPRGSLSEESVYGKIKIQEADKPIKYLFENPQLIFNSNVKAKVEERLLMFDGDVKKAIASLKKVPIYLDNNKTVVLEKATCLKEEYVIKYAVDTNFNKTDKVVDPKIKEILQNRLKKFGGKEKEAFKDVQLEDKTVIKWYEDEGLERPIKSVRCFTGLSAVVPVKKDDEGKDIGFVKPGNNHHIAIYTDAEKNKQQHVCTFWHAVERKKYGVPVIIQNTNEVWDMIQSQPDGTYPESFLEMLPPPNVNLLVSVQQNEMFILGMTTEDIEAAIKQGDYRQISDKLYRVQKLGSGDYTFRHHLETQIVDDNNAMLSKRGQRIRSIGSLFALNPFKVRIDNLGNIVKEN

SEQ ID NO: 3238 - protein, 1364 aa, unidentified
  REGION 1..1364: note = Description of Unknown: Cas Enzyme sequence
MKKILGLDLGTTSIGWAYVHEAETEGEKSSIQKLGVRVIPISTDEETDFQKGKSISINAERTLMRGMRRNLQRYKQRRAALIEILKKNRLINDNTILAETGNYSTYETYRLRAKAAKEKVEKEDLAKILQMINKKRGYKSSRKANKEEEGNLIDGMSVAKQLYEGNLTPGQYVYNLLKEGKRYIPDFYRSDLVNEFEKIWNFQKQFYPDILTDDFKKQLEGKGKQATSKTFLGKYKIFTAENKGKRDEIKLKAYKWRNNAIGKQLSIEEVAYVITEINNNLKNSSGYLGAISDRSKELYFNNETVGQNQYRQLTRNPHVPLKNQVFYRQDYMDEFEKIWEIQAGYHPELTLELKSQIRDVIIFFQRRLKSQKHLISECEFEKHHKTIPKSSLLFQEFKIWQILNNLELKNFETRERFVPNQEQKEQLFKELNLKDSLKKDQVLKLLTGNSKNYGLNYQEVEGNRTNVALFAAYQQILDLEGYEMDFAKMEASEILDAVNSVFNDIGINTKILNFDSSMEGSGLSEQSAYQLWHLLYSFEDDNSEYGNEKLLIKLQEKFGFKPEHARLIVNIPLQSDYGSLSARAIRKILPHLKDGNTYDVACAKAGYKHSSSKTAEEQASRILKDKLDILPKNSFRNPVVEKILNQMVNLINAVIEDKDLGKPDEIRIELARELKKSAQEREDMTKSINAAKTDHEKISKLLQDEFGIKKVTRNDIIRYKLYRELETVGYKTIYTGTYIPREKLFSKEFDIEHIIPQARLFDDSFSNKTLSSKQINIEKSNETAYDYLKEKLSEKYFNHYLSRIEELIKKGKISRAKYNKLLMKGSEIPDGFIDRDLRDSQYIAKKAKQLLEEVVRDVTTTTGSITDRLRQDWQLVDVMKELNLPKYRELGLTETIEGKNGKMEERIKDWSKRNDHRHHAMDALTVAFTKRSHVQYLNNLNARSDKSSSIYGIEQKNLYRDGNGKLKFKPPIPLADFRSETKKHLESLLVSYKAKNKVVTRNINKTKRKVKNSFNEQVSMTPRGQLHKETIYGRIRQYITSEEKVGTKFNLDTIQKVAVKKYRDALLRRLVENDSSPKKAFGGKNSPSKNPVYIDDLQTKQVPEKVKLVWLEDIYTIRKDITPDLKVDKVIDKGIQNILQKRLEEYDNDTKKAFSNLDQEPIWLNEEKGISIKRVTISGIVNAEPLHDKKDHLGNPILDEHGNPMPIDFVSTGNNHHVAIFRDENGNLQDEVVTFFEAVRRVNMGLPIINKHHQQGWEFLFTMKQNEYFIFPSDDFDPNEIDLLDVENAASISRHLYRLQKLSKVEYVKSAVRDYVFRHHLETQIIDKNETKGSTYITLKSLPLLGKIIKVRLNHLGHIVKVGE

SEQ ID NO: 3239 - protein, 1058 aa, unidentified
  REGION 1..1058: note = Description of Unknown: Cas Enzyme sequence
MKRVLGLDLGTSSIGWAVVDQAEKSSEKSQIIKMGVRIVPIDSQEKNDFEKGKSVSSTAMRNQKHGMRINLQRYKQRRKHLVNLLMKAGFISKDTLLFEDGNHSTFETYRLRAKAVTEEITLEQLARVLLMINKKRGYKSNRKTDKEEDGQLIDGMSIARKLYDEHLTPGQLVYEILQNGKNYRPAFYRSDLKAEFDAIWSFQSHFYPDILDDELRMRIDGKCKKDTSAIFYNVKGITAATNKDRKTRWLVAYRRRSEAITQQLPINEVVAALCDINGDIYYSSDRLGMISDNSKELYFNNLTVGQYLMQQLDKDAHYRIKNKVFYRQDYLNEFNAIWEKQRQYHPELTEDLKEEMRDTIIFYQRKLKSKKGLISICELEGKEITVQVDGKSKKVMTGPRVCPKSSPLFQAFKVIQELNNVVLEDKNSGLSTPLTSAQRQLLFNELSVNSELSNTAVLKLLGLSSKKYSTNYKSLQGNTTQVQLINAYKQILEWSGHDVDDFDKLDYATKMQFITQVFKAIGAKTDYLQFNPEHLDNYLEQPSYKLWHLLYSYEGDDSKTGDIRLKEHIQELTGLSEEYASVIASVRFEQDYGSLSSKAIKNMMPHLLAGMKYSAACEAAGYRHSAQSLTREELDARTLQSSLEVMPKNSLRNPVVEKILNQMIHVVNALMHEYGVMRDGARRFDEIHVEMARSLKQTSDQRKKASKSIEDRTKDNDQYKKELQEQFGITHPSRNDIIRYRLYLELKDNGFHTLYSNTYIPREQLFSKRFEIEHIIPQAKLFDDSQSNKTLETSEVNKEKGNRTALDYVLEKYGEVGAEQYRQRIAFLYDSKNKNGTNRKYKNLITTEQDIPEDFLNRDLADTQYIARKAKEILMQVCRTVVPTIGAITARLREDWQLVDIMKELNLPKYEKLQLVEKYTNRDGREMKIIKNWTKRNDHRHHAMDALTVAFTRLEHVNYLNHLSAHEDELHAEVMALRSKLINKENRRFLPPMPLDEFRKSALEHMKGILVSIKAKNKVATPNINRIQGRNVRQVTLTPRGQLHNETFYGLRHRYVTR

SEQ ID NO: 3240 - protein, 1350 aa, unidentified
  REGION 1..1350: note = Description of Unknown: Cas Enzyme sequence
MKKVLGLDLGTSSIGWAVVNQAVDHNEESSIVKLGVRVNPLTVDEKGNFEQGKSITTTADRTLKRSMRRNLQRYKLRRENLLSALKSYGWVTDDTQLAEEGNSSTFETYRLRAKAATEEISLEQLCRVLLMLNKKRGYKSSRKMNNEEEGELIDGMAVAKSLYEEHLTPGEYTLKILNREEKYIPSYYRSDLQAEFNIIFNHQSQYYPEVLNAELKEKLMGRNKSTTEKMFFVIHKVKCAELTDRKTRAITLARWRVEALANQLDIEQVVLVLSTINGEIDKASGYLGAISDHSKELYFQHLTVGQYLMKNLDGDPHFRIKNRVFYRQDYLNEFETIWECQKRFHSELTKERKEELRDIIIFYQRKLKSQKGLISFCEFESKQIEVMVDGKKKIVTTGSRVCPKSSPIYQEFKIWSELNNLALISKEDGTSIPLSLDQRKMLADELRYVKEIKGSAAMKLLNINAKEYSLNYDKIDGNTTASALMDACKNVVEWSGHDVEKFDKLSSQEKFDVVKAVFGALGYNSDFIVTSINEDDAMFRIWHLLYSYEGDSSTTGNDGLVKHIQQLTSLPEDYATALVNVRLEQDYGSLSAKAIKRILPFMKNDGKKYSEACEMAGYRHSKQSLTKEEIEQRELKPCLEVLPKNSLRNPVVEKILNQMVHVVNECISAYGPFDEVHIELARELKQSQKQRENATNALRLRTKETEDIKKILIDDFKINHPSRNDIIRYRLYEELKPNAYKTLYSNTYISKEKLFSREFDIEHIIPQAKLFDDSFGNKTLELRSVNIEKADMTACDYVKQKYGEKGFVDYEARVKTVYGKTNPRKQKQLLTPEKDIQSGFLNRDLSDSQYIAKEAKRMLHEIARTVVVTTGSITARLREDWQLVDVMKELNWEKYERLGLTEAHYNNDGHQVRRIKDWTKRNDHRHHAMDALTIAFTTVSHVQLLNNLNARGGGDSIYGIMYKELTTGRKFKLPMPDFRAKAMNQLKSILVSIKAKNKVATPNRNRAKNGTKQITLTPRGQLHNETVYGKRNRYASALEKVGKNFDEAKISTVCRKAYREALLARLKEFGGNPAKAFTGKNSLEKNILWLDKLHTHAVPPKVKTVSMESVYTIRKSITPDLKIEKVMDAGVRRILEKRLEDFKGDAKAAFSNLDDNPIWLNEEKGIAIKSVTIKGVNVATPLHEKVNKNGDTEPTDYVSTSNNHHVAIFEDEQGNYHEHIVSFYEAMMCKNMGLQVVDKQYNKDLGWKFLFTMKQNEYFVVPDLEHGFNPEELDLMDEANFNLVSPHLFRVQKFSTKDYFFRHHLETNVETSKELKDITWKRITCLNDLKGFVKVRVNHIGKIVAVGEYD

SEQ ID NO: 3241 - protein, 1368 aa, unidentified
  REGION 1..1368: note = Description of Unknown: Cas Enzyme sequence
MKRILGLDLGTTSIGWAVIDQSEQENEKSGIVKMGVRVNPLTTDEKDNFEKGKSVTTTADRTLKRGMRRNLQRYKQRREHLIAILTRNGIITDDAVLCEDGNRTTFETYRLRAKAAKEEISLNELARVLLMINKKRGYKSNRKANNQEEGELIDGMVIARRLYNEHLTPGELTYDLLQNTSSRLIPSFYRSDLMAEFGAIWAKQQQYYPEILTDEARERMQGQSRSRTVELFKALCHVVPAEVKDRKVRMLTYYRWRTQSLHQKMELEAVATALVEVNGAISAASGYLGNISDLSKELEIAHMTVGEFLMSKLDADPHYRLKNRVFYRQDYLNEFETIWETQKRFHPELTNALKEEVRDTIIFYQRKLKSQKGLISFCEFESREIVVKTAKGNDKKVLSGSRVCPKSSPLYQEFKLWQTINNVIIYDDNANEESGFALNDNQRLVLHDALTYSKELKKSAILKILGLPAKRYRLNYDAIQGNTTQVALVEAYKKILEWSGHDIDEFDKMTVEQKQHQLSAVFGVLGAKTDFLSFDDSQAENSAAYKLWHLLYSYEGDSSKTGTEGLLRKIEQLTGLNSEYAKALVAVTFQADYGSVSAKAIKKILPFLKQGHLYSEACELAGYRHSKNSLTRAEIDQKQLLTALEIMPCGSLRNPVVEKILNQMIHVVNGAIAQYGPFDEIHVEMARELKQTREQREKATERIAKRTKETDQIVSILKGQPFGISNPTRNDIIRYRLYEELEPLGYKTLYTSTYIAKEKLFSRDFDIEHIIPQAKLFDDSQNNKTIETRSANLEKADQTAFDYVMAKFGPQAIDDYKARVAMILDRKKRELLLTDEEHIPSGFLNRDLSDSQYIARKATELLGLVTRRVVTTTGSITARLREDWQLVDVMKELNWEKYKAVGMTEEVKNKEGHVKRIIHDWTKRNDHRHHALDALTIAFTRPSHIQLINNVNASDGKKLDQAAFAIQRKEITHSGRFIPPMPYDQLRAAVLEHMSQILVSIKAKNKVVTPSVNRIKTKGGIRRQVTLTPRAQMHNETVFGSQYQYETKIETVGAKFDAEKISTVARQDYRIALLKRLDEFGGDPKKAFTGRNSLEKNPLYADILHAVQVPAKVKTVQLIPRFTIRRPITKDLKVYKVVDKAIREILQRRLDEFGGEAAKAFTNLDDNPIWLNKEKGIAIKSVTITGVNVATPLHDKRDKFGQLIIDEKGSTLPVDYVSTSNNHHVAIFEDVNGNWQEHIVSFFEANERAQQGLPIVDKNYNHESGWKFLFTMKRNEYFVFPDETEGFNPLELDLQDPQNLNVISRHLYRVQKLATKDYVFRHHLETNVQEDKRLKDKTWIRITSFAGLKGIVKVRVDHLGQIVAVGEY

SEQ ID NO: 3242 - protein, 1394 aa, unidentified
  REGION 1..1394: note = Description of Unknown: Cas Enzyme sequence
MKRILGLDLGTGSIGWAVVDQAETEGENSQIIKLGVRVVPLTVDEENNFEAGKTITTTADRTLKRGMRRSLQRYKQRRKALVSILKRKHFITDDTLLSEDGPRTTFETYRLRAKAAKEEISLNELARVLLMINKKRGYKSNRKANKQEDGQLVDGMDIARKLYDEHLTPGQYTYQLLRSRNGKTKVPSFYRSDLVAEFNAIWERQAEFYPDVLTEELKKKVMGRGKRDTASIFFAAKGVSTAENRDRKTKLIKSYIWRTEALNGKLDIEAVAAALCDINGEIAGSSGYLGSISDHSKELYFQHLTVGEYLMKQLAANPHYRVKNRVFFRQDYLHEFNTIWETQAKFHPELTEELKHEIRDVVIFYQRRLKSQKSLISFCEFEGKQITLSDGKKVMTGPRVSPKSSPIFQEFKIWQELNNVVIENRAVKASKAKKPSEPTLFPMLEVEKYTPLTSEQRKLLHDELSVNKELTKSAIMKTLGLNEKQYNINVKSLHGNVTQVALMDAYKNILEWSGHDATKFDKLTYAQKMEFITSVFEALGAKTDFLEFDVNDLTNYAQQPAYRLWHLLYSFEEDNSTSGYDKLTQHIQELTGLDREYAAAIAAVAFTDDYGSLSTKAMCKILPHLLRGLQYDKACEQAGYRHSAESLTREEIDSKPLVDKLETLSKNSLRNPVVEKILNQMIHVVNTATQEYGIQGKDGKHFDEIHVEMARELKQSQSQREEAFKSIGARTKENEAIIKILANEFPIQHPGRNDILRYRLYQELAMNGYKTLYSNTLISKEKLFSKDFEIEHIIPQALKFDDSYSNKTLETHHVNQTKGNKTAIEYVRDTQGEEGVQQYMERIAYLNKPGTTGKYKNLITERNKVENTFLNRDLTDTQYIARKAREILMQATRTVVTTTGTITARLREDWQLVDTMKELNFPKFEKLGMTESYRNRDGHEVRRISNWSKRNDHRHHAMDALTVAFTRLEHINYLNNLSSHADQATMQANAFVLRHKLINERKFIPPMPLDTFRATAMQHLGNILVSIKAKNKVVTPHVNRPRGSNKPQTCLTPRAQLHKETIYGTQMRYVTKEEKVGAAFTAEKIATVATKAYREALMRRLDEHNGDPKKAFTGKNALSKVPLFVDPMHTRKVPDKVKTVTQERIFTIRKSIDKDLKLDKVVDKGIHAILQQRLDEFGGDAAKAFTNLDENPIWLNKEKGIAIKTVTITGVNNATPIHDKKDKDGNPILTAGGDTIPVDYVSLGNNHHVAIYEDEQGDWHEHVVSYFEATERARQHLPIVDKSYNHDEGWKFLFTMKQNEYFVFPDPEQGFYPEEIDLMDENNYALIAPHLFRVQKFTTGDYFFRQQYESTVDAKDVALKGLAFHRITTVNNLKGIIKVRINHCGKIVHVGEYQ

SEQ ID NO: 3243 - protein, 1387 aa, unidentified
  REGION 1..1387: note = Description of Unknown: Cas Enzyme sequence
MKKVLGLDLGTGSIGWAVVNQAENDNEKSSIVKLGVRVNPLTVDEKGNFEKGKSITTTADRTLKRGMRRSLQRFKQRRNMLVDILIKNNIINDDTVLSEVGINSTHETLELRAKAARHEVTLQEFARVLMAINKKRGYKSNRKANNDEEGELIDGMAVARQLYNEGITPGQYVYQLLKSHKSYKPSFYRSDLRAELDLIWNKQHDYYPDILNDDSRRVIEEKGKNDTRKYFFAAHHIEAAEVKDRKIRQLSYYEWRADAANRKLDIEQLVTVICEINGDIAASSGYLGAIGDHSKELEINKITVGEYLFQLIKQNPHNSLKNIVFYRNDYISEFNTIWATQAKYHKELTPQLKEKIEKEIIFFQRRLKSQKGLISFCELEGKEICLANGKKVTTGPRVCPKSSPLFQEFKIWQDINNVILENKSIKKSSKSKASIPSLFEESSIQRFTPLDQEQKIKLYNELYCSKELSAKEVLKCLDLSDKDYALNFKKLQGNITQVTLLNAYKGIVEMSGHDVENFDKMDAASKLHLLKAVFETLNAKSDFLFFDAGNNASEMQQNAMFKLWHLLYSYEDDNTPTGNGKLIDHISQLTGLSHDYAALLARVNFVQNFGSLSTKAILKILPYMKNDGMVYSDACKAAGYNHSSQSITRDMNEARQLDKHLELLPKNTLRNPVVEKIINQMIHVVNNCIDEYGSFDEIHIEMARELKQSQQQREDTTKRLNAKTREVEEIKKILMSAPFNIANPRRNDVIRYQLYQELAPNGYKTLYSNTYISKEKLFSRDFDIEHIIPQAKVFDDSFSNKTLEARAVNIEKSNMTAIDYVKMKYGAQGVDEYLKRIAFLNTDGSRTKYKRLTTPDDKIESDFLNRDLSDSQYIARKAKELLLKVTRDVVATTGSITARLRDDWQLVDVMKELNWDKYDKLGMTSTIRDEHGHEIRRINDWTKRNDHRHHAMDALTIAFTRHSHIQYLNNLNAKDDASDKDSSIYGIEKKELLHGRKFKSPIPLDEFRAQAMRHLADILVSIKAKNKVATKSINKIKGGKQQSTLTPRGQLHNETVYAQRQRYATRDEKVGAAFNVEKINTVCRKSFRDALLQRLMQFGGDPKKAFTGKNSLSKNPLFVDDNHTAKVPDKVKTVVLETYYTIRKPITKDLKIEKVVDEGIKRILLNRKNEFGGDQAKAFSNLDENPIWLNKEKGIAIKSVSIKGVNVAVPLHTKRDNNGNIIIDEMGNAIPTDYVSTSSNHHIAIFEDPDGNLQEHVVSLFEATARKNQDLPVVDRDFNKELGWKFLFTMKQNEYFVFPDESTGFDPSGIDLFNPGNYSLISPHLFRVQKLSTCYYVFRHHLETNVNDEENLRNTTWIRIRTTNYLRGIVKVRVNHIGQIVKVGEYL

SEQ ID NO: 3244 - protein, 1360 aa, unidentified
  REGION 1..1360: note = Description of Unknown: Cas Enzyme sequence
MKRVLGLDLGTTSIGWAVVDQAASQDEKSKIIQLGVRVNPITVDEQNNFENGKSITTTADRTLKRGMRRSLQRYKQRREHLVGLLKKHGIINDDTLLNENGNATTFQTYRLRAKAAHEEISLEEFARVLLMINKKRGYKSNRRADSQEDGELIDGMAVAKKLYNEHLTPGEFAYHILQSGKRFIPSFYRSDLQNEFDKIWNCQNQFYPQVLTAELKDKLTDRSKKDTENIFFAIHHISSATVKDRKTATLTIYKWRVQALRQQLDLEQVVAVLASLNGAIAGASGYLGHISDNSKELYFGHMTVGEYLMRGLEQDPHFRVKNRVFYRQDYLNEFEQIWETQRRFHPELTAELKEKIRDTVIFYQRKLKSQKGLIAYCELEGREITVKVDGKEKRVMTGPKVCPRSMPLYQEFKMWQVINNLRLQSKIDGTQVPLTMEQKKLLHDALNVEGDMQAARVLKVLALKPKDYGINCDEVPGNTTNAALFKKYKSIVEWTGHDVEKFDKLSASEKIALVESVFKALKFNTDFLGDGCDEQSKAFRLWHLLYSYEGDNSNTGIDKLVDHICSLTALPADYAKAVAQVKFDDDYGSLSAKAIKKILPYMQQGMMYSEACEAAGYRHSKSSLTREEIAAKQLLQHLEVLPKNSLRNPVVEKILNQMVHVVNACQDAYGPFDEIHVEMARELKLTSKQREERTKALNQRTKETEEIKQKLIKDFNVPHPSRNDIIKYRLYMELAPNGFKTLYTDTPISHEKLFTREFNIEHIIPQAKMFDDSFTNKTLETAEANLDKSKMTAYDYVLSRQGEEGAKRYKAKIEKLFGASNPKKCECLLMRDSDIPDGFLNRDLSDSQYIARKAKEMLEKITRVVVPTTGAITARLREDWQIVDVMKELNLEKYEKLGLVETYSDRDGRCVKRIKDWSKRNDHRHHAMDALAIAFTQPSHIQLLNHLNAHESDDIKANAYALMRRTLTKGGTFIPPMEGFRAEARRHLAAVLVSIKAKNKVVTPHVNRIKGVATHQVTLTPRGQLHNETVYGKRQFYNTKMERVGKNFDVAKIATVCKKAYREALLKRLQQYGGDPAKAFTGKNSLEKNPLYLDSRLLETVPGSVKTVTVESVYTVRKPIDAKLKLDKVVDAGVRRILQKRVDEYGSVEKAFSNLDENPIWLNKEAGIAIKHVTIKGVNVATALHEKRDNRGQYIEDADGQRQPTDFVSTSNNHHVAIFEDEQGNLHEHIVSFYEAVALAQSGLPIVDKLYNSGKGWKFLYTMKRNELFVVPDLEHGFNPAEIDLMDEKNYPAISRHLYRVQKLATKYYVFRLHLDTKVEEFKALRDIHWKRITKENDLKGFVKVRVDHIGHIVAVGEYN

SEQ ID NO: 3245 - protein, 1372 aa, unidentified
  REGION 1..1372: note = Description of Unknown: Cas Enzyme sequence
MKRILGLDLGTSSVGWAVVDQAENDNEKSQIIKMGVRIVPLDTQEKDDFEKGKSITTTAVRNQKHGMRINLQRYKQRRAHLISLLRQEHFITDDTLLYEDGNNSTFETYRLRAKAASEEISLEQLAKVLLMINKKRGYKSNRKADKQEDGQLIDGMAVARKLYDEHLTPGQFVYEILQQGKRYVPTFYQSDLRAEFNAIWNFQSQFYPDILDDELKDKLNGKNKKSTVQTFYAAKNVSAAENKDRKTRLQVAYRWRAEAVTQQLPIEQVVAVLSDINGDIYNSSGYLGKISDHSKELYFNKLTVGQYLMQQLDKNPHFRIKNRVFYRQDYLNEFNTIWETQSKFHPELTDELKEEMRDTIIFYQRRLKSKKGLISYCELEGKEITVTVNGKTKKVMTGPRVCPKSSPLFQEFKIWQELNHMFKNVPLSGDQRTILYKELSVNKELSKSSVLKLLGLKDKEQALNFKSLPGNNTQVQLMNAYKQILDWSGHDVEKFDKLDYDTKMTFIKSVFEAIGAKTDFLEFDSNNLDNYLEQPAYRLWHLLYSYEGDNSETGDDKLKKHLKELTGLSDEYVTALVSVQFEQDYGSLSAKAIKRILPHLLSGKVYSEACEAAGYRHSAQSFTREELENRPLENALEVLPKNSLRNPVVEKILNQMIHVVNAAMEEYGAVRDGVKRFDEIHLEMARTLKQTKDQREKASRMIEERTRENDKYINELQKEFGIAHPSRNDIIRYRLYLELKDNGFHTLYSNTYIPREELFSKRFEIEHIIPQAKLFDDSQSNKTLETHEANLEKANRTAMDYVLDKYGEIGAEQYRQRIAFLYDRNNKNHTNQKYKNLLTTEAEIPKDFLNRDLGNTQYIASKAREILLQVTRTVVPTIGAITARLREDWKLIDMMKELNWSKYKALGQTEEYRNRDGHQVRIIKNWTKRNDHRHHAMDALTVAFTRWEHVQYLNNMNAQEDDALNSNAWKLRSKLMKEGKFLPPMPLDQFRASAFEHMKGILVSIKAKNKVATPNVNRISGSDVRQVTPTPRTQLHKEKFYGARQRYVTTIKKVDGKFDAETISKVARKDYREALMRRLDECGGNAKQAFTGKNALSKMPLYCDALHTKQVPESVKLSWFETYFVIREAVDSSINIDNVVDKRVRDILQERLEAYGGDRNKAFSNLDENPIWLNKEKGIAIKRTAQKARLTNPMPLHDKLNRDGSQLIDREGNTMPVDFVNTSNNHHVAIYEDADGNWQERIVSYFEAIAHINNEMPIVDKHYKESEGWRFKFSMKQNEYFVFPDEEHGFLPSEIDLLDERNYAVIVPHLFRVQKLTSKDYVFRHQYETSVTTGGSLPQGIAYFRITSVNNLKGIVKVRINHIGKIVHVGEY

SEQ ID NO: 3246 - protein, 1479 aa, unidentified
  REGION 1..1479: note = Description of Unknown: Cas Enzyme sequence
MAKNILGLDLGTNSIGWAHVMEGENSENSSIVQIGVRVNPLTTDEQTNFEKGKPITTNADRTLKRGMRRNLDRYQLRREHLLNALRKANIITAESKLAEDGKNTTHETWRLRAKAVTEKIEKDELARVLLAINKKRGYKSSRKAKNEEEGHAIDGMAIAKRLYEENLTPGQLSFQLLLEGKKKLPDFYRSDLQAEFDKVWNKQRTYYPDFLTEELYIALKGQGKENTRKRILAIANVYTADIKDMEDGLKNEKTIKLPTREKKKLQAYKWRNDAVTQQLSQEQVAFVLTEINNNINQSSGYLGEISDRSKELFFNKLTVGQYLYNQLLQNRHIRLKNQVFYRQDYMDEFEAIWEEQRKHHPELTDELKEEIRDIIIFYQRKLKSQKGLISFCEFESKEVVINGKKSTIGARVAPKSSPLFQEFKIWQNLNNVLVRKKGSKKRKAQDTLTNFSEDAEVLELSLEAKETLFEELNLKGNLSSARIIEILGHKPADWEVNHSQLEGNRTNQALYNAYLKILEIEGYNEDLLKLSDKDDINVADLKTPAREIKAMVKSIFEVLGIDTEILEFNAELDGKDFEQQKSYQLWHLLYSAEDDDKKYSEEDILTYGQEHIGLKKKLCEKFGFQPEHAKILVNVSFQDDYGSLSTKAMRKIYPYIKENKYSTACAYVASDYKKLSQKEGDYFDVLSKKYRHSNWETKEENEQRLLKDRLDLLPKNSLRNPVVEKILNQMINVVNALLDKKRKTEPNFKFDEIRIELARELKKNAKERAEMTKEINQAKGKNEKIVETIRKDFGILNPTRNDIVKYKLYQELAFNGYKDLYTNTKIDYHKLFSKEYDVDHIIPQSRLFDDSFSNKVLVPRQANLDKGNRTAYDYMATKSKEAFERYLAAIESLYKEDKISKAKYQKLLKQESKIGDGFIERDLRDSQYIAKKAKEILSQITRHIVSTSGSITDRLREDWGLINVMKEINLPKYRALGMTEFEERKDGNKVEVIKDWTKRNDHRHHAMDALTVAFTKRQYISYFNYLNARYNTTHKEHQNIKGIEEKFIEWKYDEQGNKKRVFKLPIPNFRQLAKEHLESVLVSHKAKNKVVTRNKNITKSKKGELVKIELTPRGQLHKETIYGKYHYYESKEVKIDGKFDEATIAMVAHPLYKKLLLERLQANDNDPKKAFTGKNALSKNPIYLDEARTETMPEKVKLTWLESDYAIRKDITPENFKDEKSLEKIIDHEVREILRQRLKEYGDAKKAFSDLDKNPIYHTNGYVIKRVRISGVKNAEPLHFKKDHLGNYLLDERGERIPVDFVSTGNNHHVAIYRDANGNLQEKVVSFMEAVLRKNYGLPLIFKNPIEDIDLVLNKGIKEELILSNLPEKDWEFLFTMKQNEMFVFPNDQTGFNSQGIDLLDPKNKKLISPYLFRVQKISTKNYVFNSHLETKSVDGDMLKNKKQLSGVSYYFIQTPAYLKDIIKVRINHLGDIVQVGEY

SEQ ID NO: 3247 - protein, 1457 aa, unidentified
  REGION 1..1457: note = Description of Unknown: Cas Enzyme sequence
MKRILGLDLGSNSIGWAFVQQDFENKQGKIIAAGSRIIPMDQKMLSNFEEGTTVSQTAERTTYRSMRRLRERHLLRRERLHRVLHILGFLPPHYDSQIDFSKRYGKFIDNAEPKIAYNNGNFIFMNSFNEMIEDFKKHQPQLFYKKSNGEESKIPYDWTIYYLRKKALSQKITQQELAWLILHFNQKRGYYQLRGEEEIENPNKEIAFHSLKVVEVEAEAPNKKGEIWYTIRLENGWIYRRTSKIPLDDWRGKTRDFIVTTDLNDDGTIKVDKEGKEKRSFRAPDENDWNLLKKKTEHDIDFSGKTVGAYIYDHLLQNPNQKIKGKLVRTIERKYYKDELKAILAKQIALQPEFFTENLLADCIRELYRKNETQQQNLLSKDFLHLFVEDIIFYQRPLRSKKSTIANCTLEKRSYIDKESNECKDAPIKVCAKSNPYYQEFRVLQWLQNLRIYEIETDREVTAEFIETAQDYEALFNFLMSQKEIDNEGLLKYFLLAKNPQIKDKAAKSELKKWITTYRWNYVYDAADNSSKKYPMNETGYELQRYLQKVEGLPVNFLTFDITYQLWHLLYSVKDKVEFEKALKKFAQKYQLDEASFVDSFKNFKPYPNEYGSFSEKAIKKMLPLMRFGKHWNFKNIDVHTQKRIDDIINGMANEDIRTIIREKAEKYQLNNETYFQGLPLWLAQYIVYNRHAEATNIEKWTSVSDLEAYLEDFKQYSLRNPIVEQVVTETLRVVRDVWQQYGGGQANFFDEIHIELGRELKNTSKERERLSKQNQENENTNLRIKKLLAELKEDANIQNVRPYSLVQQELLKIYEEGVFSSTDEIEEDIQKIRKKAEPTTPEIQRYKLWLEQKYKSPYTGEVISLTKLFTEEYEIEHIIPQSRYYDDSLSNKVICESAVNKLKTNQLGLEFIQNHHGEKVRIVGNKEVTIFTEEQYKEFVKKHYAGNSAKQQKLFLNEIPEKMVARQMNDTRYISKYVSEILSRIVRSDEKDEGVNSKNVIPCTGKITTALKQDWGLNDVWNELILPRFERMNQLTQTQLFTSYNDRLQKNLPTVPIKYSQGFQKKRIDHRHHAMDALVIACVTREHINYMNNQHALDKSKDKKEQQQSRIDLRTILCEKKNNNWQFKKPWGTFTQEAKEALEHIVVSFKQNLRVINKATNYYEKREEKNGVLVKKKVKQEGTNWAIRKPLHKETVSGKIILDRKIGKDKILTATRKAVDITFTEKIISSITDTGIQKILLNYLKYKGSPEVAFSAEGLEELNKNIAKYNDGKKHQPIYKVRIFEEGSKFPLGETGAKATKYVEAAKGTNLFFGVYQGKGKRTYATIPLNEVIERQKQGLPSVPGRNEKGEPLLFSLSPNDLVYVPIEGEIIETIDFNNLSKEQKERIYKTVSFTGNECHFVKSTIASLIKSYDAKSKIGELGSLNKLEVTISGDSRIKEVCIKLKVDRLGNITKA

SEQ ID NO: 3248 - protein, 1426 aa, unidentified
  REGION 1..1426: note = Description of Unknown: Cas Enzyme sequence
MKNILGLDLGTTSISFAHIVEDENKEKSEIKELGVRIVSLTTDEQSDFEKGKSITTNANRTLKHGARLNLDRYQQRRKYLIDLLQKANLITSSSILAENGKNTTHSTWQLRAKAVTERIEKEEFARILLAINKKRGYKSSRKAKTEDEGQAIDGMAIAKRLYDENLTPGQLSLQLLQQNKKLLPDFYRSDLQREFDLVWNFQKQFYPDILTDTFYKELQGKGKDATSKAFSKRYHFDTAENKGSKESVRLQAYQWRAEAISKQLSKEEVAYVLTEINNNLNNASGYLGAISDRSKELYFNRQTVGQYLYAQLQENRHNSLKNKVFYRQDYLDEFERIWETQASFHKELTEELKKQIRDVVIFYQRKLKSQKGLISFCEFESKEIEIEKDGKTITKSIGARVVPKSSPLFQEFKIWQILNNVTCKRKGIRKKKSSAKSTELDLFNESSQAIFSLDMECKQLLFDELNLKGDLKSDKVLKLLGYSPQEWEINYNQLEGNRTQKALYEAYLKIVEMEAHDVKDILQIKSAKDDWSLDESPLSASEIKEKVKDIFQALGICTKILYFDPLLPVKEFEKQDSYQLWHLLYSYESDDSTSGNETLYRILEKKYAFKREHARILANVALQDEYGNLSTKAIRKLYPYIKENQYSTACKKAGYKHSKLSLTTEELEARELKNIIPLLKKNALRNPVVEKILNQMINVVNALIEKNSERDAEGKITKYFHFDEIRIELARELKKNAQERYEMTQNINKAKLEHQKISEILQKEFGIKNPTKSDITRYRLYQELAHNGYNDLYTNTCIPKELLFSKNIDIEHIVPKARVFDDSFSNKTLAFREFNIKKGESTAFDYITSLNNEEELNQYLNRVENAYKTKNISPAKYKNLLKKASEIGDGFINRDLRDTQYIAKKAKEILFQVTKNVLSTSGSITDRLREDWGLVDVMKELNMPKYQSLGLTEVEERKEGNKVTVIKNWTKRNDHRHHAMDALTVAFTKPSYIQYLNHLNARKDENNKNYSVILAIEEKETIKVPTNNGKNKRVFIEPIPNFRQVAKKHLEEIFISHKAKNKVVTKNVNKPAGTDKQQITLTPRGQLHKETIYGKYQYYVNKEEKVGVKFDERTITKVSNPLYREALLKRLQANDNDPKKAFTGKNALSKNPIYLDETKTKTLPEKVNLTYLEEDFSIRKDISPDNFKDLKSIEKVIDQGVKRILIKRLQDYDNDPKKAFVDLEKNPIWLNKEKGIAIKRVTISGVNNAQPLHIGKDHLGKTTLNKEGKEIPVDYVSTGNNHHVAIYRDKEGNLQEQIVSFFEAVVRTQQGLPIIDKTYKQEEGWQFLFTMKQNEMFVFPNATTGFNPAEIDLLDPKNKKQISPNLFRVQKIATKDYFFRHHLETNVETDNVLKNTTWKREGLSGLKDIVKVRINHLGDIVSIGEY

SEQ ID NO: 3249 - protein, 1458 aa, unidentified
  REGION 1..1458: note = Description of Unknown: Cas Enzyme sequence
MKHILGLDLGSNSIGWALVQQDFENKQGKIIATGSRIIPMDQGILGDFERGNTVSQTAERTTYRSTRRLRERHLLRRERLHRVLHILGFLPPHYDAQIDFTKRYGKFIDNAEPKIAYNNGNFIFMNSFNEMIEDFKKHQPQLFYKKSNGEESKIPYDWTIYYLRKKALSQKITQQELAWLILHFNQKRGYYQLRGEEETENPNKEVAFHTLKVVEVEAEAPNKKGEIWYTVRLENGWIYRRTSKIPLDDWKGKTRDFIVTTDLNDDGTIKVDKEGKEKRSFRAPDENDWNLLKKKTEHDIDFSGKPVGTYIYDHLLQNPNQKIKGKLVRTIERKYYKDELKAILAKQIALQPELFTETLLADCIRELYRKNETQQQNLLSKDFLHLFVEDIIFYQRPLRSKKSTIANCTLEKRSYIDKETNERKDTPIKVCAKSNPYYQEFRVLQWLQNLRIYEIETDREVTVEFIETAQDNEALFNFLMSQKEIDNESLLKYFLLAKNPQIKDKTAKIELKKWITTYRWNYVYDVADNSSKKYPMNETGYDLQRYLQKVEGLPANFLTFDITYRLWHLLYSVKDKVEFEKALKKFAQEYQLDEASFVDSFKNFKPYPNEYGSFSEKAIKKLLPLMRFGNHWNFNRIDVSTQKRIDDLINGVANDEIRTIIREKAEKYQLNSETCFQGLPLWLAQYVVYNRHAEATDIEKWTSVNDLEAYLEDFKQHSLRNPIVEQVITETLRVVRDIWQRYGGGQANFFDEIHIELGRELKKTAEERKQLSNRNQENENTNLRIKKLLAELKEDASIQNVRPYSPVQQELLKIYEEGVFSATDEVEEDIQKIRKKAEPTTPEIQRYKLWLEQKYKSPYTGEVISLTKLFTEEYEIEHIIPQSRYYDDSLSNKVICESAVNKLKTNQLGLEFIQNHHGEKVRITGNKEVTIFTEEQYKEFVKKHYANNSAKQQKLLLNEIPEKMVARQLNDTRYISKYISEILSKIVRSDEKDEGVNSKNVIPCTGKITTALKQDWGLNDVWNELILPRFERMNQLTQTQLFTSYNDRLQKNLPTVPIEYSQGFQKKRIDHRHHAMDALVIACATREHINYMNNQHALDKNKDKKEKQQSRIDLRAILCEKKNNNWQFKKPWATFTQEAKESLEHIVVSFKQNLRVINKATNYYEKWEEKNGVLVKKKVKQEGTNWAIRKPLHKETISGKIVLDRKIGKDKILTATRKAVDITFTEKIISSITDTGIQKILLNYLKYKGSPEVAFSAEGLEELNKNIAQYNNGKEHQPIYKVRIFEEGSKFPLGETGAKATKYVEAAKGTNLFFGVYQGKGKRTYATIPLNEVIERQKQGLPSVPERNEKGEPLLFTLSPNDLVYVPMEGEIAETIDFNNLSKEQKERIYKTVSFTGNECHFVKSTIASLIKSYDAKSKIGELGSLNKLEVTISGDNSRIKEVCIKLKVDRLGNITKA

SEQ ID NO: 3250 - protein, 1571 aa, unidentified
  REGION 1..1571: note = Description of Unknown: Cas Enzyme sequence
MFSQRNNPYCELLSNSATKVSIIFFISKFFLTFFVFISFLLSLPHQNVKRMKRILGLDLGSNSIGWAFVQQDFENKQGKIIAAGSRIIPMDQKMLSNFEEGTTVSQTAERTTYRSMRRLRERHLLRRERLHRVLHILGFLPPHYDSQIDFSKRYGKFIDDAEPKIAYNKGNFIFMDSFNEMIEDFKKHQPQLFYKKSNGEESKIPYDWTIYYLRKKALSQKITQQELAWLILHFNQKRGYYQLRGEEETEGNDMEIISSKVLSVIKKNKDKKYDKYWYDITLENGLVYKAAFYNDLVYSWIGQEREFVVKRTLLKNGDEKIELSYLPTSDEIAKMDKKQQDKFYQKIKVKTESSIGNKTVGAYIYDHLLQNPNQKIKGKLVRTIERKYYKDELKAILAKQIALQPEFFTENLLADCIRELYRKNETQQQNLLSKDFLHLFVEDIIFYQRPLRSKKSTIANCTLEKRSYIDKESNECKDAPIKVCAKSNPYYQEFRVLQWLQNLRIYEIETDREVTAEFIETAEDYEALFNFLISQKEIDNEGLLKYFLLTKNPQIKDKAAKSELKKWLTTYRWNYVYDAADNSSKKYPMNETGYELQRYLQKVEGLPANFLTFDTTYRLWHLLYSVKDKVEFEKALKKFAQKYQLDEASFVDSFKNFKPYPNEYGSFSEKAIKKMLPLMRFGKHWNFKNIDIHTQKRIDDLINGVANEDIRTIIREKAEKYQLNSETCFQGLPLWLAHYIVYNRHAEATNIEKWTSVSDLEAYLEDFKQYSLRNPIVEQVVTETLRVVRDIWQQYGGGQANFFDEIHIELGRELKNTSKERERLSKQNQENENTNLRIKKLLAELKEDANIQNVRPYSLVQQELLKIYEEGVFSSTDEIEEDIQKICKKAEPTTPEIQRYKLWLEQKYKSPYTGEVISLTKLFTEEYEIEHIIPQSRYYDDSLSNKVICESAVNKLKTNQLGLEFIQNHHGEKVRIAGNKEVTIFTEEQYKEFVKKYYANNLPKQQKLLLNDIPEKMVARQLNDTRYISKYVSEILSKIVRSDEKDEGVNSKNIIPCTGKITTALKQDWGLNDVWNELILPRFERMNQLTQTQLFTSYNDRLQKNLPTVPIKYSQGFQKKRIDHRHHAMDALVIACVTREHINYMNNQHALDKSKDKKEKQQSRIDLRTILCEKKNNNWQFKKPWSTFTQEAKEALEHIVVSFKQNLRVINKATNYYEKWEEKNGVLVKKKVKQEGTNWAIRKKLHEDFPYGKVKYQVNFLKISENISKIDLIVDEFIKRQLEKIYVENHRKVNLTKKYLKENPIRDQKGEEVISTDFREENIKYRKRKPISVLSDRNRKTGITSIEKMLKTIAKVADNVLKRELFLYLEECNNDIDVAFSPEGIEQFNSKRKIPVYRLPFFEEGEKKNELGNKGKYVEAAKGTNLFFGVYQGKEKRTYATIPLNEVIERQKRGFPSVPEHNEKGEPLLFSLSPNDLVYVPMVGEATETIDFSNLSKEQKERIYKTVSFTGNECHFVKSTIASLIKSYDAKSKIGELGSLNKLEVTISGDSRIKEVCIKLKVDRLGNITKA

SEQ ID NO: 3251 - protein, 1461 aa, unidentified
  REGION 1..1461: note = Description of Unknown: Cas Enzyme sequence
MKHILGLDLGSNSIGWAFVQQDFENKQGRIIATGSRIIPMDQGILGDFERGNTVSQTAERTTYRSTRRLRERHLLRRERLHRVLHILGFLPPHYDAQIDFTKRYGKFIDNAEPKIAYNNGNFIFTNSFNEMIEDFKKHQPQLFYKKSNGEESKIPYDWTIYYLRKKALSQKITQQELAWLILHFNQKRGYYQLRGEEETEGNDMEIISSKVLSVIKKNKDKKYDKYWYDITLENGLVYKPAFYNDLVYSWIGQEREFVVKRTLLKNGDEKIELSYLPTFDEIAKMDKKQQDKFYQKIKVKTESNIGNKTVGAYIYDHLLQNPNQKIKGKLVRTIERKYYKDELKAILAKQIALQPEFFTENLLADCIRELYRKNQTQQQNLLSKDFLHLFVEDIIFYQRPLRSKKSTIANCPLEKRSYIDKETNERKDVPIKVCAKSNPYYQEFRVLQWLQNLRIYEIETDREVTAEFIGTAQDYEALFNFLMSQKEIDNEGLLKYFLLTKNPQIKDKAAKSELKKWLTTYRWNYVYDVADNSSKKYPMNETGYELQRYLQKVEGLPANFLTFDITYQLWHLLYSVKDKVEFEKALKKFAQKYQLNEASFVDSFKNFKPYPNEYGSFSEKAIKKMLPLMRFGNHWDFNHIDVHTQKRIDDLINGVANEDIRTIIREKAEKYQLNSETCFQGLPLWLAQYIVYNRHAEATDIEKWTSVSDLEAYLEDFKQHSLRNPIVEQVVTETLRVVRDIWQQYGGGQANFFDEIHIELGRELKNTSKERERLSKQNQENENTNLRIKKLLAELKEDASIQNVRPYSLVQHDLLKIYEEGVFSSTDEIDEDIQKIRKKAEPNKTELQRYKLWLEQKYRSPYTGEVISLTKLFTEEYEIEHIIPQSRYYDDSLSNKVICESAVNKLKTNQLGLEFIQNHHGEKVRIAGNKEVTIFTEEQYKEFVKKYYANNLPKQQKLLLNDIPEKMVARQMNDTRYISKYVSEILSKIVRSDEKDEGVNSKNVIPCTGKITTALKQDWGLNDVWNELILPRFERMNQLTQTQLFTSYNDRLQKNLPTVPIKYSQGFQKKRIDHRHHAMDALVIACATREHINYMNNQHALDKSKDKKEKQQSRIDLRTILCEKKNNNWQFKKPWGTFTQEAKEALEHIVVSFKQNLRVINKATNYYEKWEEKNGVLVKKKVKQEGTNWAIRKPLHEETFSGKISLNREKVGKGNILTATRKAVDSSFDVKKISKITDTGIQKILLNYLKYKGSPEVAFSAEGLEELNKNIAKYNDGKKHQPIYKVRIFEEGSKFPLGETGAKATKYVEAAKGTNLFFGVYQGKGKRTYATIPLNEVIERQKQGLPSVPGRNEKGEPLLFSLSPNDLVYVPIEGEIIETIDFNNLSKEQKERIYKTVSFTGNECHFVKSTIASLIKSYDAKSKIGELGSLNKLEVTISGDSRIKEVCIKLKVDRLGNITKA

SEQ ID NO: 3252 - protein, 1435 aa, unidentified
  REGION 1..1435: note = Description of Unknown: Cas Enzyme sequence
MKNILGLDLGTTSIGFAHIVEDENKEKSEIKELGVRIVSLTTDEQSDFEKGKSITTNANRTLKHGARLNLDRYQQRRKFLIDLLQKANLITSSSILAENGKNTTHSTWQLRAKAVTERIEKEEFARVLLAINKKRGYKSSRKAKTEDEGQAIDGMAIAKRLYDENLTPGQLSLQLLQQNKKLLPDFYRSDLQREFDLVWNFQKQFYPDILTDSFYKELQGKGKDATSKAFSKRYHFDTAENKGSKESVRLQAYQWRAEAIFKQLSKEEVAYVLTEINNNLNNASGYLGAISDRSKELYFNRQTIGQYLYAQLQENRHNSLKNKVFYRQDYLDEFERIWETQASFHKELTEELKKQIRDVVIFYQRKLKSQKGLISFCEFESKEIEIEKDGKTITKSIGARVVPKSSPLFQEFKIWQILNNVTCKRKGIRKKKSSAKSTELDLFNEPSQTIFSLDMECKQLLFDELNLKGDLKSDKVLKLLGYSPQEWEINYNQLEGNRTQKALYEAYLKIVEMEAHDVKDILQIKSAKDDWSLDESPLSASEIKEKVKDIFQALGICTKILYFDPLLPVKEFEKQDSYQLWHLLYSYESDDSTSGNETLYRILEKKYAFKREHARILANVALQDDYGSLSTKAIRKIYPYIKENQYSTACEKAGYKHSKLSLTTEELEARELKNIIPLLKKNALRNPVVEKILNQMINVVNALIEKNSERDAEGKITKYFHFDEIRIELARELKKNAQERYEMTQNINKAKLEHQKISEILQKQFGIKNPTKSDIIRYRLYQELEHNGYKELYTNAPIARDMLFSKNIEIEHIVPKARVFDDSFSNKTLTFHRINSNKGEYTAFDYITSLNSQEELNQYLTRVENAYKTKSISPAKYKNLLKKASEIGDDFINRDLRDTQYIAKKAKEILFQVTKNVLSTSGSITDRLREDWGLVDVMKELNMPKYQSLGLTEVEERKDGNKVTVIKNWTKRNDHRHHAMDALTVAFTKPSYIQYLNHLNARKDKNNKNYSVILAIEEKETIKVPTNNGKNKRVFIEPIPNFRQVAKKHLEEIFISHKAKNKVVTKNVNKPAGTDKQQITLTPRGQLHKETVYGKYQYYVNKEEKIGVKFDERTITKISNPLYREALLKRLQANDNDPKKAFTGKNALSKKPIYLDEAKTKTLPEKVNLAYLEEDFSIRKDISPDNFKDLKSIEKVIDQGVKRILIKRLQDYDNDPKKAFVDLEKKPIWLNKEKGIAIKRVTISGVSNAQPLHIGKDHLGKTTLNKEGKEIPVDYVSTGNNHHVAIYRDKEGNLQEQIVSFFDAVVRAQQGLPIVDKTYKQAEGWQFLFTMKQNEMFVFPNEATGFNPAEIDLLDPKNKKLISPNLFRVQTISVVKYGNSVVRDFKFRHHLETTLQDDKILQGITFQQIKSLEPLRNIVKVRVNHLGDIISVGEY

SEQ ID NO: 3253 - protein, 1457 aa, unidentified
  REGION 1..1457: note = Description of Unknown: Cas Enzyme sequence
MKHILGLDLGSNSIGWALVQQDFENKQGKIMAAGSRIIPMDQGILGDFEKGNTVSQTAERTTYRSMRRLRERHLLRRERLHRVLHILGFLPPHYDAQIDFTKRYGKFIDNAEPKIAYNNGNFIFTNSFNEMIEDFKKHQPQLFYKKSNGEESKIPYDWTIYYLRKKALSQKITQQELAWLILHFNQKRGYYQLRGEEETESPNKEVAFHSLKVVEVEAEAPNKKGEIWYKIRLENGWIYRRTSKIPLDDWKGKTRDFIVTTDLNDDGTIKVDKEGKEKRSFRAPEENDWNLLKKKTEHDIDFSGKTVGAYIYDHLLQDPNQKIKGKLVRTIERKYYKNELKAILTKQIALQPELFTKNLLADCIRELYRKNEMQQQNLLSKDFLHLFVEDIIFYQRPLRSKKSTIANCTLEKRSYIDKETNERKDAPIKVCAKSNPYYQEFRVLQWLQNLRIYEIETDREVTAQFIETPQDYEALFNFLMSQKEIDNESLLKYFLLAKNPQIKDKAAKSELKKWLTTYRWNYVYDVADNSSKKYPMNETGYDLQRYLQKVEGLPANFLTFDTTYRLWHLLYSVKDKVEFEKALKRFAKKKQLNETSFVESFKNFKPYPNEYGSFSEKAIKKLLPLMRFGNHWDFNRIDVSTQKRIDDLINGVANEDIRTIIREKTEKYQLNSESCFQGLPLWLAQYIVYNRHAEATDIEKWTSVSDLEAYLEDFKQHSLRNPIVEQVVTETLRVVRDIWQQYGGGQANFFDEIHIELGRELKKTAEERKQLSNRNQENENTNLRIKKLLAELKEDASIQNVRPYSLVQQELLKIYEEGVFSSTDEIEEDIQKIRKKTEPSKADLQRYKLWLEQKYKSPYTGEVISLTKLFTEEYEIEHIIPQSRYYDDSLSNKVICESAVNKLKTNLLGLEFIQKHHGEKVRVAGNKEVTIFTEEQYKDFVKKHYANNLAKQQKLLLDEIPEKMVARQLNDTRYISKYISEILSKIVRSDEKDEGVNSKNVIPCTGKITTALKQDWGLNDVWNELILPRFERMNQLTQTQLFTSYNDRLQKNLPTVPIEYSQGFQKKRIDHRHHAMDALVIACATREHINYMNNQHALDKSKDKKEKQQSRIDLRTILCEKKNNNWQFKKPWGTFTQEAKESLEHIVVSFKQNLRVINKATNYYEKWEEKNGILVKKKVKQEGTNWAIRKPLHKETISGKILLDRKIGKDKILTATRKAVDITFTEKIISSITDTGIQKILLNYLKYKGSPEVAFSAEGLEELNKNIAQYNDGKKHQPIYKVRIFEEGSKFPLGETGAKATKFVEAAKGTNLFFGVYQGKEKRSYATIPLNEVIERQKQGLPSVPERNEKGEPLLFSLSPNDLVYVPMEGEATETMDFNNLTKEQKERIYKTVSFTGNECHFVKSTIASLIKSYDAKSKIGELGSLNKLEVTISGDSRIKEVCIKLKVDRLGNITKA

SEQ ID NO: 3254 - protein, 1460 aa, unidentified
  REGION 1..1460: note = Description of Unknown: Cas Enzyme sequence
MKRILGLDLGSNSIGWALVQQNFENKQGQIMAAGSRIIPMDQSILGDFEKGNTVSQTAERTAYRSTRRLRERHLLRRERLHRVLHILGFLPPHYDSQIDFSKRYGKFIDDAEPKIAYNKGNFIFMDSFNEMIEDFRKHQPQLFYKKSNGEESKIPYDWTIYYLRKKALSQKITQQELAWLILHFNQKRGYYQLRGEEETEGNDMEIISSKVLSVIKKDKDKKYDKYWYDITLENGLVYKAAFYNDLVYSWIGQEREFVVKRTLLKNGDEKIELSYLPTFDEIAKMDKKQQDKFYQKIKVKTESSIGNKTVGAYIYDHLLQNPNQKIKGKLVRTIERKYYKDELKAILAKQIALQPEFFTGNLLADSIRELYRKNQTQQQTLLSKDFLHLFVEDIIFYQRPLRSQKSTIANCALEKRSYIDKETNERKDAPIKVCAKSNPYYQEFRVLQWLQNLRIYEIETDREVTSEFIETAEDYEALFNFLMSQKEIDNEGLLKYFLLAKNPQIKDKVAKSELRKWITTYRWNYVYDAADNSSKKYPMNETGYDLQRYLQRVEGLPANFLTFDITYQLWHLLYSVKDKVEFEKALKKFANKNQLDETSFVESFKNFKPYPNEYGSFSEKAIKKMLPLMRFGNHWDFSCIDVSTQKRIDDLINGVANDEIRTIIREKAEKFQLNNEISFQGLPLWLAQYVVYNRHAEATDIEKWTSVSDLEAYLEDFKQHSLRNPIVEQVVTETLRVVRDIWQQYGGGQANFFDEIHIELGRELKNTSKERERLSKQNQENENTNLRIKKLLAELKEDASIQNVRPYSLVQHDLLKIYEEGVFSSTDEIDEDIQKIRKKAEPNKTELQRYKLWLEQKYRSPYTGEVISLTKLFTEEYEIEHIIPQSRYYDDSLSNKVICESAVNKLKTNQLGLEFIQNHYGEKVRVAGNKEVTIFTEEQYKEFVKKHYAGNSAKQQKLFLNEIPEKMVARQMNDTRYISKYISEILSRIVRSDEKDEGVNSKNVIPCTGKITTALKQDWGLNDIWNELILPRFERMNQLTQTQLFTSYNDRLQKNLPTVPIKYSQGFQKKRIDHRHHAMDALVIACATREHINYMNNQHALDKSKDKKEKQQSRIDLRTILCEKKNNNWQFKKPWNTFTQEAKEALEHIVVSFKQNQRVINKATNYYEKWEEKNGVLVKKKVKQEGTNWAIRKPLHKETVSGKIVLDRKIGKDKILTATRKTVDITFTEKIISSITDTGIQKILLNYLKYKGSPEVAFSAEGLEELNKNIAQYNDGKKHQPIYKVRIFEEGSKFPLGETGAKATKYVEAAKGTNLFFGVYQGKGKRTYATIPLNEVIERQKQGLPSVPERNEKEEPLLFSLSPNDLVYVPMVGEATEIIDFSNLSKEQKERIYKTVSFTGNECHFVKSTIASLIKSYDAKSKIGELGSLNKLEVTISGDSRIKEVCIKLKVDRLGNITKA

SEQ ID NO: 3255 - protein, 1441 aa, unidentified
  REGION 1..1441: note = Description of Unknown: Cas Enzyme sequence
MKNILGLDLGTTSIGFAHIVEDENKEKSEIKELGVRIVSLTTDEQSDFEKGKSISTNANRTLKHGARLNLDRYQQRRKFLIDLLQKANLITFASILAENGKNTTHSTWQLRAKAVTERIEKEEFARVLLAINKKRGYKNSRKAKTEDEGEAIDGMAIAKRLYDENLTPGQLSLQLLQQNKKLLPDFYRSDLQKEFDLVWNFQKQFYPDILTDIFYKELQGKGKDVTSKAFSKRYHFDTAENKGSKESVRLQAYQWRAEAISKQLSKEEVAYVLTEINNNLNNASGYLGAISDRSKELYFNRQTVGQYLYAQLQENRHNSLKNKVFYRQDYLDEFERIWETQASFHKELTDELKKQIRDVVIFYQRKLKSQKGLVSFCEFESKEIEIEKDGKAITKNIGARVVPKSSPLFQEFKIWQILNNVTCKRKGIRKKKSSTNPTQLDLFNEPSQTIFSLDMECKQLLFEELNIKGDLKSDKVLKLLGYSPQEWEINYNQLEGNRTQKSLYEAYLKIIEIEGYEVKDILQIKSTKDDWSLDESPLSASEIRERVKAIFQTLGICTKFFYFDPLLPVKEFEEQDSYQLWHLLYSYESDDSTSGNETLYQILEKKYAFKREHARILANVALQDDYGSLSTKAIRKIYPYIKENQYSKACELAGYKHSKLSLTTEELEARELKNIIPLLKKNALRNPVVEKILNQMINVVNALIEKNSERDAEGKITKYFHFDEIRIELARELKKNAQKRYEMTQNINKAKLEHQKISEILQKQFGIKNPTKSDIIRYRLYQELEHNGYKELYTNAPIARDVLFSKNIEIEHIVPKARVFDDSFSNKTLAFKDFNIKKGEYTAFDYITSLNNEEKLNQYLARVENAYKTKSISITKYKNLLKKASEIGDGFINRDLRDTQYIAKKAKEILFQVTKNVLSTSGNITDRLREDWGLVDVMKELNMPKYQSLRLTEVEERKDGNKVTVIKDWTKRNDHRHHAMDALTVAFTKPSYIQYLNHLNARKDENNKNYSVILAIEKKETIKVPTNNGKNKRVFIEPIPNFRQVAKKHLEEIFISHKAKNKVVTKNINKPAGTDKQQITLTPRGQLHKETIYGKYQYYVNKEEKVGVKFDERTITKVSNPLYRKALLKRLQANDNNPKKAFAGKNALSKNPIYLDEAKTKTLPEKVNLAYLEEGFSVRKKIVPKNPTSKEFVPNLTSIEKVVDEGVKHILIERLRAYNNDPEKAFVDLEKNPIWLNKEKGIAIKRITISGVSNAQPLHIGKDHLGKTTLNKEGKEIPVDYVSTGNNHHVAIYRDKEGNLQEQIVSFFDAVVRAQQGLPIVDKTYKQAEGWQFMFTMKQNEMFVFPNEATGFNPAEIDLLDPKNKKLISPNLFRVQTISVVKYGNSVVRDFKFRHHLEATLQDDKILQGITFQQIKSLEPLRNIVKVRLNHLGDIVNIGEY

SEQ ID NO: 3256 - protein, 1552 aa, unidentified
  REGION 1..1552: note = Description of Unknown: Cas Enzyme sequence
MARKILGLDLGTNSIGWAVVNASTDETGKENLSEISAAGSRIIPIDDAVLGKFDSGESVSQTAQRTDFRKSRRLRERCLLRRERLHRVLNLLEFLPEHFAQELDRYGKFVANAEPKLPWRKNADGKFEFIFQHSFNEMLADFQKHHPELLENGKKIPYDWTIYYLRKKALSQAITKEELAWILLNFNQKRGYYQLRGEEEEEKSNERVEIIRAKILSIIQKEKDKQYDKYWYEMSLDNGLTYRAAFYNDVSAWCNETKEFVLKTTTLKDGSEKTELSFLPTPDEIEKLDAKRKGKMYTKIKLRTEKDIDDSHKTVGCYIYDALLANPNQKINGKLVRTIERKYYREELKQILTKQAELLPELQNEDLYKACTEELYPNNEAHRNNITKPDFVNLFINDIIFYQRPLKTKKSLISDCPYESHFDKEGNERPIKCIAKSNPLYQEFRLWQFVQNLRIYQREKMVSDGQLGLFEKSSSGKLQTDVDVTSELLKNEDDYTKLFDWLNDRGSIKQDTLLSSYFKIKKAKGQEQYPYRWNYVEDKEYPCNETRAAILSGLKKCESNAILDEEGEKKLKELWHILYSIDDKNELGKALKKWATKNKLSDPEKFVEAFAKINPFKKEYGAYSEKAINKLLPLMRMGKYWKLDSIDPKTKERIDKIITGEYDENIKDRVREKAIELTDIEHFRGLPLWLACYVVYDRHSEAKEIAKWEKTEDIDAYLKAFKQHSLRNPIVEQVITETLRTVRDIWKQEGHIDEIHLELGREMKNPADKRKKMTENIAKNENTNLRIKAMLMEFMSPEMGIENVRPYSPSQQDILRIYEENALENLSKDDKEYDFVSKISKTAQPSKSEIIRYKCWLEQKYHSPYTKKVIPLSKLFTPAYEIEHIIPQSRYFDDSFSNKVICEREVNLLKGSKLGYEFIKSHHGEKVQISQGEEVEILSVDEYEKFVKEHYAHNRTKMKKLLLTDIPDDFIARQLNDSRYISKVVKALLSNIVREKLPNGEYEPEATSKHLISVNGQITDRLKKDWGMNDVWNRIVLPRFERLNELTGKDCFTALNTEGHTIPNMPIELQKGFNKKRIDHRHHAMDAIVIACATRDHVNLLNNEAANSKNNANRYQLQCKLRRLEQTTINGEKKNIFKEFRKPWDTFTKDAYTALQDIVVSFKQNLRVINKTTNHYQHYDEKGKKVLFRQEKGDNLAIRKPMHKDTVFGEVNLRMKKCVSLDTALNNPKSIVEKELKKKILELLSENKDAKSIKTYFENNKDIWSDINTAKIEVYYFTKQTKERYFATRKDLVSIFSDAPNSQKAQDKIKSITDTGIQKILLAHLKAKDDNPELAFSPDGIDEMNRNIKSLNGGKNHQPILKARIYEKADKFAIGQTGNKSTKFVEAAKGTNLFFAIYESEKIDNKGISAKSRSYATIPLIMVIDSQKKAGKHWKNDVDEKLKANGTIDSTAHLLFMLSPNDLVYLPTDKELNGSVDVAAIDKRRIYKMVSSSGNQCFFVTNHLAKTIVNKVEYSPLNKMERSISGEMIKEICLPLKVDRLGNIIEFNGKKL

SEQ ID NO: 3257 - protein, 1441 aa, unidentified
  REGION 1..1441: note = Description of Unknown: Cas Enzyme sequence
MSKILGLDLGTNSIGWSIRNTILTENQTEKFGVITFNKGVGNSKTGEYSYAAERTKKRSTRRLYQSRKYRLWATLEVLIKEGYCPLSMEGLNKWRHYNKDEAQKNKNAGRVYPKDDVHFDQWIKMDFDGDRKPDYKSPYQLRRALTENAFDFKKEADRYQLGRALYHIAQRRGFKSSRKGSDDVKENAEGTDIDLQYSEKKKNKELIAQFEKYPEAKTIGSLFAYLEDDGVRIRENMAQYAIRENYKDEINRIFEIQNIPFESSLYKGLVETGKNRNDGAIFYKRPLRSQKGLIGLCTLEQETRIDPKTKKPFQVGKYRAPISHPSFELFRAWQFLNNIKYKEENESGKPDKYLDLDLKKEILEEKFFRKSKAYFPFSEIAEFIQKKGYRWKLNYKNKQTVTGCPVSARLKDIFGDDYLNIKIEKSPSPKSKKNYYDIYDIWHVLFSFEDQEFVAAFASEKLKLDDEKTKQFVYAWNALPVGYGMLSINAIEKINRFLFKGLIYTEAVLLANLPSLVGEEVWIKNEEEFLSTIKSIIKENRNEKHIIQVINSLVSKYKSLDQKFGYKDDTYKLDESDVKDITDAIIEHYGENEWLAKYKEDADRIFQTVKDCYQAFFRTKGLKHTEIEGERYFLIPTNGKIYYKADSGFYKQPKLKDTLAAYASEVLNVDVSKLKKIYHPSDISTYPPAMPDENGEIKMGSPKTGSFKNPMAMRTLQELKKLLNYLIGTNQIDSDTRVVVEVARQLNDGNKRWAIETWQRQREAENMEFAAAIDELTRQEGINANSSNESDIDKMRLWYEQNGEESIPEISEKKKEIKGIRWAENKKQSYKEITAKKTAIEKYRLWREQNCICIYTGKHIGISDLFNTNIIDFEHTLPRSKSFDNSLANKTVAFMDFNRTVKKNKIPSQLTKEQYELVLDNIKPWEDKIERIKQQIDFWQTKSKKAADKQWKDDAIRQKHLWKMELEYWSSKVERFKIQEITSGFKNSQLIDTQLISKYAFHYLKTFFEKVDVQKGEVTAIFRKIYAIQPQNFDEKKDRSKHSHHAKDATVLTLIPQAAKRDEILKDYFETIEQGKKFQKIKPYPAFTVNSIFEIDDKVLINSLNNIQFLSKAKKKIRKRGKIQLIKGTNKEKIATGDSIRGQLHQETFYGAIKPAKLDENGKMQKDENGNFIQEDKLKFTVRVPFQYKTKPDTPGFKTWEEIDKQVVDKGLKKQIKQQIDKAGGLKEAFDEGIFMFDGNGNKVNKIRHVRVWASVSEPLAIKKQTYPSSKEYKQYYYAANATNSYFAIYEDEEKTKKGFDFRNLMEVAKTLSVENIRTEKDLFAPFITIKKGKTEKKLDFKYILKPGTRVLFLKDKEDKNALDDTDYFNRLYVYTNYEKDGRLNFKYHLEARNKIEENYSESEIDWNNPKPTLRFGYAKYDFLVEGFDFEMMMDGTLNLK

SEQ ID NO: 3258 - protein, 1524 aa, unidentified
  REGION 1..1524: note = Description of Unknown: Cas Enzyme sequence
MKKILGLDLGTSSIGWALIEHSPENRKGRIIGMGSRIIPMGAELSNFERGQAQTKNANRRIARGARKLNKRYKQRRNKLIYALKESGMLPDQIQLVENFFDPNKIDKISIKPIKKRQPQLTAFDLLELRVKALSEKIELKDLGRIIYKYNQLRGYAGGNAEPDKEDNNDDAENQEKKNESYIAFARVLQLGTPEEVTLKNRKFNKRKISIETDDGILDGETYLDSLKENDSLELQVNIRRSKSGESITVKLPDKTNWRRKMENLEKELKEKSKELGREVYISEYLFDIVKENPRAKIRNNVILRSRYESEFDAIWDSQYKLNEDFKRLVDNETLLTKILCFIFPGTSKTQEQFRAEGLEKGLKHVLKNQIIFFQRELKDQSHLISDCRFEPKEKVVPKSHPVFQEYKIWEQINKLLINTKTETGVNRKGEQKYTYIDRPVPASLKEKLFDDLQNKKEISFGVIYNELKKKYGLREKVDFLNGLNVKAKLKGNETRVMLQKSLGNYLWEALNLDDIERQTELWNILYHGKGNEYDIHSERTSRVLRFLKEYGPGIENAEDTAIRISKIKFSRSYSNLSLKAIQKLLPLVRAGKYFDNEFSNEIHSRIVKLLNENVADPFEKAAQEFLEKNSMVLEEGGIVNAMAVILVYGKHTAKEFTEDELIKTPTGISFIKNGSLRNPLAEQIINETLAMVNDIWRKYGGKPDEIRVELARELKSSAEERAKIYSVNQKNQKANEAVREKLIELKEELSIANIEKYKLWLSQENLQEEYIKNYSDPSKSEVEKLKLWEEQGHVSPYTGQPIPLSHLFNKARYDIDHIIPKSRYFDDSFTNKVICEKAVNTDKGNRTAMEYFETGSMTQKIFSKDDFIDHANKLFTGKKRKNLLATKVPEDPIQRQIKDTQYIAVKVREELNKIVGNENVEATSGGVTDYLRNHWGLTDKFKSMLKGRYENIQPKLSEIAYNEYVKNIQTKQKEYAEKNIPFNDIVLNNELFVEKFNKEFIKKKNNKLVINGWSKRIDHRHHALDALIIACTQPAHIKRLNDLNKVLQDWLKENKETFLPDFNGSKTELLDEVLNLDENKRKSIFKELDKFTDIQIPWQGFVEEAEEGLKQIIVSHKPKDKLLLQYNKKGNRQIKLRGQLHEGTLYGKTNGRESYRIPLLKLAGKNFATEKTIGKIVDPFLKKQIREHLNQYKGKKDEAFSAEGILDLNNKLAERRGKNNNPAPHTPVSTIKIYYKDPDKNKNANDEEIITLQKLDRSKAFNNSLYVKTGDNYLFAVMEKDHFNKKTGQTEKKRVFDLITFFDAANLLKEEFNKSSDKNTFDKDLLFKKYFEEKNQAKLLFTLKQDDFVYLPEENEDVVFDKESPLFDDFWNDSGARSKNIYVVQKFSGKQIYFIKHTVADMIKKKVEFGSQDCYETANGKSIKDHCFKLHVNRLGEITDIINHDEIAESFKQRQSSVVHEPEVVFQTKKVQFFDSLSEMDNEDARCMAVSPPEQHLKNATELNRNIFQEKLSHPMDKKLRFRE

SEQ ID NO: 3259 - protein, 1252 aa, unidentified
  REGION 1..1252: note = Description of Unknown: Cas Enzyme sequence
MKTILGLDLGSASIGWALINENNNKTSIIDLGCRIIPYEGTEGKDFAKGTGESKNALRTKARTARRGYDRYQLRRKYLVNALVKVNMYPDEALRNLPKNELWALRSKAVHSQITLKELGRLLLWLNQKRGYKSSRSDANLGKKDTEYVSLVKSRHEKIKELNLTIGQFFYNELSKNPYFRVKDNIFPREAYIEEFDTICNTQKSFYPDVLTENFISRLRNEIIYYQRPLKSQKGLVSVCEFEGFWKVGQDGKEYFVGPKVAPKSSPIYQLSKMWENINNIKIGTRNGQNIELTIEQKQAIFHHLDNNEKLTVTDLLKILHLNRKDCFINKQIEKGILGNITKHAIQQCFDKTEEYNHLLSLNLNIIETERQGYLIDKKTGEILNEKPIRYIDSNIEKEPFYQLWHTIYSIQDTQECSSALQTRFNIEPDVADKLAKIDFNKQGFGNKSTKVIRKILPYLMEGNKYNEAMSYVGYEHSNSLTKDENLKRKLLDLLKPIEKNSLRQPVVEKILNQMVNVVNVIIEKHSEKDENGNIIKYFKFDEIRVELARELKQSKEERNETDKAMSKRQRENENIAKRLAEYGLRATRNNIIKWRLYEEINNEEKKLNAICIYCGQPISLTEAIKGDNIDIEHIIPKSKLFDDSQSNKTLAHRHCNATKSDRTSYDFMKSKPAEVFEAYVERVNSLYSNFIINKAKRDKLLMPEEKIPYNFIDRQLRESQYIARKSREILQTICHNVWATSGSVTAELRHLWGWDDVTMNLQFDKYKELGLTEIVEWESEHGKNKHQKEVISGWSKRDDHRHHAVDALTIACTKQGYIQRFNTLNAEKTREDMKSAIEERSVVFNEKRSLLEKYIISEQPITVSEVENAVSNILVSFKPGKKVASTGKRKIGKRGNKKVVQTGIIIPRGALHEESVYGKIKTIDEKKPIKYIFENSHLILKPYIKQLVEDRIEKHNGDVKKAIASLKKEPIFLDDNNEVELKYASCYKSEYVIKYPVDTSFNKTDKVVDKKIKAILLQRLNKFDNKHKEAFKDVLLEDKLIIPWYEDEGLERPIKTVRCFTGLSAVIPIKKDKNGQDISFVKPGNNHHIAIYTDRDGNKIEHVCTFWHAVERKKYGIPIVIKDSSEVWDKIQMLPENSFPESFLEKLPEVHLRLELSMQQNEMFVLGMKKEEINTAIASNDKTAISDNLYRVQKLSEKNYMFRHHLETQIIDDENSKTSKRYINVRSLGALFNLNPYKIKINILGDIQTEEI

SEQ ID NO: 3260 - protein, 1452 aa, unidentified
  REGION 1..1452: note = Description of Unknown: Cas Enzyme sequence
MKNILGLDLGTNSIGWAHVIEEESPENSSIVQIGVRVNPLTTDEQTNFEKGKPITTNADRTLKRGMRRNLDRYQLRREHLIDALRKANIITAESKLAEDGKNTTHETWRLRAKAVSEKIEKDELARVLLAINKKRGYKSSRKAKNEEEGHAIDGMAIAKRLYEENLTPGQLSFQLLLEGKKKLPEFYRSDLQAEFDKVWNKQRAYYPDFLTEELYIALKGQGKENTRKRILAIANVYTADIKDMEDGLKNEKTITLPTREKKKLQAYKWRNDAVTQQLSQEQVAFVLTEINNDINQSSGYLGEISDRSKELFFNKLTVGQHLYNQLLQNRHIRLKNQVFYRQDYMDEFEAIWEEQRKHHPELTDELKEEIRDIIIFYQRKLKSQKGLISFCEFESKEVVINGKKSTIGARVAPKSSPLFQEFKIWQNLNHVLVRKKGSKKRKAQDIQTLFPEEAEVWELSFEEKETLFEELNLKGNLSSARIIEILGDKPADWEVNYSQLEGNRTNQALYNAYLKILEIEGYNEDLLKLSDKDDINVADLKTPAREIKAMVKSIFEVLGIDTEILEFNAELDGKAFELQKSYQLWHLLYSAEDDDKKYSEEDILTYGQEHIGLKKKLCEKFGFQPEHAKILVNVSFQDDYGSLSTKAMRKIYPYIKETKYSTACELAGYRHSKDSITKEENEQRVLKDKLELLPKNSLRNPVVEKILNQMINVVNALLDKNRKTDPNFKFDEIRIELARELKKNASERAEMTSQINKAKGENEKIVETIRKDFGILNPTRNDIVKYKLYQELAFNGYKDLYTNTKIDYLELFNKAYDVDHIIPQSRLFDDSFSNKVLVPRQANLDKGNRTAYDYMATKSKEAFERYLAAIESLYKEDKISKAKYQKLLKQESKIGDGFIERDLRDSQYIAKKAKEILSQITRHIVSTSGSITDRLREDWGLINVMKEINLPKYRALGLTEFEERKDGNKVEVIKDWTKRNDHRHHAMDALTVAFTKRQYISYFNYLNARYNTTHKEHQNIKGIEEKFTEWKYDDQGNKKRVFKLPIPNFRQLAKEHLESVLVSHKAKNKVVTRNKNITKSKKGELVKIELTPRGQLHKETIYGKYHYYESKEVKIDGKFDEATIAMVAHPLYKKLLLERLQANDNDPKKAFTGKNALSKNPIYLDEARTETMPEKVKLTWLESDYAIRKDITPENFKDEKSLEKIIDHKVREILRQRLKEYGDAKKAFSDLDKNPIYHTNGHVIKRVRISGVKNAEPLHFKKDHLGNYLLDERGERIPVDFVSTGNNHHVAIYRDAKGNLQERVVSFMEAVLRKNYGLPLIFKNPIEDIDLVLNKGIKEELILSNLPEKDWEFLFTMKQNEMFVFPNDQTGFNPQVIDLLDPQNKKLISPNLFRVQKIANGDYWFRNHLETTVEAKSELKGVTYKRCSLIGIKGIIKVRINHLGDIVQVGEY

SEQ ID NO: 3261 - protein, 1386 aa, unidentified
  REGION 1..1386: note = Description of Unknown: Cas Enzyme sequence
MKKVLGLDLGTTSIGWALVNEAENSEEKSGIIKLGVRVNPLTIDELTNFEKGKSITTTADRTLKRSMRRNLQRYKLRRDELIKILKDKEFISDSTVLSEEGNHTTFQTYKLRAKAVSEKISLEELAKVLLMINKKRGYKSSRKAKSNDEGALIDGMEVAKILYNENITPSQLCLRLIKEGKKYLPDFYRSDLKAEFDKIWEFQSKYHPEILTSEFKEQIFGKGKLNTSKIFLAKYNIFTLDLKGKDRREALYKLRVDSLDKELTKEELALIISDINGSISNSSGYLGEISDRSKELYFNRLTIGQYLINELDINPNYSFKNKVFYRQDYLDEFESIWETQSKYHQILTEDLKQEIRDIIIFYQRRLKSQKGLLSFCELESKIFYCKDSGKKKISGPRVCPRSSPLFQEYKIWQILNNLEVSLKSHKSKRTNLDFEKRLLYLEEKQVLFKELTLKDKLSKEEVLKLLFENHTDLDLNYLNIEGNRTLSSFIDVCQKIIEHSGHGEYNFSKLKTDEILNIIDEVFQGLGYKTDFLKFDSSLDKNEYENQPSHKLWHLIYSFEGDSSNTGDENLINKISTITGLDKDFARLFANISFTDDYSNLSSKAIRKLLPYMKDGNSYDTACLLAGYKSHSKSSLTKEEIDSKQLLNKLEILPKNSLRNPVVEKILNQMVNVINQVIDTYGKPDEIRIELARDLKKNAKQREELTKIVSQQNAEHEKIKKIIQQEFGFTYVSRNDIIRYKLYEELKLNGYHTLYSNQYIPREKIFSKEYDIDHIIPQSKLFDDSYSNKTLELKSINIEKGNRTGYDFVYEKYGEDGAHRYLSAIDKLKASDSITRTKAKKLTIRESEIPEDFIERDLRDSQYIAKKAKDMLLNLVKTVISTSGSITDRLREDWQLVDVLKELNWDKYSALGLTEVIEGRDGQRIYKIKDWTKRNDHRHHAMDALTVAFTRLSHIQYLNNLSAKSDKAGSIYGIAQKELEKDSKGKLRFKSPIPLEEFRSEAKMHLENVLISIKAKNKVVTKNINKTKTSGGYNKKVQLTPRGQLHNETIYGSSQKYKATLLKVNGSFNEELIGKVSKKIYREALLKRLSDFGNDPKKAFTGKNALDKNPIYLDDTKSIILPEKVKIVEFENVFTIRKEVSPDLNIEKVVDPKVKEILKLRLAEYQNDAKKAFSNLEENPIWLNKNKGISIKRVTITGVNNAIALHDKRDKNGELILDQNGNKQPVDFVNTGNNHHVAIYKDADGNLQEEVVSFFEATMRASQGMPIIDKQYKQSEGWTFLFSMKQNEYFVFPNEKTGFNPNEIDLLDPSNYKLISPNLFRVQKISSKNYMFNNHLETVAVSGDILKEKKELSNITYRSIRSTLYLENIVKVRIDHIGQIVQVYEY

SEQ ID NO: 3262 - protein, 1223 aa, unidentified
  REGION 1..1223: note = Description of Unknown: Cas Enzyme sequence
MKKTEQILGLDIGVSSIGLAIIKVINGIKSIEKLSVRIVPEDPNFHGKFYTGNTASKNLDRTLKRGIRRNNQRFKARRDELYAALKANNMFPSEANFDLEVKELYGLRASAAEKKISRQELGRVLVLLNQRRGFLSNRKSISAEENSSEYKERIALLEKELEGRTIGQQLFKELSEAENTFDILLRERIYQRSSYIEEFDRIWLTQKKYHKTLTGGPNEHNNKATLYNKLRNKIIYYQRPLKSQKGSVSNCLFEKHHKSVTKSSPYFEIFRIWQKINDLKVTMNNGDDIFPTQEQKEKLYHSLFYGENLNKKNELTVTAIKKLLGLKRNEGYLNFTEILGSNTYNKLKNALAKAGIKNPEKHLAFDPYKQNEAKGLLELWHITYSIPNEKDVKNTLVKRFGFTQKQSALIAEQVGYKSDYGNLSTRAIKKLLPSLQKGLGYSEACDAIGYDHSGYKTEIKLKKQLEPIPKNSLRNPVVEQILNQLVNMVNLAVAEYGAFDEIRIELARELRNSAKTRERITKSNSANKRRSDWIRNELKDNYGFKIVNGRDVKRYKLWEETNKQCLYCNKPINKTDLLSGSAEIEHILPRSRSFSNAMSNYILAHRKCNSTKGQRTAYDYLESLGTDRLSGYIEHVNKLYQDGKGTISKGKFDNLLCKGENIPTDFVDRMKKDSQYIAKVAVKMLKSICTNTYTTTGQITDLLRHEWKLKSVLQELSFDKYKAIGQTTTKKIKDAQGKEKTIEIITNWTKRDDHRHHAVDALICALTDQKIIFKLNNLNKLYQYHKNELSTAELEELEKNLGGKFSFKEFSEHQGNIYDCPIKNIREVTKKHLEELFISFKKDNSKVLTHNENVIKNGDPQSTWVPRGRLHEETVMGQIRRISEKPIKLNTKFPLEAIPNIVSPIVKKLITKRLVEYDNKVKLAFDTKQLKKNPIKYKGDALQEVKIWEDVSTKRVEIESFFADGQKSKSAKIKLIENASKLDKAIGNALSERLKMNNNDFKRAFSELDNHPVKLKNGKTIKSITVYAESKAIAVGRKRDNRGKAILNENSHPIPANFVKTGGNHHALIYIDRKGEYHNEVVTFWDAVAIGLLNIEQTGKPYPIINRKEHSEFGRLKFSMQINDLFVFDLKHARNPQEENEIDFLENKNRKQISQQLYRVQKMSKKKTGAFEVTYRHHLEATIDRSSSNLKGITWQEHGSKNHFARLTKVRLNHLGEIVKVGE

SEQ ID NO: 3263 - protein, 1178 aa, unidentified
  REGION 1..1178: note = Description of Unknown: Cas Enzyme sequence
MKKVLGLDIGVNSVGYALIANDINDNSLKILKTGVRIVNEDPNFHGNFYQGKSASKNEARRTKRISRRRNQRFKARRDALYRTLRKSSMFPPEELLNHVSERTLYRLRAMAVSERLTLEEIGRVFIHMNQRRGYKSSRKKGKKTEKGSYLTNIAELEELTKDLTIGQFWDAYINFKSNNTDKIPIVLLNWFRLKTETKPDFRIRENIFPRDSYISEFDKIWECQASFYPTVLTGMPGKTFRENKGTLYQKIRNEIIFYQRKLKSQKHLVSDCSFEKRHKVAPKSSPFYQEFRIWQQINNLEVTDLSNNKMPIESKGRKQVFDALHNTDRLNKRNTLPYTAILKILGYSGRSYHLNYNMLEGNKTYFTIFNALKKAGIEQPDKYLSFDNTQKKVSTGLYDLWHITYSLDDESDVIKTLVKRYGFTYTQAEIIANDVGYTSDYGSLSTRAIRKLLPHLEEGKNYYEACVAVGYQNPEHVQREEFKIHMDRIFPNSLRNPVVEQVLNQVVNVVNGIIDTYGHIDEVRVELARDLKNNAKQRQELTQKNSNLRKLNKTISLRLKQEHGFSRVSRSDLLRYRLWDETEKRCLYCGQNITVSQLYNGEAEIEHIIPWSRSFNDAMTNKIIAHGKCNRDKDQMTAYDYMASKGDAELARYVTDVNRLFTEGSGRLDSEKKVKITRAKKENLLCKGSDIKGDFLARQLKDTQYIVLETVTRLKDVFPKVTTTTGSVTDYLKETWQLKNLIDEMNIDNYRTVGETEWREEKDRENGFKKVERIKNWSKRDDHRHHALDALVVALTTQRIIQRINNANQMFKTTREMKEKTFGFPPPAPDLRRIAKGSLGEILVSFKKPGSKVLSRKVNMINTSKGKKEQVTWVPRGSLHEDTILGISRWYEKVKVNKKLDKKTASKIVGEEVRKAVLDRLATFKGDSSKAFRKPVSLGEKEIKEVTILSTRFTKRVELLKGISLAQVEKIVDPTVKKLVRERIETKGGIKQAFRDYLNDPIWQNAEKGIMLKHVTVFDDGNLESVRNGYAYTKGNHHALIYADENGRYFDHIVSFWEAVSNCLVNLDTTGSIYPVIDRRDKGNHKFVFSMQINDLFVFDVNPEEVNFFDPVNKPLLAKNLYRVQAMSKGDYLFRHQYEATVQKNYDFTHKRIRSMEKLKDAVKIRVNHLGDIIKIGE

SEQ ID NO: 3264 - protein, 1178 aa, unidentified
  REGION 1..1178: note = Description of Unknown: Cas Enzyme sequence
MKKVLGLDIGVNSVGYALIGSDTEDNSLKILKTGVRIVNEDPDFHGNFYQGNSASKNEARRTKRMIRRGNQRFKARRDALYRTLRKNSMFPSDKLLNRVSEGTLYRLRAMAVSERLTLEEIGRVFIHLNQRRGYKSNRKSEKKTEEGSYLANIAELGELTKDLTIGQFWDAYISFKSNNIDRIPIVLLDWFRFRTETEPDFRIRETIFPRDSYISEFDKIWECQASFYPTVLTGMPGKTFRENKGTLYQRIRNEIIFYQRKLKSQKHLVSDCSFEKGHKVVPKSSPFYQEFRIWQQINNLEVTDLSNNKMPIESEGRKRVFDALHDTDQLNKRNTLPYTAILKILGYSGRSYHLNFNMLEGNKTYITIFNALKKAGIEQPDRYLSFDNTQKIVSKGLYDLWHITYSLDDESDVIKTLVKRYGFTYNQAEIIAGELGYTSDYGSLSTRAIRKLLPYLEEGKNYYEACVTVGYQNPEHVQREELKIHMDNIFPNSLRNPVVEQVLNQVVNVVNGIIDTYGHIDEVRVELARDLKNNAKQRKELTKKNRNLRKLNDTISLRLKQEHGFSRVSGSDLLRYRLWDETEKRCLYCGQNITVSQLYNGEAEIEHIIPWSRSFNDAMTNKIIAHSKCNRDKDQMTAYDFMASKGEAELGRYVADVNRLFTEGSGRLDSDKKVRITRAKKDNLLCKGSEIKGDFLARQLKDTQYIVLETVSRLKDVFPKVTTTTGSVTDYLKETWQLKSLIDEMNIDKYRSVGETEWREEKDRENGLKKVERIKNWSKRDDHRHHALDALVVALTTQGIIQRINNANKMFETTREMKEKTFGFLPPAPDLRRKAMESLGEILVSFKKPGSKVLSRKVNVINTSKGKKEQVTWAPRGSLHEDTIFGICRWYEKIKVNKKLNEKTASQIVGEEVRMAVLERLATFNGDSSKAFEKSLFLGEKEIKEVTILSTRFTKRVTLSEKITPAQVEKIIDPTIQKLVRERIESKGGIKQAFRDYLNDPIWQNTEKGIMLKHVTVFDDGNLESVRNGYVYTKGNHHALIYSDANGRYFDHIVSFWEAVSNCLVNLDTNGSIYPVIDRRDKGNHKFVFSMQINDLFVFDVNPEEVNFFDPVNKPLLAKNLYRVQAMSKGDYLFRHQYEATVQKKYDFTYKRITSMDKLKGAVKIRINHLGDIIKIGE

SEQ ID NO: 3265 - protein, 1539 aa, unidentified
  REGION 1..1539: note = Description of Unknown: Cas Enzyme sequence
MKKILGLDLGTNSIGWAVIEHDFENKEGNILGLGSRIIPMTQDIINDFGKGNSVSKTADRTRYRSVRRLRERFLLRRERLIKVFKKLGWINLNFDPQTDKISYQLNPVTSNYDFQFEESYHEMVELFAKNHKTEIKIPKDWTIYYLRQKALKEKIKPEELAWVIMQFNQKRGYYELRSETEEHGDDNKEFVKSVITGIIDTGEKRGKNKILEIQLENGMTGLLSRTSIPDWIGQEKELIATKRELKDGTENISFSFPEKDDWTLRKKKTESLIDSKQKTVGEYILSILIKNQKAKIRGKEVHTIERMYYKKELIEILKKQSELHTELNDRNLYLECVKMLYPNNEAHRNMLSLQNFVWLFVNDIILYQRPLKSKKHLIEGCKFERRYHVSNGELVETKVKAIAKSNPLYQEFRIWSLIHNLRVEKIQEIVDGKIKHNVDRSAEFLTPENKEKLYKIFNESAEVSQSKTLKALGLTEKDYQLNYEEGKKFPGNETLSKFIAGFKKADVLREGMAFLSTPDKTEKLWHILYSLEKKEFVRKALENPNLSFPAEAVEIFAAMPAFKKDYGAYSAKALKKLLPLMRTGSYWSEDDVETIVPKFLEWKNTNDFAGLSSKLKGQLDRLEALDEFSGLSLTLAEYVAYQLHSEDDEQLIYKSPDEIKRLKQHSLRNPIVEQVINETLMVVKDIWKKHGKPDEIHLEMGRDMKNPANKRKEMTDKRNENERINRRAKAMLMELKKENGGINPFSVGQLELFKIYEEGALSFGGEIETEIFQISRKEDPTPTEINKYKLWLDQKYRSPYTGKPISLSAIFTKDYEIEHIFPQSRYFDDSFNNKVISETEVNREKGNQTAFEFISNQGGQKILLSSGETVTVLFVDEYVELVKRNFRQNRSKLKNLLSYDIPESFILRQLNDTRYIAKEIKKYLAPIVRLENEKEATPVGLIPMVGSITDRMKEDWGMKEVWKQILIPRFQRMNELTGTDDFYTERTDNSGNRQIILSGHKESLKRLDHRHHAMDALVIAAITRNHIHYLNSLESEKENFALIKKLKGYNTHNHPNKNYLKPWKTFTTDVRQALEKTVVSFKNTNRVLNRGQNKSVKWSTSEAHPKKKMTSQSPENLWAIRQPLHAETVYGKIELRQYKQVSLHNALADYKTIADKQIRNQIRVLMKSYQNDLKKVKDHLKENPIMQNGKEVKAVMVFYTEEFSATRKEIGISFNEKMIEKVSNQRIRQILKSHLDKYDGDPEKAFSPEGIEEMNSGLHHPIFKVRVYEAMGKKFQLGVKGNKASKFVEAAKGTNLFFVVYENIETGQRMFNEDSSLALKDVIELQKFGLPIAEEKPGYRWFTLSPGDLVYVPECDENGRVIEDVNTIDWSNLTAEQVRRIYIFEKSSKSQSYFLPYAIAGLVKDYDAKDKFGEFGSQNKVEKNDQGVNIRFVCIKLIHDRLGNVSPASYDSENTYKNRSVESGNEVNEPQMTYSGARISFFNSLEEENEATAKYMAVRTPEESFQAANMIITAMYRKELENTNKPYTNITFLNDGLSD

SEQ ID NO: 3266 - protein, 1440 aa, unidentified
  REGION 1..1440: note = Description of Unknown: Cas Enzyme sequence
MTKNILGLDLGTNSIGWALIKQDFENKQGEILGMGSRIIPMGAELSKFEQGQAQTKNANRRIARGTRKLNKRYKQRRNKLIYILQGLGMLPDQIKLVNQFSDPNKLDKISILPISKNQQQLTAFDLLELRVKALTEKIELEELGKVIYKYNQLRGYSGGNSEPEKEENNEDESEENEKTNDSFVVFSKVLSLGLPEEITFKGKKLSKRKIAIETEDGIIEAETFLDSLKENDSLELHVNIRRAKSGDTITIKLPSKTSWRKKMENIEKQLADKSKELGREYFISELLFDILKENKWAKIRNNVILRSRYESEFDAVWSEQSKYYPILNHLETDRLQKILEFIFPGQKESQEKLRQTGLKEGLKYVIKNQVVFYQRELKDQSDLISNCRYEPTEKVVAKSHPVFQEYKIWEQINKLVINTKIENGVNRKGEIRYKYIDKPIPTALKEWLYEELQSKKEVSFNPILTKLKKEFKLRENVDFLNGMNAKDKLKGNETKVILQKALGELWNIFGLDDSERQVELWEILYNGKGNEYDLTSERTSNILAFIEKYSSDLENKNDVAIKISKIKFSRNYSNLSLKAIDNILPLVRAGKFFDQNFSEALSHKIVKLLNENVEDPFEKSAQEFLDKNQDVLSDGGIVNAIATILVYDKHTAKEYSGDELIKEFTQISRLKQGELRNPLAEQIINEALVIVRDIWRKYGFKPDEIRVELARELKNNAVERGKMYSANLKSQKHNAEIRNKLIELKQEISIANIEKYKLWVSQENLQEVYLKNYNDPSKSEIEKLKLWESQGHISPYTGQPIPLSELFNRERYDVDHIIPRSRYFDDSLSNKVICEKSINNEKGNRTSMEYFEVGSVNHQVFTKDEFIHHANKYFSGKKRKNLLATAIPEDPIQRQIKDTQYISIRIREELNKIVGNENVKTTTGGVTDYLRNHWGLTDKFKVLLKERYETILPKLAQLEYDKYQKEIEIKAKEYENAGIEFNEPILDEEIFIKKFKNEFIRKKNNKLIIKGWSKRIDHRHHAMDALVIACTQPAHIKRLNDLNQVLKEWLDKNKEKFFPGFNGTKTELLDEVLNLEEEKRREIFNQLEKFRAIEMPWNGFPEESELKLKEIIVSYKPKDKLLLQYDFRGNRQIKLRGQLHEGTLYGLSGGKEIYRIPISKLAGKKFATEKTIEKIVHPFLKETISDHLKTYGKKEDAFSAEGILDLNKKLSERKDEQGNSKPHPPISTIKIYYKDPTKSKKKTDDEDNISLQKLNRQKSFNNSLYVKTGDNYLFAIMEKEVFNKKLKKNKTERHYDLITFFDSVNLLKSEFNASDDKKNFNKEELFKKYFEERNNARLLFTLKQGDFVYLPDDNEEVILEESSPLFIDYWSNTSERSKNIYVVQKFSGKEVYFLKHTIANTIVKKIEFGSQDCYQSLNGKSIKEFCLKINLDRLGNISKA

SEQ ID NO: 3267 - protein, 1440 aa, unidentified
  REGION 1..1440: note = Description of Unknown: Cas Enzyme sequence
MTKNILGLDLGTNSIGWALIKQDLENKQGEILGMGSRIIPMGAELSKFEQGQAQTKNANRRIARGTRKLNKRYKQRRNKLIYILQELGMLSHQIKLVNEFSDPNKLDKISILPISKNQQQLTAVDLLELRVKALTEKIELEELGKIIYKYNQLRGYSGGNSEPEKEENNEDESEEKEKTNDSFVTFSKVLSLGLPEEITFKGKKLNKRKIAIETEDGIIEAETFLDNIKENDSLELQVNIRRAKSGNTITIKLPNKTSWRKKMENIEKQLADKSKELGREYFISEQLFDILKENKWAKIRNNVILRSRYESEFDAVWSAQSKYYPFLNHLEKDRLQKILEFIFPGQKESQEKLRETGLKEGLKYVIKNQVVFYQRELKDQSDLISNCRYEPTEKVVAKSHPVFQEYKIWEQINKLVINTKIENGINRKGEIRYKYIDRPIPTALKEWLYEELQSKKEVSFSPILTKLKKEFNLRENVDFLNGMNVKDKLKGNDTKAILQKTLGELWDMFGLNDSERQTELWEILYNGKGNEYDLTSDRTSNVLAFIEKYSPYLENKNDVAIKISKIKFSRNYSNLSLKAIENILPLVRAGKFFEQNFSDVLSQKISKLLNENVEDPFEKSAQEFLDKNQDVLSDGGIVNAIATILVYDKHTAKEYSADELVKEFTQISRLKQGELRNPLAEQIINEALIIVRDIWRKYGFKPDEIRVELARKLKNNAAERGKMYSANLKSQKHNAEIRNKLVELKQEISIANIEKYKLWVSQENLKEEYLKNYNDPSKSEIEKLKLWESQGHISPYTGQPIPLSELFNRERYDVDHIIPQSRYFDDSLSNKVICEKSINNEKGNRTSMEYFEVGSVNYQIFTKDQFIDHANKYFSGKKRKNLLATSIPEDPIQRQIKDTQYISIRIREELNKIVGNDNVKTTTGGVTDYLRNHWGLTDKFKVLLRERYEKVLPKLAQLEYDNYKKETEKKFTEYENADVAFKEPILDEEIFIEKFKSEFIRKKNNKLIIKGWSKRIDHRHHAMDALVIACTQPAHIKRLNDLNQVLKEWLDKNKEKFFPGFTGTKTELLDEVLNLEEEKRREIFNQLEKFRAIEMPWNGFPEEAEQKLKEIIVSHKPKDKLLLQYDIQRNKQIKLRGQLHEGTLYGLSNGKEIYRIPLSKLAGKQFATEKTIEKIVNPFLKKVIEEHLKSFGKKEDAFSAEGILDLNKKLSERKDEQGNSKPHPPISTIKIYYKDPTKSKKKTDDEDNISLQKLNRQKSFNNSLYVKTGDNYLFAVMEKETFNKKLNSNKTERHYDLITFFDAANLLKSEFNASNDKKNFNKEDLFRKYFEEKNNARLLFTLKQGDFVYLPDDNEEVILEESSPLFIDYWKNISERSNNIYVVQKFSKKQIYFLKHTIADTIIKKVEFGSQDCYEKIGEKSIKEFCFKINSDRLGNISKS

SEQ ID NO: 3268 - protein, 1449 aa, unidentified
  REGION 1..1449: note = Description of Unknown: Cas Enzyme sequence
MKRNILGLDLGTTSIGFAHIIESSTAEDSQIIQIGVRVNPLTTDEQTNFEKGKPVSINADRTLKRGARRMLDRYQQRREHLIDTLIKANIITKETILAEDGKSTTFETWRLRAKSVTEKIEKTELARVFLAINKKRGYKSSRKAKNEEEGQLIDGMAIAKRLYEENLTPGQLVYQLLKEDKKLIPDFYRSDLQSEFDKVWNFQKQFYPEILTDEFYLDLKGKGQRATSAIFWTKYGFNTAENKGNREEKKLQAYKWRSEAVSLELTKEEVAYVLTEINSNLANSSGYLGAISDRSKELYFNKETVGQNLYRQLQLNPHTRLKDQVFYRQDYQDEFEAIWKEQSKHHPELTDELKSEIHDITVFYQRKLKSQKGLVSFCEFESKEIEIEKNGKITKKTIGLKVAPKSSPLFQEFKIWQVLNNVLVRKKGSKKRTVKKESQPSLFEEEKEVFAFDLETKQKLFEELNLKGNLKASKIIEILGHKPSEWEINYAELEGNRTNKALYDAYLKILEFEGYDEDLLKLQGKDDINVSELKASACEIKDMVKHIFEVLHINTEILDFNAELEGKDFEKQPSYQLWHLLYSYEGDDSPSGNEKLYELLEKKFGFKKEHGQILANVTLSDDYGNLSTKAMRRIYPHIKEQTYDKAAALAGYKHSASSLTKEEIENRPLKDKLELLKKNSLRNPVVEKILNQLVNVVNTLIEKNKAIDPDFHFDEIRVELARELKKNAKERAEMTTNINAAKIAHDKIFKLLQTEFGVKNPTRNDIIRYKLYEELKNNGYKDLYTNTYIPREILFSKQIDIDHIIPQAKLFDDSFSNKTVIFRQTNLDKGNKTAFDYIESKFGEEKLEEFKLRIEALYQSGQKSKEEGISKAKYQKLLKKESEIGEGFIERDLRDSQYIAKKARNLLYEICRVVTATSGSVTDRLREDWGLVNIMQELNFEKFKSLGLTEMVEKKDGTFKERIVDWSKRNDHRHHAMDALTVAFTKKSFIQYLNNLNARRSNQFNEGIRNTEDQKSIETSNLKISTRDVMGIEQKELHRDEEGKLRFNLPITNFRKIAKEHLENVLVSHKAKNKVVTKNKNKIKSKNGERVKVELTPRGQLHKETIYGKYQYYVNKEERIGAKFNKETIEKVSNPVYKKLLLQRLSENGNDPKKAFGGKNAFSKNPIYLDETKKEIMPETVKLTWLEEDYSIRKDVTPENFKDIKTIEKVLDAKVKQILLDRLKEFGGNPKLAFSDLDKNPIWLNKSKGISIKRVTISGVKNVESLHFKNDHLGNDILDEQGNKIRSSFVSTGNNHHVAIYRDEKGNLQDKIVSLFDAVQLVNAGEQIIDKQYNQGLGWQFLFTMKQNEYFVFPNEKTGFNPNEIDLLDPKNKKQISPNLFRVQKLSKVEYGNSSVREYVFRHHLETTVDEKKELKEITFKNIKSLGYLKNAQKVRINHLGDIISVGEN

SEQ ID NO: 3269 - protein, 1525 aa, unidentified
  REGION 1..1525: note = Description of Unknown: Cas Enzyme sequence
MSVKRILGLDLGTNSVGWSLVDYESKKILGLGSRIIPMTQDIKDEFGKGNSVSQTKDRTSFRGIRRIRERHLLRRERLHRVLYVLGFLPEHYANEIDFEKRLGKFKAETEPKISWKKNDNGKFGFLFQNSFNEMLNEFKALHPDIKIPYDWTIYYLRKKALSQKITKEELAWIILNFNQKRGYYQLRGEEEDYETKGNIKEFVEKLKVVKIEKGEVDKKNDKRTWYNIILGNGWIYSATFTSEPLWLNTEKEFLITEEYDDNGEIKIVKDKRKDVEGKEKRKITPLPSFEEIDLMTKKEQDKIYKKIKVRTELTIRNSNKTVGEYIYESLLENPKQKIRGKLVRTIERKFYKDELKAILQTQKDLQPELFTDELYNDCVRELYRNNEAHQLELRKRDFVHLFVEDIIFYQRPLKSKKSSISNCTLEYHIYKDKEKKEIEKKQYLKAIPKSHPLYQEFRIWQWMYNFKMLKRENNKDVSNEFINNIQDSEQFFEFLMTQKEVNQKDVLTYFLQPKVKALYPDAKPKAFKEALEKEMAKYRWNYVYDEEKDESKSYPMNETGYDFRRRLEKVANVPEGFLIKEKEIQLWHIIYSVTDKTEYEKALKKFANKNHLDVTTFVENFIKFPPFKSDYGAFSEKAIKKLLPLLRLGKYWNWDVIDDKTQKRIANIINGEFDEKMRNRVREKAEKHQLKSENDFQGLPLWLAQYVVYDRHSENENNGKWNSVDDLKKYLEEFKQHSLRNPIVEQVVTETLRVVGDIWEKYGNGAKDFFDEIHIELGREMKNTAEDRKQITNAVRENENTNQRIKALIAELKNDSNIKEVRPHSPSQQELLKVYEDGVLNSGEEIPDYVNEILKKFKESDVKKRPTSSEINRYKLWLEQKYRSPYTGNIIKLSDLFTHKYEVEHIIPQSRYFDDSFSNKVICESAINKLKDKQLGLEFVKNHGGEIVQDGKEQFRVFTESEYKDFIKQHYSKNRSKRNKLLLEEIPDKMIERQLNDTRYISKFISNVLSNIVRKEDGNDEEARSQNVLPGNGKVTGILKQEWGLNDVWNEIILPRFERMNGLTGTTQFTTQNTNGKTIPAIPMELSKGFQKKRIDHRHHALDALVIACATREHIQYLNNENAKSQKYHLQMGLAKKLRKMETIEVNKWKKNENGVLVKSDEKIRKEVPKDYIKPWETFTQDAKRELEKVVVSFKQNLRVINKTTNKYEKIVEENDKKVKKLVPQTKGDSWAIRKPMHEATVSGRVSLSWIKLNKGEIVTATRTSLDKTFSKEKILKITDTGIQNILANYLESKDNNPELAFSPEGIDELNSNISKFNNGKYHQPIYKVRVYEKGSGRFQLGEKGNKKDKYVQGAPNLFFAVYENIETKKRMFDTVPLNEVIEHQKQQVAENVNKTDKTTILKKKYLIERNKEIEVKYLFHLSPNDFVYVPMKDENIDEIDFKNLSKEQLKRIFVVNDFSGKTCYFRPNQIAQSIAPKEVDLSFDLKKNKLIGSFDIKTASFEGVQIKDFCIKININRLGNISKA

SEQ ID NO: 3270 - protein, 1415 aa, unidentified
  REGION 1..1415: note = Description of Unknown: Cas Enzyme sequence
MVKNILGLDLGVASIGWAFVQEDNENIENNKIIKLGVRVNPLTVDEQINFEKGKPITTNAGRTLARSARRNLQRFKLRRANLIEILTKNNILKETDLLTEDGKNSTFQTQEIRAKSARQKIELAELARVLLLINKKRGYKSSRKAKNEEDGQIIDGMAVAKMLYENNLTPGEYSYQLLAEGKKQLPDFYRSDLQSEFDKVWNFQKQFYSDILTDDLYKEPQGKPKTATWATLKEPFSLVGIKQAGTIQEKKIEKYLWRSEAVKKQLDFELLAIVLQEINGNLYNSSGYLGAISDRSKELYFNNQTVGEYLYEQLKRNPHTKLKNQVFYRQDYLDEFEKIWETQAKYHKELTKELKDEVRNVVIFYQRKLKSQKGLISICEFENREIEIEQDGKVKKKTVGLKVAPKSSPLFQEFKIWQVLNNLQFQNVESKEIFPIDLDFKQSIFDEVNIKGRLSSKEVLDIIGYSGKEWKTNFKDIEGNHTNENLYTAFLKILANEGIDFPKEFKLSIEDDIKVSKIHSSAQVIKLFVQEKLASLGVDSSILDFNPELDGSDFEKQRSYQLWHLLYSYEGDDSPSGNEKLYELLEKKFGLKKEHSKVLAEIGFPQDYGSLSAKAMRKIIVHLKAGFSYGGRKELPDEPSACEFAGYKSHSKSSLTKEQLENRILKDTLEILPKNSLRNPVVEKILNQMINLVNEVSKEYGKPDEIRIELARELKNNAEERANMTSEISKATIQHQKIAEVLQREFGIKSPSRNDIIRYKLYLELANNGFKDLYTDTKIERDNIFTEKYDIDHIIPQSRFFDDSFSNKVLVPRSANLDKGNFTAFDYLEIKGKDRLEKFLNLIKELYDRGAITKAKYEKLQKKGVDIGDGFIERDLRNTQYIAKKAREILFGITNSVVPTTGRITDKLREDWNLVNTMKELNLDKYRKLGLTETVINSKGEEKQRIIDWTKRNDHRHHAMDALTVAFTTHNHIQYLNYLNARKDENHTQHKVISNIENLITKVFEKKNGSKQRRFVEPIKNLRIEAKKHLDEVLISHKTKNKVVTKNINKTKKKGGVIPKVVLTPRGQLHKETIYGSAKFLKTKEEKVSGKFDLETINKVQNEKFKTALLERLQEFDGDSKKAFTGKNILARNPIYLNGEKTEQVPETVGLAWYETGYTLRKAVNPENFKDYKNLEKIIDKGVKDILKNRLDSFNGNAKEAFSDLEKNPIWLNESKGISIKTVTITGISNAETLHYKKDHFGKEILDENGKRIAADFVSTGNNHHVAIYEDADGNLQERVVSFYEAVERVNQGLPIIDKEYNSSLGWKFLFTMKQNEMFLFPSEDFNPKEIDVFDEKNLSLISKNMFRVQTISIVQYGNAVIRDFKFRHHLETSVGDNKALQGITYQQIKSLQPLKDILKVRLNNIGKIVQVNEY

SEQ ID NO: 3271 - protein, 1353 aa, unidentified
  REGION 1..1353: note = Description of Unknown: Cas Enzyme sequence
MKRILGLDLGTTSIGWAVVNEAENNNEKSSIEKLGVRVNPLTVDEQNSFEHGKPITTNADRTLKRSARRNLQRYKQRRKELIAILREQKFISDSTLLSENGNKTTFETYRLRAKAAKEQISLEEFSRVLLMINKKRGYKSSRKTKKSDSEDGQLIDERNVAKELYNNNITCGEYVLALINKGKEYIEKFYRSDLQSELDKIWSFQKQFHADILTNDFKEQIQNKSKQNTSKIFLGRYKIYTEDIKGSKEEKKRKTYELRVDALSKQLSKEELAFVIAEVNGNISSSSGYLGSISDRSKELYFNKQTIGEYLMVQLDKNPNASLKNQVFYRQDYLDEFEQLWEKQSQFHPELKNELKKEIRDIIIFYQRRLKSQKGLISFCEFESKQIEVEIDGKKKIKTQGCRVCPKSSPLFQEFKIWQILNNIEIKDANNNTRELEQEEKNILFSALSKKDKLKKQEVLKLLFTNPNDLDLNYSEIEGNRTMSALIKACPSIENDDSYLFDSTKDLDSQLIFQLWHLLYSYEGDNTPTGNGNLIMHLENHFGFSNQDAKSLAGVTFQEDYGSLSAKAIKKILPYMKEGTGYDVACVYAGYRHSKESLTKDEIANKELKEHLDILPKNSLRNPVVEKILNQMVNVINLLVDNYGKQDKKGEKHFDEIRIELARELKKNAAERELSTKNIDATTKLHEEYTEKIKKDFGFNYVSRNDIIRYKLYLELEKTGYHTLYSNTYIPYEKIFSKEYDIEHIIPQAQLFDDSFSNKTLEVRQINIEKSNMTAYDFVLSKYGNNGAEEYKNRLNDLFNKGAISETKYNKLKMKLSDIPNNFIERDLRDSQYIAKKAKQMLLLITRYVVSTSGSITDRLREDWQLINIMQELNWDKYDKLGQTDIIENKDGERIYKIKDWTKRNDHRHHAMDALTIAFTKHSHIQYLNGLNARSDHASSIHNIELKELHRNEKGKLLFNPPMPLDEFKQEAKKQLNSILVSIKAKNKVVTNNINTTKKKGGTNKKLQLTPRGQLHLETVFGAIQKYTTKEEKVGSSFNAEKIQQVTKKTYREALQKRLQEFEGDAKKAFTGKNSLEKNHLLFGNNLEYKVPEKVNTVRLETIYKIRKEISPDLKIEKVIDVGIKKILKNRLKEFGDDASKAFSNLDENPIWLNKGKGIAIKRVSITRISNVTALHSKKDNHGNYILDKEGNKQAVDFVNTGSNHHVAIYKDEKGELQENVVSFFEATARAMNHQPIIDKTFNQDKGWHFLFTMKQNEYFLFPNETTSFNPKELSEEYIKNPANYAILSPNLFRVQKISTKDYSFRHHLETDVQDRKPLSGIAYKTRLGLSSIKEIVKVRINHIGQIVCVGEY

SEQ ID NO: 3272 - protein, 1517 aa, unidentified
  REGION 1..1517: note = Description of Unknown: Cas Enzyme sequence
MKHILGLDLGSNSIGWAFVQQDFENKQGKIIATGSRIIPMDQGILGDFEKGNTVSQTAERTTYRSMRRLRERHLLRRERLHRVLHILGFLPPHYDAQIDFTKRYGKFIDNAEPKIAYNNGNFIFMNSFNEMIEDFKKYKPQLFYKKSNGEESKIPYDWTIYYLRKKALSQKITQQELAWLILHFNQKRGYYQLRGEEETESPNKEVAFHSLKVVEVEAEAPNKKGEIWYTIRLENGWIYRRTSKIPLDDWKGKTRDFIVTTDLNDDGTIKVDKEGKEKRSFRAPEENDWNLLKKKTEHDIDFSGKTVGAYIYDHLLQDPNQKIKGKLVRTIERKYYKNELKAILTKQIALQPELFTENLLADCIRELYRKNETQQQNLLSKDFLHLFVEDIIFYQRPLRSKKSTIANCTLEKRSYIDKETNERKDAPIKVCAKSNPYYQEFRVLQWLQNLRIYEIETDREVTAEFIETPQDYEALFNFLMSQKEIDNESLLKYFLLAKNPQIKDKAAKSELKKWLTTYRWNYVYDVADNSSKKYPMNETGYDLQRYLQKVEGLPANFLTFDTTYRLWHLLYSVKDKVEFEKALKRFAKKKQLNETSFVESFKNFKPYPNEYGSFSEKAIKKLLPLMRFGNHWNFKNIDVHTQKRIDDLINGVANEDIRTIIREKAEKYQLNSESCFQGLPLWLAQYVVYNRHAEATDIEKWTSVNDLEAYLEDFKQHSLRNPIVEQVVTETLRVVRDIWQQYGGGQANFFDEIHIELGRELKKTAEERKQLSNRNQENENTNLRIKKLLAELKEDASIQNVRPYSLVQQELLKIYEEGVFSSTDEIEEDIRKIRKKADPTTPEIQRYKLWLEQKYKSPYTGEVISLTKLFTEEYEIEHIIPQSRYYDDSLSNKVICESAVNKLKTNQLGLEFIQNHHGEKVRITANKEVTIFTEEQYKDFVKKHYANNLAKQRKLLLNEIPEKMVARQLNDTRYISKYISEILSKIVRSDEKDEGVNSKNVIPCTGKITTALKQDWGLNDVWNELILPRFERMNQLTQTQLFTSYNDRYQKNLPTVPIQYSQGFQKKRIDHRHHAMDALVIACATREHINYMNNQHALDKSKDKKEKQQSRIDLRTILCEKKNNNWQFKKPWATFTQEAKESLEHIVVSFKQNLRVINKATNYYEKWEEKNGVLVKKKVKQEGTNWAIRKKLHEDFPYGKVKYQVNFLKISENISKIDLIVDEFIKRQLEKIYVENHRKVNLTKKYLKENPIRDQKGEEVISTDFREENIKYRKRKPISVLSDRNRKTGITSIEKMLKTIAKVADNTLKRELFLHLEECNNDIDVAFSPEGIEQFNSKRKIPVYRLPFFEEGEKKNKLGNKGKYVEAAKGTNLFFGVYQGKGKRTYATIPLNKVIERQKQGLPSVPERNEKGEPLLFSLSPNDLVYVPMEGEATETIDFNNLSKEQKERIYNVNDFSSTTCYFTPNRVAKAICPKEIDKKGKDSGSFDTKTASIEGVQIKEVCIKLKVDRLGNITKA

SEQ ID NO: 3273 - protein, 1482 aa, unidentified
  REGION 1..1482: note = Description of Unknown: Cas Enzyme sequence
MKVLGIDLGPSSIGLSVRNANRGNNLQEQLEYFSSVVFKSGIGKGQSGEYSYAAERRIKRSSRRLYQARKYRIWATLELLIKEGYCPLSLEDLDKWRKYDKKKGLKRQYPIHAQGFEQWVRLDFNGDGKADYSSPYQLRAELMQQQFDFTQQGDRYKLGRALYHIAQRRGFKSSKGETIKEQEATETDLLNEVEVDITEELKKSEEKKSKDLKAYMEANNLKTVGCAFAKLEDEGVRIRDSVYQAVRTQYKDEIRQIFEFQKGLDINSEFYKRLTSEKKGEGTIFYKRPLRSQKWLVGKCTLEGSKPRCPISHPEFEKFRAYSFINNIQYRKSTDDEWQNLTLEQKQKLYKDKFLRTAKGFDFKEIREWIEKDIRDNTRNYILRYDRDKEKRTINYGDKTNVSGCPISSRLKNLLGLDWEKVVLTTEKERINKKTGEVRKITYTAEDIWHIAFSFDEPEFVRIFAEETLKFDKAKSDAFVRLHNDIKPGYSMLSLKAIKNINYFLEKGFIYTESVLLAKLPEIFGEKWGENESEIVSQISSIISENRKEKDIKSIANALIAKYKSLSLDDGEQFAYKNHEYKLGENDLKDIENACIDKYGNRTWSKKSDDEKREIIKQVGQYYQSFFKSEDRDYYKLLRLSDSLAKYLLDNFEFLNVKELKKIYHPSMISFYIPAKEQQIEDGRWLKLLGSPVVGAIKNPMAMRVLHTLRRQINSLLKAVDEDGNQLIDENTRIVVETAREINDANMRWAIRAYQDGREAENKVYEKAINELLKEVQATDDNIDKVRLLCDQHEILGNDQLQEPSSEDKSQKKKIYFVEDYKKSKENEIKKYRLWLEQGCRCIYTGEIINIKKLFDDNVSDFEHTIPRSKSFDNSLENLTVCDAYYNRAIKKNRIPTELENYNKDATINGKLYSAILPRLKPWFDKVDRLKDNVEFWIGKSKKAADKERKDYCIRQRHLWQMELDYWQNKLNRFTMTEVTDGFKNSQLVDTRIITKYAYHYLKTVFDKVEVQNGRHTSDYRKMLGIQGIDEKKDRSKHSHHAIDATVLTLIPASAKREKMLKLFYEIEEDRRSNKDITEKTKELKKEIAQCGFGRNVNEIGNFIEENILINHISKDQTLTPTRKRWRTRGKVAWQRDKDGSIIYKNGEPQPKRWITGDSIRGQLHKDSFFGAIKYPKTDKYNIPIQGDDGKYVYETDKSGNEVISMVIRVPITSFKDEKDLDKIIDPTVKNSILKTIAKRQSEGKSFSVSINEPIWLLDSDGKEIKKDKNGRLLLPIRHVRCRVAAGRGFFTKDKAIEIKEQTYKSKKDYKRYYYAQNDGNYLCLLYECYHKGKLEREFKFINYFEVAKLGIKSSDDIKNEPYFNELSKNKKQYKLSAIIKTGTRVLMYSKKPEEIFDLENTELLKRLYNVYKYNFTGSNRIYLQQHLEARENEKIKNDEDFSVFDNTKYQARLNLVASNFNCIIEGRDFEISDSGKINFIN

SEQ ID NO: 3274 - protein, 1420 aa, unidentified
  REGION 1..1420: note = Description of Unknown: Cas Enzyme sequence
MKRILGLDLGTNSIGWALVNEAENENETSEIIKLGVRVNPLTVDEKTDFENGKPISTNADRTHKRSARRNLQRYKLRRKDLIQTLIKNGFITKETPLTEIGKNTTHQTLKLRALAAKRRVGLEDLARIFLAINKKRGYKSNRKVKNEEDGVALDGMETAKYLYDNQLTPGQHALALLQDGKKHIPDFYRSDLQVEFDAVWNTQKTYYSDILSDALYQEMQNKNKGATWAICQQPFNIVGIKLTGKANEQKEQRYMFRVQGLAEKLELEHLAIALQEINNDKSRSSGYLGNISDRSKVLYIDKKTVGEYLWEQIKTDPHTSLKNQVFYRQDYLDEFEKLWETQKEYHSQLTPALKEEIRDTIIFYQRKLKSQKGLLGFCQFESWEEVRKDKNGKPILNKSTGLPKERTVGHRVVSKSSPLFQEFKIWQNINNLHFKRINGKLNGLFKEETKDIFKLDEDQKIELFEELNLRGARTEKQVLKFLKLSDKEWTTNQPIADRKKGTKKTVEGNNTNKALYDVYQTIAEREGYGFDWANKSAAEIKEELKVIFPEIGIKPEILEFNATLDGNTFDKQASYQLWHLLYAAEDDHKISGEDRLVYGSADVSLKKKLHQKFGFKPEYAAMLANISLSDDYGNLSARAIRKLLPYMQAGHPYSQNEDKDLMKKAGAVQMVYGEQKNRAVYDPNKKLEILPKNSLRNPVVEKILNQMVNVVNQISDTYGKPEEIRIELARELKKSAVERDEMTKNINAATKKNDEIKATILKDFGFTATRNDIIRYKLWLELKKNDHKSLFTDQNIPKEKIFSKDIEIEHIIPKALLFDDSFSNKTLAYKTVNLKKADRTALDFIGQDHQTDLEGYKARVEGLYKKGGISKAKYKKLLMSADNLPEGFIERDLRNSQYIAKKATSLLQEVFKTVVATSGNITDKLREDWDLINVMKELNLPKYRELGLTEMQTRWDSGQEKHKEIEVIKDWTKRNDHRHHAMDALTVAFTSHNHIQYINYLNARHNEKHKQHSTIYAIESLITKRCPTGKNGGKKRKFISPMEHFRTRAKKHIGNILISFKTKNKVTTRNVNKTKQESGYNSKVQLTPRGQLHKETVYGKSKRIMDTPTKLNKRFNLAQAQLIADQNLKKLVVGHMAQFDNDPTVAFDNKTLKKQPLVHKGEPLKEVYCFEEIFTIRKDIESDLKRDKVVDKKVREVLAQRLEEYGGKNKEAFSNLDKKPIWLNKEKGICIKRVTITGVKNAEPLHHKKDHLGNLILDVKEQKIPVDYVSLGNNHHVAIYRDKDGKLQEKVVSFYEAVQLVQQKLPVVDKTHNAEIGWEFQFTIKQNEMFVFPNKEDGFNPNDIDLTDEDNAGLISKHLFRVQKIATKNYFFRHHLETTVETVKQLKGIAYHSQLGLNSIEGIIKVRINHLGKIVEIGEY

SEQ ID NO: 3275 - protein, 1390 aa, unidentified
  REGION 1..1390: note = Description of Unknown: Cas Enzyme sequence
MKKILGLDLGTTSIGWALINEASNESETSEIIKLGVRVNPLSSDEKTDFEKGRPLSTNANRTLKRGARRNLQRYKQRRKNLIEILINNGLITKNTPLTEIGKNTTHETLRLRSKSAREKIKLEDFARVLLAINKKRGYKSSRKANNEEEGQAIDGMAVAKTLYENNQTPGQYVLELLKDNKKYIPDFYRSDLQAEFEKIWNTQKKYYPNVLTNELYASLQGKNKGATWTICQKPFNIQGVKLEGTAFEQKLKRYELRVAGLIKQLDLEHLAIVFQEINNNLNQSSGYLGAISDRSKELYFNKETVGENLHKQLLKNPHTSLKNQVFYRQDYLDEFEKIWETQAQFHPQLTPNLKLEIRDIIIFYQRKLKSQKGLLSFCQFESWDQTFIEKETGKTKTRTIGNRVISKSSPLFQEFKIWQNLNNIDFKNSLTGEIIEISKLDDDIREAIFCELNVRGDLKPKDVLKILSRFFKIDKTSEWKCNFDRIEGNRTNASLYDIYQKIAEHEGYGLDWKKQSAQQITEELKTIFPEIGIDVSILDFNSELDGSRFDKQSSYQLWHLLYSADDEIKISEEDKLTYGNENVALKKKLDLKYGFKPYYASLLANITLSQDYGNLSSKAIRKIIPFLKSGNIYSKSCALAGYNHSNSLTKEAFENRELKPKLELLKKNSLRNPVVEKILNQMINVINQIIETYGKPDEIRIELARELKKNAKERAEMSKNIASATRRNDDIRKTITKEFGIPNPTKNDIVRYRLWLELEPRGFKSLFSNQYIPKNKLFSKEIDIEHIIPKALLFDDSFSNKTLAYRNINLKKANRTAYDFIASDYLSDLENYVERVTSLYDNGKGSIKKAKRNKLLLTQSKLPEGFIERDLRNSQYIAKKAKDILQDLVKNPIVSTAGLITDKLREDWDLINVMKELNMPKYRALNLTEFQERLNKGTQKLKKIEVIKDWSKRNDHRHHAMDALTVAFTSHNHIQYLNNLNASLNKKSELYGIRNKITYKNEEGKRKFIRPMPNFRKEAKKHLDSILISFKNKNKVSTQNINKTKKENGVLTKLQFTPRGQLHKETVYGKSKRALEKITKLNKKFTLTQAKLIKNKPQQKLVLKHLAKFDNNPQLAFDIKTLKKDPLIFKKEPLKEVFCYEEIFTIRKDITPENFKDIKTINKVVDLKVRQLLLDRLTAYKCNPKEAFSDLEANPIWLNKSNCISIKRVTITGVSNAEPLHYKKNHLGKFILDDKNNKEAVDFVSTGNNHHVAIYEDENGKLQEQVVSFFEAVTRFNHNIPIIDKNYNKELGWRFLFTMKQNEMFVIPSEGFDPKEIDLLEDKNYNLISPNLFRVQKIATKNYMFRHHLETTINNNFNFTYRHFRSTEVLQGIIKVRINHIGQIVHVGEY

SEQ ID NO: 3276 - protein, 1396 aa, unidentified
  REGION 1..1396: note = Description of Unknown: Cas Enzyme sequence
MSKTILGLDLGTNSIGWALVEEAENIDESSKIIKLGVRVNPLTVDEQTNFERGKPISTNADRTLKRGARRNLQRYKSRRENLIEILVKNGIITKNTPLTEIGKNTTHQTLMLRAKAAHNKVDLVDFAKVLLTINKKRGYKSSRKSKSSDEGVAIDGMTVAKILYEKNLTPGQYVYETLNGGNKFIPDFYRSDLRIEISKIWDKQTEFYPTQLTNDLFHAIEDRNKGQTYKILEVPWNLKGLKQSGKRDEQRLERYKWRQQALSEKIELEKLVIVLQEINGELNNSSGYLGAISDRSKRLYFNKITVGEHLYNQIERNPHTSLKNQVFYRQDYLDEFEQVWETQAKHYPEILTIELKEEIRDVVIFYQRKLKSQKGLISFCQFESKQEEYIDKTTGKTKFRTTGQRVAPKSSPVFQEFKIWQNLNNLTFENEKDNQIIEVRNLEDNIREEIFNELNFKGSLAPKDVLKVISKHIFINKASDWTCNFEKIEGNTTNKALLEVYQKIAEAEGYGFDWDKKSAKDINEEIEAIFGEIGVNKEILKFDSNRDDFDKQPSYQLWHLLYSAEDGGKVNEEDRLLYGNNDTKLRKTLHTKYGFKPEYATMLSNITMQPDYGNLSSRAMRKITPYLQAGHPYAKSSDNKDEAGACDLAGYNHSKSETVEDLKNKILKDKLEILPKNSLRNPVVEKILNQMVNLVNQVIDEFGKPDEVRIELARELKKTADERERMSKDIAEATKRNEEIKNLIIKEFGIPNPTKGDIVRFRLWDELSSRGHKTIFTELYIPKEKLFSKDIEIEHIIPQALLFDDSYSNKTLAYHSENLQKRNRTAYDFINQDYNQYTTEFENRVDVWYNNKSISKAKRNKLLMTYADIPDGFIERDLRNTQYIAKKAREMLLEAFKTVIPTTGSITEKLREDWGLINLMKELNLPKYKALGLTETEERFDIGSEKIKKVEVIKDWTKRNDHRHHAVDALTVAFTTHNHIQYINNLNARRNTNHKKHNIIHAIENVITERINGKPIFKEPIPNMRDVARKEIESILVSFKAKNKVTTNNINETKLAGKQRYKKTLQTTPRGQLHKETVYGRSLRPSDKPVKLNNKFNMDVANFIINKKERDAVILHLSKYGNNCEVAFASKTLKNNPILLNGETLKEVRCFEEIFTIRKPIAPDLKLDKVIDEGVRNVLEERLNEFNSNPKEAFSNLEENPIWLNKEKGISIKNVTITGVNNATPLHYKKDHHGKEVVNCKGEKSHCDFVQTRNNHHVAIYKDNDGNFQESVISFYEAVERANQGLPIIDKLFNNHLGWEFLFTMKQNEMFIFPADDFEPSEIDLLNPENAGVISKNLFRVQKISTNYYTFRHHLETTVTNDLNFTFKRIRTPNSLKGIIKVRINHIGKIVHIGEF

SEQ ID NO: 3277 - protein, 1370 aa, unidentified
  REGION 1..1370: note = Description of Unknown: Cas Enzyme sequence
MKRILGLDLGTTSIGWAIVDEAENENEKSSIIKTGVRVVPLSTDEQISFEKGQSITINADRTLKRGMRRNLFRYKLRRGAVVKILKEIGFITDETPLTELDNNSTFSTYEARAKAPDEKISREDFARVLLMINKKRGYKSSRKANNQEEGQLIDGMAVAKKLFRENLTPGELSYRLIKEGNKSLPDYYRSDLQAEFDKIWDFQKYYYPEILTLHHKENLNGLNKSSTIPYFEKKMQIERADPKGTDKKLQQFEWRKKALTEQLELSKIAFILTEINNQINQSSGYLGAISDRSKKLFFNDLTVGQYLYNQLKVDQHASLKNQVFYRQDYIDEFEAIWKEQAKHYPELTSNIKEQLRDITIFYQRRLKSQKGLINICEFEGVERIVNIDGEKKKKLIGPRVAPKSSPVFQEFKIWQNINSIRVTKKTNDTIVYELEEETKLELFKELNWVKQMTDRDFLKWLFKNSEKNAKDWKINFKHLEGNRTNADFVNAYQKILDIEGYENITLNKIDAEEKVKTLKDCFRTIGIKTEVLDFNTHLKGNDFPKQPYYQLWHLLYSYEDDNSTTGIDSLLQKLEENFGFKEPHARLLAGITFLKDYGSLSVRAMRKILPYLKEGFLYDKACALAGYNHSNSITKTENEKRNLQPRLEILKKNSLRNPVVEKILNQMINVVNAIIDDPHLGRPDEIRIELARELKKTAQQRSEMSKQIAKVTSDYEKIRELLKKEFGLPYVSRKDLIKYRLYKELKATGYHTLYSGTYIKPEELFTNKYDVEHIIPQSLLFDDSFSNKTLELRDVNLEKGNETAVEYCERKGWLGDFKKRVEEIYSAGDIKYMNRKKLLMTREEIPDDFLNRDLGNSAYIARKAAQILLDVTRNVSLTSGTITSKLREDWELIDVLKELNFEKYKAQGLTYTIKNRHGKELSRIAEWTKRNDHRHHAMDAITVAFTKPAFIQYLNNMSGESQKGGEYYGIKEKYTYRDKDGGRKFVKPFENIRQEAKKHLESILVSHKAKNKVVTKNKNKIKIKGKDKYKTKTELTPRGQLHKETIYGSSKEYLTKLEKIGGNFDKEKIETVAKKKYREPLLKRLAEFGNDPKKAFTGKNSLIKNPIFLNNKGATLPEKVNTVIFSDRYTIRKNITPVLKIDKVVDVGVKRILQNRLDKFNGKPKEAFSNLDDNPIWLNEEKNIPLKRVTITGVSNAEPLHNAKDHLGNELKDDEGNTIPVDYVSTGNNHHVAIYKDENGNLQEEVVSFYEAVIRKNHGQPIIKKNHEKGWEFLFTMKQNEMFVFPSNDFDPSEIDLLSPNLVDTISQNLFRVQKFTTKDYFFRHHLETNVDLNNNLKDIAWVRTGISGIKDIKKVRLNHLGDIVQIGEY

SEQ ID NO: 3278 - protein, 1371 aa, unidentified
  REGION 1..1371: note = Description of Unknown: Cas Enzyme sequence
MKRILGLDLGTTSIGWALIEEAQNENETSSIIKTGVRVVPLSTDEQIGFEKGQSITINADRTLKRGMRRNLFRYKLRREAVIKIFKEIGFITDDTPLTELNNNSTFSTYEVRAKAPNEKISREDFARVLLMINKKRGYKSSRKAYNQEEGQLIDGMAVAKRLFRENLTPGELSYSLLREGNKSLPDYYRSDLQAEFDKIWDFQKYYYPEILTLHHKENLNGLNKSSTIPYFEKKMQIERADPKGTDKKLQQFEWRKKALTEQLELSKIAFILTEINNQINQSSGYLGAISDRSKKLFFNDLTVGQYLYNQLKLDQHASLKNQVFYRQDYIDEFDAIWKEQAKHYPELTSNIKEQLRDITIFYQRRLKSQKGLINICEFEGVERIVNIDGEKKKKLIGPRVAPKSSPVFQEFKIWQNINSIRVTKKTNDTIVYELEEETKLELFKELNWVMQMTDKDFLKWLFKNSEKNAKDWKINFKHLEGNRTNADFENAYQKILDIEGYENINLNKLDGEEKVKTLKDCFRTIGIKTEVLDFNTHLKGNDFPTQPYYQLWHLLYSYEDDNSKTGIDSLLQKLEKNFGFKEPHTRVLAGITFPKDYGSLSVRAMRKILPYLKEGFLYDKACALAGYNHSNSITKAENEERNLQPRLEILKKNSLRNPVVEKILNQMINVVNAIIDDPYLGRPDEIRIELARELKKTAQQRSEMTKQISKVTSEYEKIRDLLKKEFGLPYVSRKDLIKYRLYKELKATGYHTLYSGTYIKPEELFTNKYDVEHIIPQSLLFDDSFSNKTLELRDVNLEKGNETAVEYCERKGWLADFKKRVEEVYSAGDIKYMNRKKLLMTREEIPDDFLNRDLGNSAYIARKAAQILLDVTRNVSLTSGTITSKLREDWELIDVLKELNFEKYKAQGLTYTIKNRHGKELSRIAEWTKRNDHRHHAMDAITVAFTKPAFIQYLNNMSGESQKGGEFYGIKEKYTYRDKEGGRKFVKPFENIRQEAKKHLESILVSHKAKNKVVTKNKNKIKIKGKGKYKTKIELTPRGQLHKETIYGSSKEYVTKLEKIGSNFNKEKIETVAKKKYRESLLKRLAEFGNDPKKAFTGKNSLIKNPIFLNNKGATLPEKVKTLTFSDRHTIRKNITPDLKIDKVVDVGIKNILQKRLNEFGGNAKEAFSNLDDNPIWLNEEKNIPLKRVTITGVSNAEPLHNAKDHLGNELRDDAGNTIPVDYVSTGNNHHVAIYKDENGNLQEEVVSFYEAVIRKNHGQPIIKKNHEKGWEFLFTMKQNEMFVFPSNDFDPLELDLFDTNNKDEISKHLFRIQKIGNKDYWFRHHLETQLKDDSNLNELAYHRKRNPNSIQNILKVRLNHLGDIVQLGEY

SEQ ID NO: 3279 - protein, 1550 aa, unidentified
  REGION 1..1550: note = Description of Unknown: Cas Enzyme sequence
MKKILGLDLGTNSIGWALTELDFTKKEGEIKALGSRIIPMSQEILSEFDSGVTISQTAERTGYRGVRRLLHRNLLRRERLHRVLNIMNFLPEHYAKEIDFKKHLGQFKNEVEVKLNYHENEQGKHKFIFMNSFDEMAKEFETNGLSTKIPLDWTLYYLRKKALSQKITKEELAWIILNFNQKRGYYQLRGEEEENQDKNEEFYTLEVVDIKETQDKKKDGSIWYNVILENGWVYKRSSKIPLFDWLGKTKEFIVTTTLEKDGTEKKDKDGEVKRSFRAVDSEKDWIAIKKKTEQDIEKSRKTVGQYIYETLLQNPSQKIRGKLVKTIERKFYKEELIAILSEQKNHHPELSDKFIYQACVEELYPRNEAHQKNIIKNDFTYLLVEDVIFYQRPLKSKKSTISNCPYESRSFIKEGKKEVQPIKCISRSNPIFQEFRLWQFIKNLKIHQREITINNIPEIDYPVTEQFLKTQTEIIELYDFLNDKREIDQKQLLKHFKLSEKTHRWNYVEDKKYPCNDTRASFLSRLSKVENIDPEKFLTKETEHELWHIVYSVKDKKEFEIALKSFSVKRGIDESSFVENFKKFPPFKNEYGAYSEKAIKKLLTLMRIGKYWDEEKIENTTKNRIQSIIERLGTIAFDKEKIDTITDDDIPKQVLKSFIVNRASPFSGLNTYQACYAVYNRHSEVSEITKWKTPNDIAKFLDEFKQHSLRNPIVEQVVTETLRVVKDIWEFYGEGNEDFFNEIHIELGREMKNPAEKRKQLTQRNSENENTNHRIKALLQELKNDINVKSEVKPYSPSQQEILKIYEEGVFQNSPEEYKFIKIDEVEKIRKNNSPTRSEISKYKLWLEQGYISPYTGKPISMSKLFSTEYQIEHIIPQSRYFDNSLNNKIICESEINELKDNKTAFVFITEEKGRIVELTENKTAKLFTIEEYKNHCNNYFKKNRSKLKNLLSEDIPEGFINRQLNDSRYISKLIKGLLSNIVREENEEEATSKHIVPVTGAITSQLKNDWGLNDKWNEIVAPRFMRLNELTNSRDFGFWDKTINAFRTQVPDEIARGFSKKRIDHRHHALDALIIACTTKDHISYITSLNTQRKNYGLIDKLRVRKEIQIKNKYTGETIIKKVASDYHKPWPNFTINAKEALEHTLISFKQNTRVITKANNKTWQWVHKNGILKKELVAQTKGDNRAIRKPLHKETVYGKVIIKREKGIVSIAKALENWEMIVDNNVKEIVKEKVLFYKTDTKLLKKYFKDTPITIEGKKIDKVMVYEKVEATASRVALTEKLTRKQLESITDSGIQMILENHIKNYIDAKGKEHFELAFNPDGIDELNKNIVQLNNGKFHHPIYKVRLYEVGNKFPVGYTGNKKDKYVEAAKGTNLFFAIYQNTESKKRSYETIPLNIVIERKKQGLNVAPERDENNNILLFTLSPNDLVYVPNEEEQEDPDLLNIKKLTKEQVNNVYKFIDSSDKTANFIPASSASLIFDIKNKDQLRFGLNFPIQNEYGLGSPQSKSQNTLEAMQIKAVCWKLKIDRLGNIKKIINYSNVQSNALV

SEQ ID NO: 3280 - protein, 1532 aa, unidentified
  REGION 1..1532: note = Description of Unknown: Cas Enzyme sequence
MKKNLGLDLGTNSIGWALTELDFTKKEGEINALGSRIIPMSQDILGKFDSGVTISQTAERTGYRGVRRLLQRNLLRRERLHRVLNIMDFLPEHYTKEIDFKKHLGQFKNEVEVKLNYRENEQGKHKFIFMNSFDEMAKEFETNGLSTKIPLDWTLYYLRKKALSQKISKEELAWIILNFNQKRGYYQLRGEEEENQDKNEEFYTLKVVDVKETEDKKKDGSIWYNVILENGWVYKRSSKIPLFDWLSKTKEFIVTTTLDEDGTEKKDKDGEVKRSFRAVNSEDDWIAIKKKTEQDIDKSHKKVGQYIYETLLQNPSQKIRGKLVKTIERKFYKEELISILTEQKKHHPELSDKLLYKACVEELYPRNEAHQQNIINNDFTYLLVEDVIFYQRPLKSKKSTISNCPYESRSFIKEGIKEVQPIKCISRSNPIFQEFRLWQFIKNLKIHQRGITINNIPEIDYPVTEQFLKTQVEIIELYDFLNDKREIDQKQLLKHFKVSEKTHRWNYVEDKKYPCNDTRASFLNRLSKVTNLNPDTFLTKETEHELWHIVYSVKDKKEFEIALKSFAVKKNIDESSFVENFKKFPPFKNEYGAYSEKAIKKLLTLMRLGKYWNEEGIESTAKNRIQSIIERLRTINFDKEKIDAITDDDIPKQVLKSFIVSRENPFSGLNTYQACYAIYNRHSEVSEITKWKTPNDIAKFLAEFKQHSLRNPIVEQVVTETLRVVKDIWELYGEGRQDFFNEIHIELGREMKNPAEKRKQLTQRNSENENTNQRIKALLQELKNDINVKSEVKPYSPSQQEILKIYEEGVFQNSPEEYKFIKIEEVEKIRSNNSPSISEISKYKLWLEQGYISPYTGKPIPLSKLFSTEYQIEHIIPQSRYFDNSLNNKIICESEINELKDNKTAFVFITEEKGRIVELSENKTAKLFTIEEYKNHCHNYFKKNRSKLKNLLSEDIPEGFINRQLNDSRYISKLIKGLLSNIVREENEEEATSKHIVPVTGAITSQLKNDWGLNDKWNEIVAPRFIRLNELTNSRDFGFWDKTINAFRTQVPDEISKGFSKKRIDHRHHALDALVIACTTKDHISYITSLNTQRKNYGLIDKLRVRKEIQIKNKYTGETIIKKVASDYHKPWPKFTIDAKEALEQTLISFKQNTRVITKANNKTWQWVHKNGILKKELIAQTKGDNRAIRKPLHKETVYGKVTIKREKGMVSIAKALENWEMIVDSKIKEIVKEKVKFYKTDIKLLKKYFKDTPITIEGKKIDKIRVFEKVKATASRVALTEKLTRKQLESITDSGIQMILENHIKNYIDSKGKEHFELAFNPDGIDVLNKNVVQLNNGKFHHPIYKVRLYEVGKKFPVGYTGNKKDKYVEAAKGTNLFFAIYQDAESKKRSYETIPLNMVIERKKQGLNVAPDRDENNNTLLFTLSPNDLVYVPNEEEQENPDLLNIKKPTKEQVERIYKIVSSTGNRLHSIPNNISKPIINKIEFSILNKLEFDLRGNSIKENCWKLKVDRLGNIKKVINYINIQTNAVI

SEQ ID NO: 3281 - protein, 1389 aa, unidentified
  REGION 1..1389: note = Description of Unknown: Cas Enzyme sequence
MNNILGIDLGTNSIGWAIRDKSEKGNQIISNGVLTFDKGVGEEKGVEFPKVKKRTESRGKRRNYQAEKYRKWGLLEFLIQKEMCPLTIDELDEWRKYQKGKKRKYPQTDNFINWLRFDFNGDGKPDFHLLKGDKHESYYLFRAKAVSDNLNDKNIFAENPHILGRVFYQLVQRRGFKGRDEEEAKTMLLGSEKNGTPGRNDIAEYIEKYKTLGAALYNFQIDTGNRIRQRYNLRKDYESELREICRIHNLDNDFYKKLWKAIIWQRPLRTQKGLIGLCTYEKNKRRAPVSHPLYEEFRTWVFINNLKIKAPEGWVQEEYLKEKIYPLFYKSSNDFKLSSILTQLRKDGGKMNSKFKENTNTKVLSVKLLNQLQDVLGEDWKETYKWEDIYNRDAQPSKKNSNGEYTIEDIWHVLYTFDSEEKLKEFAENKLELNEENSKKFSKIKLQQGYATLSLSAIKKILPYLRKNFLYSKAVYMANLPKVMGTNDISDNLISYFAEEIDTIFKQIETEKEQNNIVNGLIKEELIAEGDYILENNRELDISEINLIDKKIKEVIGEKTWEYFDEQEKNKTKNYVASHFKEFLKKPFQVRKNAFLEQPRLHQQIFNYLQETYDIPDKSIKYLWHPSEQEKYPNADEYNQISIKGKTLFIKESVLEKYLHKNSNAEIEAVSLKLLGNPEPISKGFKNPMALKTLYKLKYLLNYLLQTNQIDENTKVVVEIARELNNANQRKAIERWQTQRERENQSYREIIEEINVECQTNLDINNENLIHKIRLWEEQNHQCLYTGNIISKCDLLDGNKYDLEHTIPASMSFDNELKNLTVADTHYNRNIKKKLMPSQLPNYNDNTTIEGNVYTSIEPRLQPIKDKVKHFEELHDEWLKKTKYASTKEVKDACIQRRHFIKFDLDYWRKKLDTFTIEEYKVGWRNSQLRDTQIMTKYAVPYLKTVFNRVDVQKGNVVNNFKEIYKVKLPFEKKDRKKNSHHAIDAAILTLIPSASYREKILEKYNWEKDNHTGKIYHEEPKDWNGFKTSHILDIEDEILINNLKEYRTLTPTYKKVRKRGVIYRNDDSSLRWAKGDSIRGQLHGESLYGAIKQPKRDEKDKIIFSDEGKMLLEDKISLVIRKPFLYKKDSNSPGFKTLNEIEKVIVDKALYKIIDNQIQEVIDSGGSFKSAMDKGIWMLNKRGEKVNKIRRIRCFESLKHTTAVKVHKHSFQSDKEHKQSTYAQNGENVFCLFYKGEVKGKEERAINIIGIFDLTKLNITDEKEFYEIPLFNSIEKRKTKIPLYHILKSGQKTIFYRDNIEELKELSMKEISQRMYKMYQFESDGRIKLKHHLISGSNTDIKKEHKELASFDFENYSPLLRLRSQGWNFAIENKDFTMNLDGTLKFKF

SEQ ID NO: 3282 - protein, 942 aa, unidentified
  REGION 1..942: note = Description of Unknown: Cas Enzyme sequence
LPTGYANLSLKAINNILPFLEAGIIYSEAVFLAKIPEIIGKQLFDDNREGILEALHLEINNNRNQKTVINIANSLIADYKVLDGENRFAYKDVSYKIDEADKKEVLKACINHFGRNNWDKRNEEKQNNIVEQVQDKYQDFFSTSKRDYIKQPKLIEQIQNFLIEEFNISKEALEKLYHPSMIDIYPSSEEQQFLKSPKTRAFKNPMAYKTLHKLRHVINHLLEKGLIDNDTRMVVEVARDLNSKNKRAAIEEYQRIRERENVEFGVAITELIKDPEFKGSANPDNKNDRDKLRLWAEQIEDKEEVIKNILATKEDIKKYRLWKEQKCVCFYTGKLIKLTDLFNNNVIDFEHTIPRSKSFDNSLANLTVCYSDYNRNIKKNKIPTELSNYKESSNGYSAIEPRLKDWKNKIDSMFGQIQTQVKNSKYAVDKESKDNAIRRRHLLQMEYDYWKNKVDRFTREDVPIGFRNSQLVDTQIISKYAYHYIKTVFNQVETIRGNTTSEFRKIYAIQPKSESKDRTKHYHHAIDAAVLTLLPTSAKRKEILEKKYKYEEIYYNKQYHEKPFDEFSYSMIKQIENEMLINNMKDQDQTLTPAKKFIRKRGKIEYLRDDQGNYLKDEKENRIPKVATGDSIRGQLHLDTFYGKIKMAAKDENGSLVRNGDGIIQYLKDKGGNEIYKMVGRKSIDKVNFQTDIIIDEYLADHLRKQIENGVNQNELKDFQGNIIRHLRCEVKSGRGVMNPENATIVKEQTYKSDKEYKNYYYSDSGDNYMFGLYENENGRKIVSINTFDSTQFSIIQNNDTKREIFKSQEPVLVGRGKSEKESTLVHIFSPGQKVLFFLEDKEELKELDKTDLSSRLYYVKKLADANTQRILFQHHLEARNDDNLQKDFPRSKFGTKGKDGFSSFTENFIAPKLLLTPTKFNFVIENKDFEMELDGTLNWKF

SEQ ID NO: 3283 - protein, 981 aa, unidentified
  REGION 1..981: note = Description of Unknown: Cas Enzyme sequence
LFYRGQNMYSVKDKREFEQALKSYANKRNIDENTFFENFKKIPPFKNEYGAYSEKAIKKLLPLMRRGKYANENDINIEVKNRIYSIIERLEEVNFDKEKIEIITDDDIPKQVLKSFLDKRENSLNGLNTYQACYAVYNRHSELGEIKYWKTPLDIVEYLDEFNQHALRNPIVEQVITETLRVVKNIWEHFGESKENFFNEIHIELGREMKNPADKRKQLTERINDNQNTNQRIKAVLEELKKDVSVSSQIKPYSPSQQEILKIYEEGVFQNSPDVYKSIKLDEVEKIRKNNSPSQTDIIKYKLWLEQGYISPYTGALIPLNKLFSTEYQIEHIIPKSRYFDNSMNNKIICESAINELKDNETAFAFIGSEKGRIVEMSGGKNVRLFSLDQFETHCNFYFKNNRAKLKNLLSLEIPEGFINRQLNDSRYISKFIKGLLSNIVREENEDNATSKNLVSVTGAITSQLKNDWGLHDKWNEIIAPRFMRLNEITNTKDFGHWDATINAFRTQVPNQLVKGFNSKRIDHRHHALDALVIACTTKDHINYITSLNSQRKNYNLVSKLRELKEVQIKNKLTGELVTKKVAKEYHKPWATFPSDTKKALEKTIISFKQNKRVITKTNNKTWQWIEKNGKLKKELVPQTKGDNRAIRKPLHKETVYGKVLIKRKKGDVSITNAIENGEMIIDKNLKKLIKEKLNFYKNDIKLLKKYFKDNPINIDGKILDKIAVFENVEATAGRIALTEKFTRKQLESITDSGIQKILENHLKNYIDQKGKENFDLAFNPEGLDELNKNIIALNNYKFHHPIYKVRVYEVGNKFALGTTGNKKDKFVEAAKGTNLFFAIYWDMENKKRSYETIPLNIVIERKKQGLGVAPEINEKGHKLQFTLSPNDLVYVPSNVEQENYNFFDKQNILKENIDNIFSVNDFSGVTIYFTPNQFAKSIAPKELDSSFDSKLSKTLDGKIIKDLCWKLKVDRIGNIIKVIR

SEQ ID NO: 3284 - protein, 1528 aa, unidentified
  REGION 1..1528: note = Description of Unknown: Cas Enzyme sequence
MVKILGLDLGTNSIGWALVETDENNNPCKIEGIGSRIIPMSQDILDTFSGGKPLETQTAARTSYRGVRRLRERHLLRRERLLRVLNVLGFLPNHYSEQIDFEKRLGQFFEEKEPKLAWKEDENGKFDFLFQKSFLEMAEEFKANGQETKIPYDWTIYYLRKKALQQKIEKEELAWIILNFNQKRGYYQLRGEEEEENPNKLVEYYALKVVDVTADEPQKGKPDIWYNVVLENGWIYRRSSKNPLFDWVGKEKEFIVTTDLNDDGTIKTDKEGTEKRSFRAPSEDDWNLLKKKTEADIIKSSKTVGTYIYETLLSNPKQKIRGKLVRTIERKFYKDELKQIFEKQIELQPELFTDDLYNDCIRELYRNNEAHQLVLSKRDFVHLFLDDIIFYQRPLRSQKSTIGNCTLEFRKYKDKDGNKITEYLKTIPKSNPLYQEFRVWQWLSNLKIYRKGDDVDVTSQFIKEVDDVVSLFEFLMLKKEVNHKDILQYFFTKEGFKGKALNAEIAKYRWNYVFDNSKDKEDDKSKKYPCNTTGFEIKKRLEKVENAPANFLTSENEQKLWHIIYSVTDKIEFETALKTFAEKHNLDVDSFVENFKKFPPFKSEYGAYSEKAIKKLLPLMRLGKYWKCNAIDDNTKERIFKVITGEYDEKIRNRVREKAINLTEESHFQGLPIWLASYIVYDRHSEADIAGKWNSVDDLEKYLTDFKQHSLRNPIVEQIITETLRVVKDIWRQYGKGAKDFFDEIHVELGREMKNTAEDRKWLTEQVTNNENTNLRIKALLMELKENSDGKLFVEDVRPYSPMQQDALKIFEEYALQSNERYDEKENKFIYDPIEDDILKISKSAQPTKSELQRYKLWLEQRYRSPYTGQMIPLGRLFTEDYQIEHIIPKSRYFDDSFSNKVICESAVNQRKDKQLGLEFIQNHYGEEVELGMGKFARIFTEDEYKDFVKEHYTKNNSKRRNLLLDEIPEKMIARQMNDTRYISKFVSALLSNIVRAEKEDDGINSKNLIPITGKITSILKQDWGMNDVWNDLILPRFERMNELTNSENFTSWNDNHQKYLPTVPLDLSKNFQKKRIDHRHHAMDALVIACATRDHVNLLNNQSAKSENSRYDLQNKLRHKEKASWIDKKTNEKIERDVFKEFKKPWNNFTVDAKNELKKIVVSFKQNLRIINKTINKYDKIIDGKKVKVAQEGTNWAIRKPLHKDTVSGIVNLRFKKTVNLSVAIDDWKNIVDKNIKTKVKQLINEGFDKKKIQKFFAQQENKWQGKDVSKIEVYYFSNDKEILVASRTALDISFNSKKIGSITDSGIQKILLRHLKKYNEEKDGKTIERPDLAFSPEGIDDMNKNIIQLNSGKQHQPILKVRTYEPKGNKFNVGSSGNKKTKFVETAKGTNLFFAIYVDEDGKRSYETIPLNIVVERLKQGLKEVPEVNEKGNKLLFYLSPNDLVYVPTEEELENGVNYESIKYDRIYKMVSSSGNQCFFIKSEVANTIINKVEYSPLNKMEKSLDGIMIKQYCKKINIDRIGKIR

SEQ ID NO: 3285 - protein, 1361 aa, unidentified
  REGION 1..1361: note = Description of Unknown: Cas Enzyme sequence
MKEKVVGIDLGTGSLGILLRNLELGNNIIDQLEWFSVTTFNAGTGMSQTGEYTLASDRRSHIQSRRLKEHSRWKRWATLALLIEYDMCPIRTESLEKWSVYDKRRNLKREYPIEDQAFAQWIKLDFNGDGVPEYSSPFQLRKELVEQQLDFSQPENRYKLGRAIYHIAIHRGFKSSKGETLADMEEEGKNSEINTDDLEGAMKKSEEKKSKDLVEYMESRQLKTVGQAFAYLENEGIRIRNSRFQAVRSQNVEEFDEYFKFQEGLGQYDDLHKRLVSTKKGEGTLFYKLPLRSQKGHIGKCTFEKNKRRCPISHPEYEKYRAWSFINNIRYKTSAADVWLELSLDIKAQLYQEVFVSKVRKDFRFEVIRKFLEKQLGLSFENSEKVKTINLKDSTLVAGCPVTARLQNIVSLFDTDLEHFEQKGVKTRETHTKRTEKDKHTVTYHAMDLWNVCFDADEKEDVKAFAHNSLGWDDNATDKLCKLWTAIEQGYTTLSLKAIRNINRMLVYGVKASDAIFLAKIPDITGMQEDGIKGLIDLYLSQVKGQVDREIRISRIANILIANYKSLPVRDRFADHDYMYQLKDDDKKAVIDCITANDKDFALLDANEQQEFIDKVASLYQSFFADIHRDFVNSPRIVDALREELSKKYPGIDDKKWDKLYHPSLLSDFPRDKENANHLGSPNIGAIRNPTVLRTLNVLRKVINKMIDEGLIDPQETRLVVETTRVNNDINKRWAILKYNDERRDENKAIEKILQEQYPEKDIDEADINAARYVLEQSGEDLYGDDTRYQHQIKKYKLWLEQGCQCLYTGHIINLSNLLNGDMFDAEHTVPRSLSFDSSDKNLTLCDSYYNRHVKKNMIPSQLPNYEHDVVIDGHEYTAIKPRLEKWEEKVERLSKNVIFWKNKARRAQTESYKNTCTRQKLLWQMEYDYWRSKLDRFKMKPNDLTDGFRNSQLVDTGIITKYALLYLKTIFRSVDVQNGQSTSAFRKIFGIPEKDRSTNYHHAVDAAILSMIPSSAQRSRMLKLFYEIDEMKRGGHEYSGLQYQLNKEIESCGIGKGAADVDQYIEKHVLVDYYKQDRTLQNAHGIRGKLHAETFLGAITQWNGEEKKYVKRVELKFKKSSLDSGFKDWDDLEKAIVNKSLVQMMKSQFLEGTTFQEACEQGIYMLNKKGEKVNKIRHIRIEVKEKNPLAIKKHTYLSDKDYKQYYYAGMGDLYVMCEYQNQQEKVFQIYSLFSIAENRKYGVEDIPQTIIGKKGNRLTLSRVIKPGDMVLIYKDSPDELYDLDTTALSKRLYRVPNGAFESDGRISLCHHLCANQSKGSAITDYENLPLNIRCNASKIKFLQKDIDFFFEKGKIVFTRL

SEQ ID NO: 3286 - protein, 1393 aa, unidentified
  REGION 1..1393: note = Description of Unknown: Cas Enzyme sequence
MKKVLGLDLGTNSIGWALVNEAEKKDEASQIIKLGVRVNPLTVDEKTNFEKGRPLSTNADRTLKRGMRRNLQRYKQRRENLIEILIKNGIIQKDTPLTEVGKGTTYQTLSLRAKAARDKIELEDFAKVLLAINKKRGYKSSRKASNDEEGQPIDGMAIAKELYERNITPGQYVLELLEKDKKYIPDFYRSDLKQEFNAIWNNQKAFYPDILTNELYKELEGKNKSQTWSICQKPFGIVGIKRTAKGKEKNLENFQWRAQGLSEKLDLEHLAIILQEINNSINQSSGYLGAISDRSKRLYLNKETVGENLYSQIAKNPHTSLKNQVFYRQDYLDEFEQIWETQSKFHRQLTEELKKDVRDVIIFYQRKLKSQKSSISFCQFESWEQEYVEKETGKTKKRTVGRRVIPKSSPLFQEFKIWQNLNHLVFINSETNETIEVKELDQEIRQEIFDELNLRGDLSPNDLLKILKSEFKIGKLSDWKCNFEKIEGNRTNAALYNIYQKISDFEGYGVDWKKADAGKINKELKATFPEIGIDASVLDFDAEKDDFTKQSSYQLWHLLYSAEEDDKISEDEKLIYGNSSVALKKKLHQKFGFKPEYATMLSNMSLKTDHANLSAKAIRKILPHLKDGHLYSEACSLARYNHSRSLTGEELANRELKPKLELLKKNSLRNPVVEKILNQMVNLVNQLIDTYGKPDAIRIELARELKKSAKERADMTKGIADATRRNDEIKKIIRQKSGIPNPTKSDVVRYRLWQELEPRGHKDLFTDTYIPLEKIFSSEIDIEHIIPKALLFDDSFSNKTLSYKSVNLKKGNRTALDFIAQDYHSKLEDYTKRVETMYKDGHISKGKRNKLLMALVDIPDGFIERDLRNSQYIARKAKQMLFEVFPEVIATTGSITDKLREDWDLINVMKELNLPKYRALGLTEFEERLDKGTEELFKHEVIKDWTKRNDQRHHAMDALTVAFTTHNHIQYINNLNARRDSALDNHPIIKNIENLITEINPKGKRIFKPPMERFRENAKAHIESILISFKNKNKVVTKNVNITKTKNGENRKVHLTPRGQLHKESIYGKSKRPMDKLISLNDKFSTKQASLIINSNEKEAVLEHLKKYQGISEKAFDSKTLRKDPILINEQPLKQVKVFEEVFTIRKDINPENFKTLKHLDKIVDEGVKQAMKTRLKEYNGDFKTAFSDLDKNPIWLNEEKGISIKRTKITGVSNAEALHHAKDHLGKILKDKNDNEIPVDYISTGNNHHVAIYKDKDGNLHENVVSFFEAVEKVNQGLPIIDKNYNAHLGWGFQFTMKQNEMFVFPNVEAGFNPLEIDLLDKKNQKEISQHLFRVQKFTIKDYFFRHHLETNVENNPENKNVTWKREGLSGIEGIVKVRINHIGEIVEVGEY

SEQ ID NO: 3287 - protein, 1523 aa, unidentified
  REGION 1..1523: note = Description of Unknown: Cas Enzyme sequence
MKKILGLDLGTNSIGWALIEQKFEEHKGQIIGLGSRIIPMDQASLGDFEKGNPISQTAERTKFRSIRRLRERHLLRRERLHRVLNVLEFLPEHYAAQINFSDKPGQFMQGKEPKLVYRLNPITQKQDFIFLTSFNEMMDDFKSHQPDICNNGLKVPYDWTIYFLRKKALTHKIEKEELAWLLLNFNQKRGYYQLRGEDESEEKNKKVEYHSLLVMEVNQQEDIKKGDEKWYNVVLENGWVYHRKSKAPLDWVGKTKEFIVTTELNEDGTVKIDRDGKEKRSFRAPAEEDWTLVKQKTENEIEKSNKTAGCYIYDKLLENPAQKVRGKLIRTIERKFYRNELTSILEKQREFHSELQDRNLYQECIQEIYRTNDNFRNGIENKDFLYLFLDDIIFYQRPLKSKKSLISNCRYETREYKDKHGNIVKDPIKCAPKSHPLFQEFRLWQFVHNLRIYQRGKVLDGKLHIDVDVTNDFLKIEGEWVALFEWMNDRQKIDQKTFFKYPPFQLKKLAADYRWNYVEEKIYPANETRGAFLEKMKQIPSFSIDWMTREREEALWHILYSVKDKKELEKALVTFGRKNDLDEAFAEVFKKFPPFANDYGAYSVKALKKLLPLMRKGRYWNEANIDQETKVRLSQISERLESIGHDPGKIQDISDDYLSKNILKSLIDCTEPFQGLNTYQACYAVYGKHSEANEIIKWSNPADIDQYLRDVFKQHSLRNPVVEKVIAETLRVISDIWKKYGESRENFFNEIHIELGREMKNPADVRKRITESVTENENTNLRIKALLAELSYDKEIENVRPYSPGQMEILKIYEEGALNSSQDLPDDIIKISKNAQPTNAELTRYKLWMEQKYRSPYTGEVIPLGKLFTPAYEIEHVIPQARFFDDSFNNKVICESEVNKEKSDWTAYEFIRENSGKIIELSFGKTAKIFTIEEYEDFIKENYARSKGKMKRLLMDEIPDSFIDRQMNDTRYISTIVKTLLSNIVREENEQEATSKNILSTNGAITTRLKQDWGMHDVWNEIITPRFERLNSLSGSNNFGEMTQKDGKQIFQTRVPIELQKGFTKKRIDHRHHAMDALVIACATRNHINYLNNQSAKQSGKDTRYDLRCLLCYKDHRGLNGNSQWSFTQPWDSFTMEAKDKLLSTIVSFKQNTRIINKTVNYYQVLRRDEKDQLKKVLIKQEKGDNWAIRKPLHKDTVAGAVCLRCKKTVSLSSALDEWKMIADKSLRHLVMKLTSENFDKKKILKYFKEQGNELEGKDISRVEISYFDSENVATRVKIDDSFSSKTIESITDTGIRKIMLSHLAKYNELKDGKTIEHPELAFSEDGIDEMNKNIMILNHGKFHKPIYKVRTFELRGNKFQVGTAGNKSSKFVEAAKGTNLFFAIYQDSSGKRSYESIPLNEVIERQKQGLQSVPETNAKGHLLLFFLSPNDLVYIPNTEEIANSHMIKPDKLSKDGCTRIYKMVSSSGAQCFFIGVNISSPIWNKVEYSALNKMEKSIEGIMIKDVCRKLHTDRLGNILNFQ

SEQ ID NO: 3288 - protein, 1519 aa, unidentified
  REGION 1..1519: note = Description of Unknown: Cas Enzyme sequence
MKTLGLDLGTNSIGWSIRNTDNIANNDSQIEKFGVTIFEKGVGEGKTGEFSFAAQRTKKRASRRLYQARKYRLWKTLEIMIELGFCPMTIENLNRWRKYDKKKAHNGESGRAYPVNDILFDSWIKLDFDGDGKPDYTSPYQLRAQLLEKKLDLSIESDRYKIGRALYHIAQRRGFKSSRKDAIPDDSGERQDTKSEIKKETEFEKNLQKNFGKSLIDFPTIGSALAFIERQGYRIRLEWIQNTFRKHYKDECTIIFEFQGIGLGSELYTKLIESRKNHYNGSIFKQRPLRSQKGLVGTCTLESKVFKDPKLGKITILGKPRCPISHPEFEEFRALSFLNNVQYRIENGWFSLSWEQKTEIYNRLFFRSSKPHFLFSEIRKMIEKQIGKQLDYVNRTINYSDKTNVSGCPLSACLKDIFGENWYAIKIETNLSRKTRNEKEHLISYSVDDIWHVLFSFDNEDLVSEFAENKLGLDEQRVKKFVKAWKTCKEGYSMLSLYAIKKINRFLREGFIYTEAVLLANIPQIIGDELWKNVENQNLIKQSIAGLIKKNREEKKILAIVNNLIAEYKSLRVNEKYGYKDPDYILNDSEKDDIIDKIVETYGKSTWSLKTDNKSAITETVIFLFQCAFQNGFPIKYFGEERYHVIDKDGQLFHKSASNQFYKLLRLVDTIKDFLRENFPSITEMQLSKLYHPSMIEIYPSSYPDQQDGKIYLQSPKTGAFKNPMAMRTLYELRKLINYLIKTGQIDEETRIVIETARELNDANKRWAIDEYQRKKQSENHEFAEAIRGLIENKELENPPHPENVEATDKVRLWYEQTTQKQVVKGTGEYSRSIWSNQSTTLFTNLSLLKTAIDKYRLWKEQKCTCIYTGKIISISDLFDENKTDFEHTIPRSISFDNSLANQTVCYANYNRNIKKNQLPTSLPNYAVDALGFPAILPRLKEWEDKVEHLKSMVEFWKGRSKSDSNSKMISSTSSVSEKDFAIRQRHLWQMDLDYWRNKLERFTMTDVTSGFKNSQLVDTQLISKYALHYLRTAFNTVEVQKGTVTAVFRKVLGVQSVDEKKRRDKHSHHAIDATILTLIPYPAKREKILKYFFELDEIKKLHDERNQKDRLLWLETELTKEIGDLSLPNTNLILKSIEDQILINNIARDKSLVIGKKYVRRRGRIVYLRDKEGNLLFNSNGEQKLKIAQGDCIRGELHKDTFLGAIRQPKLDETGKWLKDEDGKVILEPDLIFVVREPLCFKKDASSSGFKSLNEIRSCIVDQNLYKIIETQSNEKGFREACTEGFWMLNKRGEKVNKIRHIRIYVRNKSPLHIKKHTNLSHKELTILENRDHKKNYYAANAENVLYGYYWNGKSKNRSFICLNLFQVASIRNTIHPKKLKDYFEPFKELGRGKIKKTIPLYEVLRPGIKVLFYKDNREELLELDESSRLKRLYRVTRLFSALTGQIMFEFHKEARTDDELMKEYPEETFGKRGKNGFSEFNFEIPCPRLLMSPVSFDFIIEGRDFKVQPDGKIIFIS

SEQ ID NO: 3289 - protein, 1524 aa, unidentified
  REGION 1..1524: note = Description of Unknown: Cas Enzyme sequence
MKKILGLDLGTNSIGWALIDQNFPEKKGKIIGLGSRIIPMDQGTLGEFERGNSVSQTKERTGFRGVRRLRERHLLRRARLHVVLNALSFLPEHYSQAIDFDIHYGQFKDERESKLVYKSCGPNGKKEFIFKNSFNEMMTDFSSRHPELLQNNHKVPYDWTIYFLRKKALTQPIEKQELAWLLLNFNQKRGYYQLRGEEEESKENKLVEYHALRVVDVINSGDRKGKDDIWYNVILENGWVYRRTSKVPLDWTGKIKEFVVTTDLNDDGTVKKDKDGKEKRSFRAPLPDDWTLIKKKTEFDIERSNKTVGCYVYDALLHNPAQKIRGRLVRTIERKFYKEELKLILERQREFHPELKDQQLYSICIHELYKSNESHRNNLAGRDFTHLFMNDIIFYQRPLKSKKSLVSNCRYETRSYKSQDGDVAFEPVKCIAKSHPIFQEFRLWQFIQNLRIYRKDAEFEGRVLPELDVTRELLKSEEEWVALFDWLNDKKDIKQETFLKYPPFKIKKAAVNYRWNYVEDKIYPANETRHQIISRMSKVTNVKEGFLTREIEENLWHILYSVEDRLEIEKALRTFANKNELGEEFVEHFKKFPRFEKEYGAYSAKAIKKLLPLMRRGKYWKEDDINPYVKKRIESIMERLSSVNYDRTKIGDITDDDIPKQVLKSFIDCSNPLQGLNTYQACYAVYGRHSEEGEIIRWKDPSDLDHFLTSVFKQHSLRNPIVEQVISETLRVVRDIWKHYGNSQENFFDEIHIELGREMKNPADQRKKMTAQISENENTNLRIKALLIEMSADPEIESVRPYSPMQQDILKIYEDGVINSGIELPEDILKISKNAQPSKAELIRYKLWLEQKYRSPYTGEVIPLSKLFTPAYEIEHIIPQSRYFDDSFNNKVICESEVNKDKDNSTGFEYIKENSGKIIELSMGRKVKLFTLDAYQDYVRDHYSNNRGKMKRLLMDDIPEAFIARQLNDTRYISKVVKNLLSNIVREEGEQETTSKKVIASNGTITSTLKQDWGLNDIWNELVTPRFERLNEITGSNHFGEWLSRNGKRVFQSRIPLELQKGFSKKRIDHRHHAMDALVIASATANHINYLNNEYAKSDKRYDLRSTLCIKNKIDENGNYQWLFNKPWDSFTIDAKTRLESIIVSFKQNTRVINKTVNWYQKWEKDEGGTLRKIFVKQDKSDHWAIRKPMHKDTVAGALTLTFKKQVRLSVAIDQWEKIVDKSLKKEVRTLLSQGKDKKAILRYFKSNDNKFNNHEISRVEVYYMDSENVASRVAVDDSFTSSAIRSITDTGIQKILLNHLAKYDEIRDGNAVEHPETAFSPDGMDELNKNIIGLNGGKGHKPIFKVRCFEPKGNKFSVGNSGNKKLKFVEAAKGTNLFFAIYSDDSGKRNFESVPLNIVIERQKQGLSIVPEENDKGNKLLFYLTPNDLVYVPTVEEKGNPGFDGQFSDLYAVTPRVYKLVSSTGSQAMFIKAEVASVILNKAEFSPLNKMEKSVDGIMIKDCCWKLKTDRLGNIIGLIGRNP

SEQ ID NO: 3290 - protein, 1236 aa, unidentified
  REGION 1..1236: note = Description of Unknown: Cas Enzyme sequence
MKKILGLDLGSASIGWAMISENEINGDVKREILGMGSRIIPYEGTEGKDFEKGTGESRNSIRTKIRTARKGYDRYQLRRKYLVQELINKMMFPSEEIKNIPKIQLWELRNKAATSKVSLEELGRLLLWLNQKRGYKSSRSDANLDKKDTEYVANVKSRHEMILEKNFTIGQYFYNELINDDFFRVKENIFPREAYIEEFDSICKQQQLHYPQVLTKEFLEKVRNEIIYYQRPLKSQKGLVSVCEFEGFWCKGKDGKEYFAGPKVAPKSSPIFQISKIWENINNIRIDDKFGKTIVLTPEEKLLLFQHLDNNEKLTPSDIIKLLSLNKNECFFNKQIANGIKGNITKAAIKKCFGESTDYHHLLKFDLHISEGIQVDKETGEIFEDIPVKLVDPKIEHEPLYQLWHTIYSISDTGECCRVLCEKFGIEKEIAEKLANIDFTKGGFGNKSAKAIRKTLPYLMDGFVYSDAMRYAGYDHSNSLTKDENLQRKLLSKLKQLPNNSLRQPIVEKILNQMVNTVNAIIEKHGKPDEIRVELARELKQSKEERSDTSIFQNKRQRENEQISSSLEEFGLRATRNNIVKWRLYQEMDNEDKKLNAICIYCGQPISITEAIKGNDVDIEHIIPKSKLFDDSQSNKTLAHRRCNTDKGDRTAYDFMKGKSEQALNAYVERVNKLYSAKVIGKGKRDKLLMTESKIPNNFIDRQLRESQYIAKKASEILQSICYNVWSTSGSVTAELRHLWGWDDVTMNLQFSKYKELGLTNIVEWESEHGKNKHTKEVVTGWTKRDDHRHHAIDALTIACTKQGFIQRFNTLNSSKTREDMLFDIEKRSFDFREKLSLIEKYIVSEQPFTVKQVEDNAANILISFKSGKKVAVLGKRKVGRKGNKRVVQTGIIVPRGALSEESVYGKIKRVEVNKPIKYLFENPHLIFKSNIKKLIEDQLAANNGDVKMALASVKNNPIYIDKDKKVVLEYASCLKDEYVIKYNVDINFNKVDKVVDGNIKHILQTRLEKFNGKAKEAFKDVQRDDKTLIKWYEDEGLERPIKSVRCYTGLSAVVPVKKDADGNDIGFVKPGNNHHIAIYIDKDGKKTEHICTFWHAVERKKYGIPVIINNTNEIWDKIQQKPESEYPESFLKLLPDPNLTLHLSMQQNEMFVLGMTTEEFENAITINDYRTISDKLYRVQKLGGNDYTFRHHLETQLVDDANSQKSQRYLRIRSISSLMAINPLKVKINCIGNID

SEQ ID NO: 3291 - protein, 1377 aa, unidentified
  REGION 1..1377: note = Description of Unknown: Cas Enzyme sequence
MKKILGLDLGTTSIGWALVTEAIDESEKSSIIRLGVRVNPLTVDEQSNFEKGKSITTNADRTLKRSMRRNLQRYKLRRENLIEILKENRFIDDATLLSENGNKSTFETYHLRAKSATNEISLNEFARVLLMINKKRGYKSSRKAKNQDEGQLIDGMEIAKKLYIENKTPGQLVFEILKSGKKGIPDFYRSDLASEFDIVWTYQKQFYPEILTDEFRDEIMGKGQKVTSSAFWKKYGFNTAEIKGSRDEKKIHAYDLRSKAIDTQLSKEEVAFVLAAINNNLNNSSGYLGSISDRSKELYFNKQTVGQYLMTQLKQNPHTRLKNQVFYRQDYLHEFNTLWEIQAKFHKELTPELKEEIRDVIIFYQRRLKSQKGLISFCEFESRQIEVEINGKKKVKTIGSKVCPKSSPLFQEFKIWQILNNIEVKEKTTRASRLLMQEEKELLFTELSIKNKVSKSDALKLLFENHKDLDLNFKEIEGNRTQAALFEAYFKIIEQSGHDKFDFTKMNAFKITEIVKSIFEGLNYDTDILSFNSDIEGDAYEKQPMYQLWHLLYSFEGDNSKTGDTKLIDKITELYGFEKEHAMILANIVLQSDYGSLSTKAIRKILPYLKEGNEFSVACEYAGYRHSKGSLTKEEIENKVLKDKLDILPKNSLRNPVVEKILNQMINVVNTVVESYGKPDEIRIELARELKKSAKEREELTTSIGKSTAEHEKFRAILQNEFGLAHVSRNDIIRYKLYLELEPRGFQSLYSNTYISPNKLFSKEFDIEHVIPQSRLFDDSFSNKTLECRSVNIEKGNDTALDYVYAKQGQAGLAEYVNRIDELLKAGRISKTKYKKLKMKGDEIPDDFIARDLRDSQYIAKKAKAILEELVRTVVSTSGSITDRLREDWQLVDVMQELNWNKYDLLGMTEMIENRDGHKIRRIRDWTKRNDHRHHAMDALTIAFTKISFIQYLNNLNARSDKAGSIYGIEQKELYRDDCGKLKFKPPLPLHDFRAEAKKHLENTLISIKAKNKVTTININSSNKKGGVNKKRQLTPRGQLHLETVYGSIKQYVTKEEKVGSGFNAEQIAKVANKRYREALLSRLMEFNNDPKKAFTGKNSLEKNPAYLDQLQIKKVPDKVKIVWEETIYTIRKEISPDLKIDKVIDVKIRSLLQSRLDEFIGDSKKAFSNLNENPIWLNKEKGISIKRVTITGVSNAIALHDKRDKEGDLILDNDSKTQAVDFVNTGNNHHVAIYKDEEGNLHENVVSFFEATTRVNQGFSIIDREYKRSDGWEFLFSLKQNEYFVFSNEKTGFNPQEINLLDPANYHLISPNLFRVQKFGSLLSGFWFRHHLETRIETSKELKGITYKVIQSAKNLESIIKVRINHIGQIVKVGEY

SEQ ID NO: 3292 - protein, 1239 aa, unidentified
  REGION 1..1239: note = Description of Unknown: Cas Enzyme sequence
MKKILGLDLGSASIGWAVISEKEQNGEVKREILGLGSRIIPYEGTEGKDFEKGTGESRNSIRTKMRTTRKGYDRYQLRRKYLVNELIRTKMYPTEEEKNLPKKQLWELRSKAVTSKISLKELGRLLLWLNQKRGYKSGRSEANMDKKDTEYVAEVKSRHQTIKDKNLTIGQYFQQHLSNNEFFRVKENIFPREAYIEEYEAICKLQQVHYPDVITNKFIERVRNEIIYYQRPLKSQKGLVSVCEFEGFLCNGKDGKEYFVGPKVAPRSSPIFQIAKVWENVNNIRIENKFGSKKDLTLEEKQALFNHLENNDKLTQTDIIKILGLNKNECFFNKQIANGIKGNVTKMAILSCFDRPEDYKHLIKFDFETIEKNELCYLYDRKTGEILSENKVKFVDPKIENEPYYQLWHTIYSLSDIDECSKVLQKKFNIKPDIADKLAKLDLTKGGFGNKSAKAIRKILPYLMEGFVYSDAMCFAGYDHSNSLTKDENIKRNLLDKLKPIANNTLRQPIVEKILNQMVNVVNAIIEKYGKPDEIRVELARELKQSKEERSDTSRFLSKRERENEQIEKKLQEFGLRATRNNIIKWRLYEEMDNEDKKLNAICIYCGQPISLTEAIKGSDVDIEHIIPKSKLFDDSQSNKTLAHRRCNTDKGDRTAYDFMKGKSEQALAAYVDRVNKLFSSKVIGKAKRDKLLMTEDKIPQNFIDRQLRESQYIARKAREILQTICHNVWSTSGTVTAELRHLWGWDDVTMNLQFPKYKELGLTEIKEWESEHGKNKHAKEVISGWTKRDDHRHHAIDALTIACTKQGYIQRFNTLSSSKTREDMQRDVDSLSAEYREKLNLLEKYIVGEQPFTVEQVEEKAANILVSFKAGKKVAVVGKRKIGKRGNKKVVQTGIIVPRGALSEESVYGKIKKVEEKKPLKYLFENSHLIFKPLIKQLVEERLDKFEGDTKKALASIKKEPIYIDNEKLIPLEYGSCYTDEYVIKYNVDVNFNKADKVIDGNIKRILQARLEKFNGKPKEAFKDVQCNDMILKWYEDEGLDRPIRSVRCHTGLSAVVPARKDEKGKDIGFVKPGNNHHIAIYTDKDGNKVEHICTFWQAVERKKYGLPVIISNTNEVWDTIQQKPEGTFPESFLNLLPEPNLILHLNMQQNEMFVLGMTNEEVENARINNDYRAISDKLFRVQKLGEKYWVFRHHLETQLVDDVNSKQSKRYILLQSLSALFSLNPTKVKINCIGNLV

SEQ ID NO: 3293 - protein, 1238 aa, unidentified
  REGION 1..1238: note = Description of Unknown: Cas Enzyme sequence
MKKILGLDLGSASIGWAVISEKEENGKSEKEILGLGSRIIPYEGTEGKDFEKGTGESRNSVRTKMRTARKGYDRYQLRRKYLVQELIKNEMYPSEVEMNLPKIQLWELRNKAVNTKITLKELGRLLLWLNQKRGYKSSRSEANMDKKDTEYVAMVKSRHQTIKEKNLTIGQYFYQQLSKDEFFRVKENIFPREAYIEEFEVICKQQQIHNPNIITNKFIEKVRDEIIYYQRPLKSQKGLVSICEFEGFWRKGKDGKEYFVGPKVAPRSTPLFQLAKVWENVNSISIENKFGNKIELSPEEKLSLFDHLDNNEKLTQSDIQRILGLKRNDCFFNKQIANGIKGNVTKMAILNCFDEPEKFKHLLKFEYKICEDTLVDKETGEIIDNTPIQYIDPIIEKEPYYQLWHTIYSISDMEECSRVLQHKFNIEPQIADKLAKLDLTKGGFGNKSAKAIRKILPYLIEGYVYSDAMRFAGYDHSNSQTKEENLHRKLLERLKPIPNNSLRQPIVEKILNQMVNVVNAIIDKYGKPDEIRVELARELKQSKEERSDTSKFLSKRERENEQIVKKLEEFGLRATRNNIVKWRLYEEMDNEDKKLNAICIYCGQPISLTEAIRGSEVDIEHIIPKSKLFDDSQSNKTLAHRRCNSDKGDRTAFDFMKSKSEQALAAYVERVNQLYSSKVIGKAKRDKLLMTENKIPQNFIDRQLRESQYIARKAREILQTISYDVWSTSGTITSELRHLWGWDDVTMNLQFSKYKELGLTEIREWESEHGMNLHTKEVISGWTKRDDHRHHAIDALTIACTKQGYIQRFNTLSSNKTREDLKRAVDECSVEYREKLNLLEKYIVSEQPFTVKDVEEKVANILISFKAGKKVAVIGKRKIGKRGHRKVVQTGIIIPRGALSEESVYGKIKKVEGKKQLKYLFENPHLIFKSRIKQLVEERLLEYDNDAKEALASTKKNPIYLDKDKSVVLEYGSCYADEYVIKYNVDTNFNKVDKVIDGNIKRLLQQRLDKFNGKPKEAFKDVQRDDTVLKWYEDEGLDRPIRSVRCYTGLSAVVPVRKDENGREIGFVKPSNNHHIAIYSNAEGKKVEHLCTFWHAVERKKYGIPIIISNTNEVWDNIQQKQEGTYPESFLNLLPEPNLNLHLSMQQNEMFVLGMTEDEYDIAKKLDDKPTISKSLYLVWSLSESDYWFRHHLETKNAEIKSVTGAKESKRYFRFKSIKAFTEQNPIKVKIDCIGNLV

SEQ ID NO: 3294 - protein, 1382 aa, unidentified
  REGION 1..1382: note = Description of Unknown: Cas Enzyme sequence
  MOD_RES 755: note = Any amino acid
DPIMKRILGLDLGTTSIGWALVNEAENNEEQSTIIRLGVRVNPLSVDERSNFEKGKSITTNADRTLKRSMRRNLQRYKLRRAQLRKVLIENGFISEDTLLSENGKNTTYESYRLRAKAAKEEITLEQLARVLLMINKKRGYKSSRKLKGQDEGQIIDGMTIAKKLYDENLTPGEYLLSLHKEGKKYSPDFYRSDLLDELDKIWSEQSKYYPEILTEDFRKQIEGKGKLNTSKIFLAKYQIYTADNKAPDKKGQALEWRVKATKEKLPIEEMAFVIADVNGSISNSSGYLGEISDRSKELYFKKQTVGQNLYEKLISDRNFSLRNKTFYRQDYLDEFEKIWETQAKYHKELTPKLKKEIRDIIIFYQRRLKSQKGLINICEFEGKEIEYIVDGKAKKKLVGPRVCPKSSPLFQEFKIWQILNNVKVISKKDNADRFLYPEEMDTLAQELAIRESLKSDDALKILFNNYKDFKLNYEKLEGNRTISSLFDAYKKIVELSGHDISGFTKQRAPEVINAIKEVFTALGFNTGILWFDSLAKGKDLENQPLYILWHLLYSFEGDNSRTGNEALINKIMALTSFPKEFAAIISSISFQPDYGSLSTKAICKIIPHLKDGIAFAGRKERPEEPSACEYAGYRHSKHSLTKEEIENKKLLDRLEIIKKNSLRNPVVEKILNQMVNVVNAVIEKYGRPDEIRLELARELKNSAEERKSLTDTINKNTIENEQIRKILRTEFGLQYISRNDIIRYKLYKELEYRXYKTLYTNTYIPKEKLFSEEFDIEHIIPRSRLFDDSFSNKTLETREANIEKGNDTAYDYVLRKYGQEGLDSFLACIKDLEEKRIITGSKYKKLKTSINEIPDDFIDRDLRDTQYIARKAKEILETISKHVVTTTGSITARLREDWQLVDVMKDLNWDKYKALGLTEEIEGKNGQRVRVVKDWTKRNDHRHHAVDALVIAFTKRSYIQYLNNLNARSDKGSEIFAIEAKELERDNKGKLRFKAPIEIKAFRTIAKEHLENVLVSIKAKNKVVTRNINITKKKNGLNKKIQLTPRGQLHNETIYGSALRYVSKEEKVGAAFNEELINKVANKKYREALLNRLHTNGGDPKKAFTGKNSLAKQPIYLDKQRGIVVPDKVKIVNKELIYTIRKEVAPGLNVEKVLDKKVRLCLEARLKEYNNDPKKAFSNIDEYPIWLNKEKGIKIRRVTITGVANAQALHDKNDKDGKPVLDEYGNPIPVDFVNTGNNHHVAIYRDSKGILQERVVSFLEATTRAVLGLTIIDKEYNSELGWEFLFSMKQNEYFVFPDKDFKPNEIDLMKSENYSDVSPHLFRVQKLSTKDYWFRHHLDTTVDVHNALKGIAWLRIGPSGLEGAVKVRINHIGEIVFVGEE

SEQ ID NO: 3295 - protein, 1373 aa, unidentified
  REGION 1..1373: note = Description of Unknown: Cas Enzyme sequence
MEKKIGLDLGTNSIGWAIRNTLIDDPNISQIEKFGVVVFPKGVGEGKSGEYSYAAERTKKRSGRRLYQVRKYRLWATLEILIKEGYCPLSIEELDGWRKYDKEKKREYPQNEIFEQWIRLDFNNDSKPEYDSPYHLRALAIEKELTKYEIGRALYHIAQRRGFKSSRKTGTNEETAVYKGSSKSGAKGVDEIMELIEKEGTLGAALHSIQSNGERIRNRYTLRKHYKDEVGKICEKQNVDEETFKKIDNAIFYQRPLRSQKGLVGKCTLEPKKPRCPISHPDFEEFRARTFINNIRYKLEDSNQWVRIDNQIIEEIFLEKFLRQKPDFNFDEIKKFLEKRGIQGRLNYKDFTAVSGCPVSARLKNIFGEEWRNIKITYKDKTYTNEDLWHVLFSFEDEECVVEFAIVNLGLNEDKTKAFVAAWNQLPDGYSMISLNAIRKILPFLREGLIYTDAVILSNIPFVIGNEIWAENRELITKEIREIVEKNREEKKIINIANILISQYYALAYEERFGWKNKEYVLDEADKKQVLETIVEVWGEKSWKELTEGYRKSIFQQVTGLYQQFFKSSERKHFTMPKLIDSISGFLSDNFNCILVPQKNLYHPSQIEIYPKVKESDEDGKCYLPSPKIGSFKNPMAMRTLHELRKLLNHLIKTDQIDQNTHVIVEVARQLNDANKRWAIETYQRQRQSENQEFAKAIIELNKNGYPNISPENPENIDKFRLWFEQIENSGEVLDEVKKLKTDIEKYRLWKDQNCQCMYTGKVIKISDLFNENVVDFEHTIPRSKSFDNSLENLTVCYADYNRSVKRNKIPTELSNYDKDNEHGNAIVPRLKMWEEKVKQLEKNIENTKKRSRAAMDKDQKDSAIRQKHLYQFELDYWRKKLERFTIKEITSGFKNSQLVDTHIISKYAFHYLKSVFERVDVQKGSVTAEFRKIYEIQPDDEKKYRGKHSHHAIDAATLTLIPTSAKRDIILQKAYTFNEETGKKYHEKPYPFFNIEHIQRIDDIIVVNNVSKNQTFTPSKRVVRKRGRIIYLRDSEGRLLRDSDGNPKPKIAQGDSIRGELHMDSFYGKIKVAKRDSEGKPLVEDGKFVFEEKNDGFKFVIRRPIDDLKDLKNIVDPHLKKIVESQLNGRSLSQAISDGLWMYDKKGNKVNRIRHVRCFANDVTDPLQIKKQTHISTKTSKHLDNQEHKHFYWAKNASNALYGFYQNKDRTLRGFEMLNLMQVTQIRKTINVSKEEDYFEPQKLVGRGNNKVAIPLYAVFKAGQRVLFYKETPEELKQLDYDELRKRLYYIMVLFDKDFGRIKFQYHLESRNDNELTEAYPVETFGKSGKNGFSSFDWDFTKPRLLLSLGNFNFIVEGRDFQIFPDGVIDIF

SEQ ID NO: 3296 - protein, 1507 aa, unidentified
  REGION 1..1507: note = Description of Unknown: Cas Enzyme sequence
MTKILGLDLGTNSIGWAIRNTINNKNEQIEKYGVTIFDKGVGIGKSGEFSFAAERTKKRSTRRLYQSRKYKLLKTLEILIEHNYCPLSMDGLDRWRKYDKEKAVKGESGRAYPVDDIPFDRWIKLDFNGDGKPDYSSPYQLRAELITFKLDLSKEIDRYKLGRALYHIAQRRGFKSSRKDVAVQDTGEKQDAKSELKKETEFENNLQKRFNKSISDFPTIGSALAFVEKQGERVRLEWIQHTFRKHYKDECTKIFEFQGIGIDSDLYKKLIESNRNRYNGSIFFQRPLRSQKGLVGKCTLETDKYRCPISHPEFEEFRALSLLNNIQYRKDKDGEWIGLSDELKKEIYNKFFYRPSKSHFNFSEIREYIQKREFKDKSIAGILAYKDRTINYSDKTNVSACPLSARLKDILGDDWRSYQKTTNLSRINKKTGEEHKIKYNIEDVWHVLFSFDDEELVSQFATEKLELDDEKTKKFITAWKACPDGYSMLSLNAIKKINVFLREGFIYTEAVLLANIPEIIGKDNWGIEENQQFIKRSIAQLIASNREEKQVISIANNLVAAYKALHDNEKYGFKDTTYTLTESDKSDILKTIIDTIGTKTWEEKTPNKSEIVDKVTHLYQCIFRAGFETVLLGEDRYHVIKIKEKTYYKSTSHQFYKLPRVVDTLKDFILVNFPEVDKKQLDKLYHPSMIEIYAPSKPSKDDGKLYLQSPKTGAFKNPMAMRTLYELRKLTNYLIKTGQIDEETRIVVETARDLNNANERWAIETYQRQRQNENNEFADAIRSLLENKDYTTQPNPESDEDIDKVRIWYEQVKKNQVSKGKGEYVENKWTNQTTDLFQKLSQAKQMVDKYRLWKEQKCICIYTGRVISISDLFNENKVDFEHTIPRSISFDNSLANLTVCFAHYNRNIKKNKIPTQLPNYDNNAQIGPDVYTAIKPRLKDWEDKVEHIKTMVEFWKGKSKHASTKDQKDEAIRQRHLWVMELKYWQNKLGRFTMTEVTSGFKNSQLVDTQLISKYAMHYLKTAFNTVDVQKGSVTSDFRKIVEIQNTYEKKSRAKHSHHAIDALILTLIPHAAQREKILKLFYEYLEEKQIAKETGDYKKHDWLKMELNREVSKLELPALEAIINEIDNNILINNIAQDKALIKGKKVVRRRGRIVYLKDKNGKPLLDKNGNPKPKMAKGDCIRGQLHKDTFFGAIKEPLREETSGKPMLEDGCYIYEKNNENKDKITMVVRVLLKDFTSEKDVESIIDPKVKHSISLTLKERLELKQPFKEAITKDFWLLDNEGNPIKHDKNGRMLSPIRHVRCKVAAGRGFMTKEKSIALKKQTNLSKDEYKQWYYAQNADNYLYLLYELETEKGIKRNFRILNYFDIAQLRTNSIKELFDNPYFLYLERGDKSKKVFKLSGVLKTGIKVITKSDAKEVVADLSKDEIAKRLYKVYKFNEMGSTGYLYIQHHLEARPDKELGDGDTIIDVSKYQPRLKLSSDNFNCLIEGKDFEIKPDGEILFLN

SEQ ID NO: 3297 - protein, 1434 aa, unidentified
  REGION 1..1434: note = Description of Unknown: Cas Enzyme sequence
MSNNNQEIKKILGLDLGTNSIGWAFIEESSDSKAGKIIKLGSRIVPMDTNMLNDFSAGKPVSKNSTRRMARGARRNLQRYKLRRQRLILALQTLGWIPTIEDPKLFSEYLAKSISEPNRKLLPWELYELRAKAMKEIISLEEMARILLHLNQRRGFNSNRKAQEHDETATNSKEIDSNSEEENTDELIKESFEKVRIKQVVEESGKKISFRITLEDSREGKCNVRLQEGEECELQIKPKTLRNGEINYFFAVANRSSWGYRKDYINKLIEESGLTVGQYYFQEMRSNVHFRVKENIIERKKLVEELNRIWEKQLDLRKANGTSLHLEDEAASEILAKILYKSNQEKQGQLRNMKLQDIFSKDIIYYQRPLKSQIKSIALCKFECEHGIQKRVIPQSHPLFQEFRILDLINNLRIYNKALQDCSSQFITNEKRDELIILFNKQEIIKSKKILEVLIPKEFRDDYTLSHDVGSDKEFIGNKTLIRIKKALKGDPREKEIVNDTKAMESIWHLLYSVDTNEAIVRALIRPKNDFKLDESTAEKLSKIIFESKYGSLSAKALRKLLPLMRSGKLWSVEGIEAVNGLRILMDKLIDGEIDDSILNKTRKFIEAHGIKDIYGFTALPYWLAASIVYQDHSNVGEIKMFLSPDEIKPIINNDLRNPIVQQILNEAMQVVADIWKTYGKPDEIRIELSRDLKNSSAERQKITERQNENKKINSAIKNKLVELKRGDTDLERYKLWMEAFDQNGIVPKDAAEYRKHLMDTIKVSGAELEKYKLWEEQKHISPYTGRPIPLSRLFNGNEYQVDHIIPKQRFFDDSLSNKVVVEANVNADKGKSGRNLMAMEYIELGSTDSQIKLLNTDSYIELVDRTYRGAKKKKLLSKEIPQDFVISQLKNSQYISVAIRKQLERIVGKENVHTTTGGITDLLREQWGIAHLFKELLLPRYEALEAKLAQKGKPEKIIDYVFDQQRQKHILKLKDYSKRLDHRHHAADALVIACTKPIHIQRLNNLGQIYSSKELKDRQVFENPKVRKHGGAWHFPEPWKGFVADAKENLEGCIVSVKNRKRLVTKGRNYYKMLVDGKPTQAKQKNGKLLSVRVQLHDQLPFGQSKELMKTKLKECLDLLKRMRAPKLQWKDDQIKSCFVNKQDFDLSVKLMDDFNNDPAKVIKHLQKTGQSPELLEREFTLVIPRYEKRIALNTLTAPQVKDIIDPVIREQVIKHLQPFGGIEKDALKKAFSGENIAKFNKDRTVPVGKVRVYQDRNMILGESAKFQLNRKNSLNDKLFIETGGNYAFAIYENQSDLDASVWPARRETAVISNFDAIQKVINGDEIFPEVTGSRKFILRANDVIYMPLVEQKPNFVDWDNSKEICSRLFIMTQATGNIVYFAPISVAAMSMPKFEFGTQDALYMLEGKPMKDSCIPMKVDRIGNLVPLFNYD

SEQ ID NO: 3298 - protein, 1399 aa, unidentified
  REGION 1..1399: note = Description of Unknown: Cas Enzyme sequence
MKTILGLDLGTTSIGWALVKEAEPFSDEKSEIVRLGVRVIPLTVDERTSFENGKSITTNALRTQKRGMRRNLQRYKLRRQALIEELKSTGWIGNDFIFSETGPGSTFRTFRLRAKSASEEVTLGDLARILLQINKKRGYKSSRKMVSSDDGQAIDGMAVAKEMYDKGLTPGEYVYQRMLEGKYAIPEFYKSDLQEEFDRIWALQKSFHTELTDELYRKLSDRNKSQTWAICRDELGIQGLKSSFTGKERLKEAYRYRHLAATQEVNMEVLTCALQEINGQKASLSGLLSKISDRSKELYLNNLTVGQMLLKRIEDNPNNSLKNIVFYRQDYLDEFERIWTVQSKYHTELTHELKKRLRDIIIFYQRPLKSQKGLISLCELETKDIEVAIDGVKKMKNIGPRVCPRSSPLFQEFKVWQTINNIFVNGAALDDEDKSVVAKELMFKDKLKDSDLLKLLFKTTKGQSVNFKEVDGNRTMATLMKACFKIAENLGYDDIGLSKLSSEDQKVRIEGIFKEQGFKTGFLHFDSSLASPEFENQDSYRLWHLLYSYEGDKSASGNESLVKCIMDLCSMDEGSAKILASCTFLPDYGSLSAKAMRKILPYMKDGLEYTAACAMAGYRHSKRSLTKEELDTKEYSDRLSLLPKNTLRNPVVEKILNQMINVVNSVIDVYGKPDEIRIEMARELKKSAKEREEAQRDIASSTAESQKVIEILKGEPFFIQFPTRNDIIRYRLYQELAQNGFKTLYSNTYIPKDKLFSKEFDIEHIIPQALIFNDSFANKTLESRQCNLEKGKETAMDYVKSKYDETGVQAYCDRVNGLIGKGISKTKAKWLLMEGKDIPEDFINRELRDSQYIAKKAREILESLVKFVVPTTGSVTARLREDWQLVNVMQELNWEKYARLGLTGVREDKDGRRIPFIQDWTKRNDHRHHAMDALTIAFTRRQFIQYLNHLNSKIDVVSWDKKDLDLRDYDLEDIKFGNLSAGDRYGIVKALQDKFLYKDGNDKYRFVPPIPLDEFRRQAKEQLSDILISFKAKNKVCTRNVNVTKNKGGANRKTQLTPRGPLHNETIYGSSLEYVTKENEKIGSSFDAERITTVCKKKFRDALARRLEEFGGDPKKAFTGKNSPEKNPIWVDEHHSEQVPAKVRTVTMGQRFTGRKPIDATLKIEKVIDKRIREILQARLDEFDGKAAKAFSNLDENPIWLNKEKGIAIKRVTVSGPANPVPVRFKRDKDGKPIIDDAGKTIGADFVTPGNNHHIAIFRDSSGKLQEHPVSFLEATIAKSHGLDVIDRNYNKDEGWEFLFTLKQNEYFVFPNSETGFNPLDYDLTDPRNYAEISPNLYRVQSISTNDYFFRHHLETTSEKNNSLYGITWKRIRNASALEGLVKVRIDNLGRIVAVGEYD

SEQ ID NO: 3299 - protein, 1001 aa, unidentified
  REGION 1..1001: note = Description of Unknown: Cas Enzyme sequence
IGPRVCPRSSPLFQEFKVWQTINNILVNGAALDDEEKSVIAKELMFKDKLKDSDLLKHLFKTTKGLSVNFKEVDGNRTMAALMKACFRIAGNLGYDDTDLAKLSSEDQMDRVEEIFKKQGFKTGFLHFDSSLASPEFENQDSYRLWHLLYSYEGDKSASGNESLVKCIMGLCSMDEESAKILATCTFLPDYGSLSAKAIRKILPNMKDGLEYSTACTMAGYRHSKRSLTKEELDTREYSDRLTLLPKNSLRNPVVEKILNQMINVVNSVIDVYGKPDEIRIEMARELKKSAKEREEALRDIASATAESQKIIEILKGEPFFLPFPTRNDIIRYRLYQELAQNGFKTLYSNTYIPKDKLFSKEFDIEHIIPQALIFNDSFSNKTLESRQCNLEKGKATAMDYVKSKCDEAGVQAYHNRVNGLIGKGISKTKAKWLLMEGKDIPDDFINRELRDSQYIAKKAREILESLVKFVVPTTGSVTARLREDWQLVNVMQELNWEKYARLGLTGVREDKDGRRIPFIQDWTKRNDHRHHAMDALTIAFTRRQFIQYLNHLNSKIDAVSWDKKDLDLRDYDLDDIKFGNMSTGDRYGIVKALQDRFLYKDDNDKYRFIPPIPLDEFRTQAKEQLSDILISFKAKNKVCTRNVNVTKSKGGVNRKTQLTPRGPLHEDTIYGCSLEYVTKENEKIGSSFDAEKITTVCKKKFRDALLRRLEEFGRDPKKAFTGKNSPEKNPIWVDEHHSEQVPTKVRTMTMEQRFTGRKPIDAKLKIEKVLDKRIREILQARLDEFGGKAEKAFTNLDENPIWLNKEKGIAIKRVTVSGPANPVTVRFKRDKDGKPVIDDAGKTIGSDFVTPGNNHHIAIFRDSSGKLQEHPVSFLEATIAKSNGLDVIDRNYKKDKGWEFLFTLKQNEYFVFPNPETGFNPLDYDLTDPRNYAEISPNLYRVQKIATGDYYFRLHLETTVEDSKALKGITWKRIGLSGLEGAIKVRIDNLGRIVAVGEYD

SEQ ID NO: 3300 - protein, 1398 aa, unidentified
  REGION 1..1398: note = Description of Unknown: Cas Enzyme sequence
MKTILGLDLGTTSIGWALVKEAEPFSDEKSEIVRLGVRVVPLTVDERTSFEKGKSITTNAERTLKRGMRRNLQRYKLRRQALIEELKDAGWIGDDFIFSETGPGSTFRTLRLRAKSASEEVTLGDLARILLQINKKRGYKSSRKAVSSEDGQAIDGMAVAKEMYDKGLTPGEYVYQRMLEGKYAIPEFYKSDLQDEFDRIWTLQKSFHPELTDELYMRLSDRNKSQTWAICRDELGIQGLKSKFTGKERLIEAYRYRHLAATQEVDLEVLTCTLQEINGQKASLSGLLSKISDRSKDLYFNNLTVGQMLLKRIEENPNNSLKNIVFYRQDYLDEFERIWTEQSKYHIELTPELKKRLRDIIIFYQRPLKSQKGLICLCELETRKVEVTVDGVKKEKNIGPRVCPRSSPLFQEFKVWQTINNILVNGAALDDEEKSVIAKELMFKDKLKDSDLLKHLFKTTKGLSVNFKEVDGNRTMAALMKACFRIAGNLGYDDTDLAKLSSEDQMDRVEEIFKKQGFKTGFLHFDSSLASPEFENQDSYRLWHLLYSYEGDKSASGNESLVKCIMDLCSMDEESAKILATCTFLPDYGSLSAKAMRKILPYMKDGLEYSAACTMAGYRHSKRSLTKEELDSKEYSDRLSLLPKNSLRNPVVEKILNQMINVVNSVIDVYGKPDEIRIEMARELKKSAKEREEAQRDIASATAESQRIIEILKGEPFFLPFPTRNDIIRYRLYQELAQNGFKTLYSNTYIPKDKLFSKEFDIEHIIPQALIFNDSFSNKTLESRQCNLEKGKATAMDYVKSKYDETGIQAYRDRVKGLIDKGISKTKANWLLMEGKDIPEDFINRELRDSQYIAKKAREILESLVKFVVPTTGSVTARLREDWQLVNVMQELNWEKYARLGLTGVREDKDGRRIPFIQDWTKRNDHRHHAMDALTIAFTRRQFIQYLNHLNSKIDAVSGDKKDLDLRDYDLDDIKFGNMSAGDRYGIVKALQDRFLYKDGNDKYRFVPPIPLDKFRTKAKEQLSDILISFKAKNKVCTRNVNVTKNKGGVNKKVQLTPRGPLHNETIYGNSLEYVTKDEKIGGSFNSEKILTVCKKQFRDALARRLEEFGGDPKKAFTGKNSPEKNPIWVDEHHSEQIPAKVRTVTMGQQFTIRKPVDASLKIEKVIDKKIREILQARMDEFGGKAEKAFANLDENPIWLNKEKGIAIKRVTVSGPANPVPVRIKRNKDGKPIIDDAGKTIGADFVTTGNNHHIAIFRDSSGKLQEHPVSFLEATIAKSNGLDVIDRNYKKDDGWEFLFTLKQNEYFVFPNPETGFNPMDYDLTDPGNYAEISPNLYRVQKISRGNYMFRHHLETTVEENAMVKGITWINIQSVSKLANVVKVRIDNLGRILAVGEYD

SEQ ID NO: 3301 - protein, 1392 aa, unidentified
  REGION 1..1392: note = Description of Unknown: Cas Enzyme sequence
MRKILGLDLGTTSIGWALVKEAEKDNEQSEIIKLGVRVNPLSVDEKTNFEKGKPLSTNADRTLKRGARRNLQRYKLRRQNLIEALVKNGFIKDDSVLTEVGKGSTHQTSCIRAIAAREKVSLEELARIFLIINKKRGYKSSRKVKNDDEGISVDGMAIAKYLYDNQLTPGQYVYNKLKEAEVTNKKAYLPDFYSSDLKSEFDAVWNFQKQFYSDILDAQLYKALEGQGQQNSRKRFLAIKGIYTAENKGKRDAAKLQHYKWRNDAIKEYLTIEEVAYVLVEINNNLNKSSGYLGAISDRSKELYFGKITVGELQYNLLKKNPHTSLKNQVFYRQDYLDEFEQIWETQSKYYPNILSVKLKEQIRDIIIFYQRKLKSQKGLISFCQFEQKEQFYKDTEEKPKVRTIGPRVSPKSSPLFQEFKIWQNINILQFKNISKQIDNDENIFVLTDDDRKLLFDELNLRGNLSENEVLTLFNLSTKEWKTNLPKGIEGNRTNQGMFNVFQQIANAEGYGFDWTKKKAAEIKEELNAIFLEIGVKTEILNFNSNLERNAFDKQMSYQLWHLLYSAEDDSKISKKDREVYGNSGVILKKKLHNKFGFKPEYASWLSNVTFQEDYGSLSTKAMRKIIPHLQDGSLYNEACTYAGYNHSDSITKEENEKRELKEKLELLPKNSLRNPVVEKILNQMVNVVNLVIDTYGKPDEIRIELARDLKKSAKEREASIKYINAATKANDEIRKIIRKDFGFAPTKNDVVRYKLYEELKTNGYKTLFTNEYIGKEKIFSKNIDIEHIIPKAILFDDSFSNKTLAFRKVNLKKADRTAFDFISSDYNLDLGAYLARVESLYKAGEISKGKYKKLLMPADKLPTDFIERDLRNSQYIAKKAKEILQKIVRNPIVSTSGRITDKLREDWDLINVMKELNFPKYKALGLTEIQERKGGRKIEIIKDWTKRNDHRHHAMDALTVAFTTHNHIQYINNLNASRSENSALHKIKSKITKVYEQGSGKKKRKFIHPIHDFRTKAKEEVEDILISFKNKNKVVTKNINKTKAKGKYNRKIQLTPRGQLHKETVYAISKRELSKPTTLTKKFTIQQANLIIDKKVKALILFRLNKYDNLPSVAFDTKTIKKDPIIYKEESLKSVKCFEEVFTIRKDITPDLKVDKVVDEKIKTILRQRINTFGNAKKAFSDLDKNPIWLNQEKGISIKRVTISGVSNAEALHYKKNHFGKEILNEEGEKQAVDFVSTGNNHHVAIYIDKKGNLQEQVVSFYEAVARVNAGFPIVDRAYNESHGWQFKFTMKQNEMFVFPSEDFNPNEIDLTDDKNAKIISKQLFRIQKISTKNYMFTHHLETMATTGDDLKYLKLLAGKKYHLIQTPEKLKDILKVRINHIGKIVQIGEY

SEQ ID NO: 3302 - protein, 1438 aa, unidentified
  REGION 1..1438: note = Description of Unknown: Cas Enzyme sequence
MAKLGLDLGSSSLGWAIRDGEEISKKGVITFPSGMVKGQGGYSSPTRDRREARSKRNLIRARKYRKWKLLEILCKNSEYVPLNILQLESWSKYKKGQTRMFPENEKFLSWLSCDFSYQGGKKYKNPYELRVKALDEQLTKHEFGRVLYHLVQRRGYKDIGESDKETETQIKRRGESGFQKALDNNRTIAEALKTEFLDKGIRARNEYPYREEYQNELELICKAQGYNVSRDGKYGYHDQFVLSLWKSIIWQRPLRSQKGTIGKCTLEPSKLRCPVSHPIFEISRAWQFINTIKYYDKDDEKQSLSQDLRELLFNDVFIKKDNFKFEDIRRYLDKKLKQKTKYNYPLSKKTGKYETNVSGMPFCNGIIKILGELVYNSLMNIENYHMGNAPKIIKGYSILDIWHAVIDFDEEYLERFAIEKLNIENVTVKRNKKEVSLSPLVILKNKLTVGYGDLSLKALKKIIPFLKQGYLYNDAVMLARLPELIGNEWEYQKETILKLAKSSREFYNWHKMIVGITNNLIDAYKGEVEDWLETGKPVRAWKDFEYLLTEEDKRDIINACMGYFGKTSWDRREDKEAIINEVGKEYQEFFFDSKRAYREVSTLTSLFSEALSKHGINLNGELYHHSNRKNIYGTKVTDKNTGKDILPIPLIDSIKNPMFNKSMSILRRLVNELILKGEIDEDTEVVVEVARELNDNNKRAAIERYQNERRKKREKIRAFLEEFMAKENKSFNVEERIRDFELWCEQSFEETFDESGKKIVNKKNSEILSEKKAIRRYELWMEQKGQCMYTGKMISIAQLFSNDIDLEHTIPRSLLPDNTMANLTVCYAKYNRDDKGKLMPFFCENYEKDVAGIGTAIKPRLREWEKTRDNYKSLFESRLKSTGNEDEAKKNKRIQEKHYFRMHYEYWKDKVERFTTDEVKDSWARRQLVDTQMVSKYAREFLKTYFKKVAVQKGEVTAQFRKIYGFQETDKIKSRNKHTHHAIDAAVLTLIPVNSSRRDALLDKMYKMEEREGKQFTTKPFDLFNSQELINVIESQTLIVNYEKDKILQQTVKNVRKRGKLQYVKDKYGNFVTDEKGERIIKKSQGDTVRSTLYKQTFIGKIRDVERYPDGQPIRENGDWKYKTGEDEFMFTERKPLKDVLSKVDDIIDPVIREIIRTQKSQAIDPQGNKIRHVRIKSKAGQVVKQRVNYRSKHEHKNYYYSAAGSIPYAVMLQKNINDKIERKMIPVASFEVSKVFMEHKKFSPELYMEMFHPNLSGYQDTKLLKVGQKVLMLNDDSEYEQRKDMEFQKNRLYRITQFANDGKRIMLQYHLEAQAITDVRKNVNEQKHKILTSEEVKMGISEILENTSITNLADRKKDFEKRKYNFNDRLNKIESVSNKLIKEQVKKMINNYQTEYSSLPENIIPSFLKISNNNWNFLYENYDFDVSILGNLIWLSK

SEQ ID NO: 3303 - protein, 1237 aa, unidentified
  REGION 1..1237: note = Description of Unknown: Cas Enzyme sequence
MKKILGLDLGVSSIGWALIEENDSSKRILGMGTRIIPLSTDDKDEFTSGNTISKNQKRTLKRTQRKGYDRYQMRRENLRKALRAKNMLPESDLMNADKFLIWKIRNDAVSERLGLKELGRVLLHLNQKRGYKSSRNEANLDKKDTDYVAEVKSRYEKLRESNETIGQHFYREISADRYYRVKDQVFPREAYIEEFDRIIVKQQEFYPDVLTPEFVNKLRNKIIFYQRPLKSQKKLVSLCEFEKRLVVTNDGKGGKTKSYKGPRVTHRSSPLFQVCKIWESINNIKLKNKYGEEYKIPLEKKRQIFDYMDNNEKLSFKELLKILELKKNEEWTGNSWLDKGLKGNTTKIRIAKCFDTPAYAEGLTVFKLDLIQSGKITERIDCETGEIQSIPEKIIAPLFEKQPLYRLWHTIYSINDETECRNALIKNLGIPEVTAEKLASIDFTKEGFGNKSSRAIRKILPYLMDGMVYSEACLFAGYNHSGSVTKEENQGREVLNFIPLLEKNSLRQPIVEKILNQMINVVNSVINEYGKPDEIKVELARELKQSREERQNTFKNINQRERENENIAKRLVEEYNQRATRNNILKWRLFHYVKGDDSKVNNICIYCGKSFGITDALAGAEVDIEHIIPRTLLFDDSENNKVLAHRKCNQAKGNMTAYDYMKSKGEHDFKDYLERVNQLSAQKIINRIKRDKLMTPAEKIPKDFIQRQLRETQYISKKAIEILSTVSRDVHPTSGSVTEFLRRIWGWDDVLLNLQLPIYRKAGLTEWIEVETNGQIHKKEVIKDWKKRLDHRHHAIDALAIACTKQGYIQRINTLSSDITREEMYKEVSETDSRRASWKTLLEKYIAGKQPFTTSEVEKQAEKILVSFKQGKKVASKGVRKINIHGKKKIVQKDIIVPRGPLSEESVYGKIRVIEKNKPVKYLFENPHLIFKPRIKKLVEERLARFEGNARQAYLSLRKEPIFLDNEKTIRLEYGSCYKEEYVIKYPLSSFKPKDIDSVIDENVRQILRNRLSEFKGNEKEAFRNLENNPVWYNFDKKIPLKTVRRFTGLSSVEPVKYNDKKEPIGFVKPGNNHHVAIYVDEEGVKHEHVCTFWHAVERRKYGFPAIITDPRKVWDKIINQNNNLPDSFLNKLPSDGWNFLLSLQQNEMFVLGLPEEEVNRAIRENDTAVLSKYLYRVQKIAASDYYFRHHIETEIENDEISKKMFKYYRVNSLNALFYLNPVKVRVSCLGQISKSC

SEQ ID NO: 3304 - protein, 1539 aa, unidentified
  REGION 1..1539: note = Description of Unknown: Cas Enzyme sequence
MKRILGLDLGTNSIGWAFVHSNFEKKAGSIEGIGSRIIPMDQGILGKFDAGISISQTAERTNYRGTRRLYQRDNLRRDRLHRVLNILKYLPKHYASSIDFEKHLGQFKKGTEPKLNYFTNKLDKHEFLFKDSFEEMISEFKANDQGTKIPYDWTIYYLRKKALSKPITKEELAWILLNFNQKRGYYQLRGEEEDISKDKVEEFYALKVSDVLATEDINAKGTWYNIILENGWIYRRQSKESLFEWKGKTKEFITTITLDKDGTVKTDKEGNENRSFRAVDSEKDWIAIKKKTENDILNSRKTVGQYIYESLLQNPTQKIRGRLVKTIERKFYREELNAILEKQISFHEDLQDRDLYKKCIEELYPRNEAHQKNIAQRDFKYLFIEDITFYQRPLKSKKSSIADCPYESRFYKNENSEFVKQPLKAISKSNPIFQEFRLWQFLHNLKIYKLDEVEDIDVTSKFISKDDDWIALFDFLNDRREIDQKAFLKNFKLSEKTHRWNYVIEKKYPCNDTRGQIKSKLSKLENVDIDKILTNEFIKSLWHIIYSVTDKNEFETALGTFATKNDLDKQSFVENFKKFPPFESSYGAYSEKAIKKMLTVMRMGNYWEENSVDEKLKSRITSILERLETINFDINKLDLIQDDDIPQRLLKSFAKAKANPLSGLNTYQACYAIYNRHSEVGSIKQWKRPKDITTYLDNFKQHSLRNPIVEQVMLETLRVVRDIWEYYGTYTEIDGKKIYDALFDEIHLELGREMKNDKKTRERISKSINEKENTNERIKSLLQEIKNDSTVNDDVRPFSPSHQEILKLYEEGVYDNPNVNYNEVSFDEIEKIRRNTSPTRSELTRYKLWLEQGYISPYTGKTIPLSKLFSTAYQIEHIIPQSRYFDNSMSNKVICESVVNEEKGNETAYAFLKKRGGELIELGQGKTVTLLSLENFENHCRHYFRKNKSKLTKLLSEEIPEGFINRQLNDSRYISKLIKGLLSNIVREDGEKEATSKNLVPINGAITSKLKKDWGLNDKWNELIAPRFMRLNELSQSQDFGYWDKKINAFRTQVPDELSKGFSKKRIDHRHHALDALVIACTTKDHINYITSLNTERKNHSLVSKLRTVEKKQIRDTKNGNIKTISVAKTYHQPWSGFTTDAKEALETTVVSFKQNLRIINKTNNKTQQWVKKTDKFKKEFVKQTKGQNWAIRKPLHRETVSGKVLIKKEKGFVSINLAIDTWEMIIDKTIKEIISKTVKDFQEDLVKTKKHFKSNPIEQDGKIVSKIAIYENVEATATRVPLSEKFTRKQLESTTDSGIQRILENHLKNYIDEKGKERFDLAFNSDGIDEMNKNIQLLNEGKKHQPIKKVRIYEVGNKFSVGEEGAKSKKYVEAAKGTNLFFAIYWDDKKQKRNYETIPLEKVIAWQKEEASLPKQQRTGVPINNLKGQFLFSLSPNDMVYVPNEEEKNNPLLIDFKNLTPTQINNIYKMDKASGKECYFTRFDIASLISPYSPKSKFGELGSQNKLQTTMCENNFKIVDRCIKLEIDKLGTIKKVIK

SEQ ID NO: 3305 - protein, 1472 aa, unidentified
  REGION 1..1472: note = Description of Unknown: Cas Enzyme sequence
MKRILGLDLGANSIGWALIETDFEKKEGSIKGLGSRIIPMSQDVLGKFDSGVSISQTAERTGYRGVRRLIQRNLLRRERLHRVLDILNFLPEHYANSIDFEKKLGQFKDNIEVKLNYRINEQGKHEFIFMNSFNEMVEEFDAHNQNIKIPYDWTLYYLRKKALSNKISKEELAWVILNFNQKRGYYQLRGEDDGTDDKTKLKEFKILKVREVVDSGEKVKDKTLYNVIFENDWIYDKQIVLDDDWRGKTKEFIVTTALDENGLPKKDNEGNIKRSFKKVDSEIDWIAIKSKTENDIKESNKTVGQYIYTTLLENPTQKIRGKLVKTIERKFYKEEFKAIIKEQIKHHSELQNKTFYNACIQELYPRNEAHQNNIKNKGFEYLFMDDIIFYQRPLKSKKSTISNCQYEYRIFKKDGILQPKQYLKTISKSHPLFQEFRLWQFLKNLRIYQKESIIDGKTKLDVDVTSQYLKTEDDWVALFEFLNVKLKVKQSQLIDFLIKRNELNKTQKDNYRWNYVEDKEYPCNETKAQFVSRLKKVKELNVDSFLTSETEYKLWHIIYSVKDKNEFESALGTFATKHNIDTETFIQNFKKFPPFKNDYGAYSEKAIKKLLPLMRRGNYWNEIIIPQVVKDRVGNIMERVTQINLELDSKEINEEIIRLSDDDIPKQLLKSFIDFKGKNPLQSLNTYQACYAVYNRHSEASNIKQWKQPNDITKFLNEFKQHSLRNPIVEQVLTETLRTVRDIWEYFGDGKEKFFDEIHIELGREMKNPADKRKAMTNRITENENTNYRIKEVLKELQSDGVEKIKPYSPSQQEILKIYEEGVYQSNDKIDDAIEKIRKSSSPTKSEITKYKLWLEQGYISPYTGKVIPMSRLFTTDYQIEHIIPQSRYFDNSLSNKIICESEINQLKDNQTAYEFLKNEKGRIVELSYNKTVKLFTLEAYEKHCNQYFKKNRGKLKKLLSEDIPEGFINRQLNDSRYISKLVKGLLSNLVREDNEKEATSKHIVPVTGSITSKLKQDWGLNDKWNELVAPRFMRLNEMTNSSDFGYWDFQRDENGKKLGKKFFRTQVPDEISKGFNKKRIDHRHHALDALVIACCTKKHTNYLGALNAEKKNYGLRDSLLLKSKEGHYTKHFLHPWNGFTTEAKNELEKTIISFKQNLRVINKTNNKTWQWVKKDGQLKKVLVKQTKGDNWAVRKPMHKETVSGKLDIPAPKGKVVTATRVSLSEIKTMKHLEKITDKSIQNILECHLKNYLDKEGKEQFDLAFNSDGIEELNKNVQALNKGKIHQPIYKVRISEVGNKFKVGYSGNKKDKYVESAKGTNLFFAIYWDKEKKKRVFDTIPLNEVIEHQKQVAHFPKNERIPIPVDHTKGQFLFSLSPNDIIYMPTDEDIDNPALVSFYKLSKTQVGRVYKMVSSSGNQCFFIQNNIATSIQNKFEFSALNKMEKSIDGEMIKGKCWKLKLDRLGNIVKVIK

SEQ ID NO: 3306 - protein, 1398 aa, unidentified
  REGION 1..1398: note = Description of Unknown: Cas Enzyme sequence
MKRILGLDLGTTSIGWALVEEAESAKEVSSIIKLGVRVNPLTVDEKINFEGGKPITTNADRTLKRGARRNLDRYQMRRDFLIEELRHSKFITDDSWLTETGKNTTHQSLTLRALAARQKICLEDFSKTLLAINKKRGYKSSRKSKDESDGVAIDGMAVAKILYNDGLTPGQYTYRLLQQNKKFIPDFYPSDLKAEFDAVWIKQKEFYPEILTHELYQSLQGKNKGQTWSICSKPFQIEGKKLNGNKAEQKLERYKIRVQELSEKLELEHLAIALQEVNNNINGTSGYLGNISDRSKVLYIDKITVGEYLYNQIKINPHTSLKNQVFYRQDYLDEFEQIWETQAKYHPELTAELKEKIRDVIIFYQRPLKSQKGLLSYCLFESWQEEYYDKVKQKKRKRTIGQRVVPRSSPLFQEFKIWQNINDLAFKYIGSAETDSENKNVKLSYKLEEDDRKLLFAEANLRGNLTSAAVLKLLGLSSKEWKLNFKEGIQGNTTNEKLFNVYQEIASREGYGIDWQKLPANEILEELKTVFPTLGINPSVLYFDGTLAGNSYSKQSSYELWHLLYSAEDDKMITEEEKLIYGNTDVNLKKKLHLKYGFKPESAAMLASVTFPNDYGSLSARAIRKILPHLQEGLDYYEACTEVGYNHSGSLTSEENKTRDLKDRLEILGKNSLRNPVVEKILNQMIHVINQVCDAYGKPDAIRIELARELKKSAKEREETTKYINTATKINLDIANTIQKRFGFAPTKNDIVKYKLWLELAPRGHKSLFSNEQIKLEDLFSSKIDIEHILPRALIYDDSFSNKTLAYRHVNLKKANRTALDFITQDNNSDLEDYKERVESLYDKGKGIISRGKHDRLLKSAKDIKEGFIERDLRNSQYIAKKARTMLLEVFREVTPTTGRITDRLRVDWGIINVLKELNLPKYRALGLVEIEERKNNKKVEKIKDWTKRNDHRHHAMDALAVAFTTHNHIQYLNNLNARRDESHDKHKVIQNIENLITEKVQDDKGNYKRKFIKPMPKFRTAAKRHLEAVLISFKAKNKVVTRNINKTKTKKGFNTSLELTPRGQLHKETVYGKSKAPKSKPTKINKNFAFAEAKMIIHSGQRELVLKHLETYGNKPETAFDNKTIKKNPLLWDGEPLKEVLCFEDVFTIRKDIGPGLKIEKVLDEGIREILKNRKKEYKGNAKEAFSDIDKNPIWQNKEKGIAIKRVTITGVSNAEALHHQRDHLGQLILDENDQPIPVDYVSLGNNHHVAIYKNEDGDLDDDAVSFFEAVVRNNQGLPIIKKENENGWPLHFTLKQNEMFVFPSEDFDPSAIDLFDPENYKVISKNLFRVQKISKVTYGNSAVRDYVFRHHLETEVNQNSDLKGVTWKPIKSLGHLSNIVKMRVNHIGQIVQIGEY

SEQ ID NO: 3307 - protein, 1391 aa, unidentified
  REGION 1..1391: note = Description of Unknown: Cas Enzyme sequence
MKRILGLDLGTTSIGWALVEEGKNSEDSKIVKLGVRVNPLTTDEKINFEGGKPITTNADRTLKRGARRNLDRYQMRRDNLIEILTEGKIISKETPLTELGKNTTHQTLALRARAARDEVSLEDLSKILLAINKKRGYKSSRKSKDESDGVAIDGMAVAKILYDQKLSPGEYSYNLLKEDKKYIPDFYPSDLREEFNAIWQKQREFYPDILTDELYKDLQGKNKGQTWTICSKPFEIVGIKLKGNKTEQKLQRYQVRVEGLEEKLDLEYLAIALQEINNNINGTSGYLGKISDRSKVLYIDKLTVGEYLYDQIKQNPHVSLKNQVFYRQDYLDEFEQIWETQAKFHSQLTPELKSEIRDVTIFYQRPLKSQKGLLSFCLFESWEQEYYDKIKEKNRKRIIGQRVIPKSSPLFQEFKIWQNINDLEFKYIGKEKVCADAEDSSEPYKLDEEDRELLFNEANIRGNISTASVFKLLGLSSKNWKLNFKDGLKGNTTNEKLFNIYQEIAFRQGYGDDWGKKPAVDILEELKAIFPEIGIDVSILDFDATLKGNEYSKQASYELWHLLYSAGDDTLVSEEDKIIYGNSDVNLKKKLHQKYGFAPEYATMLANLTFPNDYGSLSARAIKKIIPYLKDGLDYSDACKEVGYNHSNSLTSAENEKRELKGRLEILGKNSLRNPVVEKILNQMINVINQVIDTYGKPDEIRIELARDLKKSAKERLETTNYINTATKRNLDIASTIQKEFGFTPTKNDVTKYKLWQELAPRGHKSLFSNEYIAKADIFSKKIDIEHILPKALIYDDSFSNKTLAYRNVNLKKANRTAMDFITQDHSTTVEDYIERVETLYNKGKGSILKGKRDRLLKSAKDIKEGFIERDLRNSQYIAKKARNMLLEVFRVVTPTTGRITDKLREDWGIINVMKELNMPKYRELGLIYVEERKNGKQVEKIKDWTKRNDHRHHAMDALAVAFTTHSHIQYINNLNARRDETHENHKVIQNIEKLITHKAKDDKGNYKRSFVKPMPKFRAEAKKHLASVLVSFKAKNKVVTRNINKTKKDNGFHTNLELTPRGQLHKETVYGKSKRPKTIAAKLNKRFALTEVRNIIHKGQRRLILEHLHSFENKPEVAFDTKILKKHPLIWNEEPLKEVFCFEEIYTIRKNIGPDLKIDKVVDEGIRNILQRRKDEYNGNTKEAFSNLDKNPIWLNKEKGIEIKRVTITGVSNAEPLHNKKNHLGAFILNQNDKKIPVDYVSLGNNHHVAVYSDEKGKLQEKVVSLYEAVERASQKLPVIDKSHNAHLGWEFLFTMKQNEMFVFPSGEFEISSIDLLDGRNATLISPHLFRVQKIATKNYMFRHHLETELIDTKETRGIAWESIRSTEPLTNLVKVRLDHTGRIVQVGEY

SEQ ID NO: 3308 - protein, 1172 aa, unidentified
  REGION 1..1172: note = Description of Unknown: Cas Enzyme sequence
MSKTLGIDLGTNSIGMALRNEGLFDWYGVYTFRKGVGDGKSGEFSLAAERTTNRSSRRLYNSRRYRKWETLKVLIENGFCPLTMDKLNKWKNYEKGVGRVFPVDDKVFGDWLKLDFDGDGKPDFSSPYQLRRELVSVQLDLGNPGDKGKVGRALYHIAQRRGFKSSRKIGVNEKTAVYKGSKETSTIGRNSYETLIDENGSLGAAFAHLEDIGIRIRNRYTLRFDYLNELAKILDFQGIENSFKAQVVKAIFFQRPLRSQKGLVGKCTMETNTIIRDGKEIISGKPRCPISQPQFELYRAWSFVNNIKYRKDKDEKFEPLPLSLKQEIIDEKLLIKSNKTTFHTIRNFINKGERKNWELNYSSKMDKMTISTCPVSAYLKAAFGDDWENILIETEKTRTDNRGKTHKVTYTIEDIWHLVFSFEDEEYYDEFLDKQLQLEENQVDQLKKLWNALPTGYANLSLKAINNILPFLKEGIIYSEAVFLAKIPEIIGKQMFEDHKEGILEALHIEILNNRHAKTIINITNSLIADYKVLSGENRFAYKDIKYRLDNIDVKDILESCKKHFGEKSWDNIENEKQRDIIDQVTEKYQEFFTSTKRDYFKQPKLVSHIHKFLIDEFKVSEKAVEQLYHPSMIDIYPNSEDQQFLKSPKTRAFKNPMAYKTLYKLRHVINHLIEKGIIDLDTQIIVEVARELNNKNKRAAIEDYQRARERENEEFGLAISELIKDPEFKGAADSNSKNDKDKFRLWTEQIGNTDDVIKKIVATKEAVKKYRLWKEQKCVCFYTGKLIKMTDLFDRNIIQFEHTIPRSKSFDNSLANLTVCYADYNTNIKKTKLPTELPNYKEESHGYTPIEPRLKEWKDKIESLYSQIQTQVKNSKSAMDKDAKDNAIRRRHLLQMEYDYWKNKLDRFTREDIPSGFRNSQLIDTQLISKYAYHYLKTVFNQVDTIKGNITSEFRKIYGIQPKYEPKDRTKHYHHAIDAAVLTLLPTSAKRKEVLEKAYKYEEEHPKKQYHEKPFEGFNRSMVTQIENEILIHNLEDQDQTLTPSKKFVRKRGKIEYLRNEKGNYQKDAIGNRIPKIATGDSVRGQLHLDTFYGKIKLAAKGEKGSLLRNEDGSIKYLTDKRGNEVYKMVGRKSIENVNFKTDNIIDEHLAVHLKQQLDLGVKQNELKDFQ

SEQ ID NO: 3309 - protein, 1376 aa, unidentified
  REGION 1..1376: note = Description of Unknown: Cas Enzyme sequence
MKRILGLDLGTTSIGWAFVNEAENDNEKSSIIRTGVRVIPLSTDEQQDFKKGNTITINADRTLKRGMRRNLQRYKQRRETVIEMLTKIGFINEHTTFSEDERATHSTYELRAKAPSEKLSKEDFARVLLMINKKRGYKSSRKANNQEEGQLIDGMAIAKRLHDEKLTPGQLSYGLLKEGQKLLPDYYRSDLQNEFEEIWNFQKQFYTDSLTEKHKEALNGLNKTTTGQYFEKTIGTERAENKGKEKKLREYEWRSKALTEQLPLSEVAYILTEINNQINQSSGYLGAISDRSKELFFNNLTVGQFQYAQLKADPHASLKNQVFYRQDYMDEFDAIWEQQAKHYPELTESLKKELRDVTIFYQRRLKSQKGLISICEFEGVERNVTIDGIVKKKLVGPRVAPKSSPVFQQAKVWQNINAIRLTNEKSKEETFLDEDLRQSLFEILNVNDGWTDKQFLSWLAKNSDLKGKDWKVNFDKLQGNRTQAALFLAYEKIAQQEGWDTLDFKNSGRSLVDDLKICFREIGIESNLFEIDFELNGNDFSKQPAYQLWHLLYSYEDDSSPTGTESLTQILQNNFGFKKEHAQLLAGVTFQQDYGNLSVRALRKIYPFLEEGKMYDEACELAGYNHSHSVTSDENKNRELRDRLEILKKNSLRNPVVEKILNQMINVVNAILDDPEMGRPDEIRVELARELKKTAKQRKEMTQAIGKATSDHIAFREKIKKEFGLPYVSRKDLIKYKLYLELKSVGFKTLYSGTYIKPEELFTNKFDVEHIIPQSVLFDDSFSNKTLELRDYNLEKGNETAFDYCERKGWSEDFNSRVQDVFSQKGIRYGKLKKLLMPKSDVPDGFLNRDLGNSAYIAKKAAQILKGIVYNINATSGSITAKLRSDWELINVLQELNWDKYKALGLTYYDYNKNGKALPRIKDWTKRNDHRHHAMDAITVAFTKPVFVQYLNNMNADSEKNPMIYGIKKKYTYRDSEGGRKFKKPFEDIREEAKKRLAAILVSHKAKNKVVTFNKNKIKIKGKGKHKTKIELTPRGQLHKETIYGKSHYYEVKEEKINAKFDAKKIAEVTKPAYREALLKRLEEFDKDPKKAFSGKNSLTKNPIFINGSDENVPDKLKTQRLQSQFTIRKEITPDLKVDKVVDEGVKRILQDRLKEFNGKPKEAFSNLDDNPIWLNKEKGIKIKRATITGVSNAEPLHYAKDLNGIKILDKEEKEIPADYVSPGNNHHIAIYKNKDGQLDDEAVSFYEAVVRKTQKLPIVNAINEESRPLLFTLKQNEMFVFPSEDFDPEKVDLEDENNKENISKNLFRVQKISKVTYGNSAVRDYVFRHHLETEIIDSKETKDITWKPAKSLGHFKGVVKVRLNHLGNIVHLGEY

SEQ ID NO: 3310 - protein, 1530 aa, unidentified
  REGION 1..1530: note = Description of Unknown: Cas Enzyme sequence
MKRILGLDLGTNSIGWALIQHNFNEQKGKIVGIGSRIIPMSKAVLSDFEKGITKSQTAERTEDRGTRRLYERSHTRRERLHRVLNVLDYLPKTYSKHIDFNKRKGQFIDCAEPLLPYSDKVDENGKRIFLFQYSYNEMEKEFRTVHPNLPKVNKKGKPYKLPYDWTLYYLRKKALTKKITDEELAWILLNFNQKRGYYQEREEKEVNIEENKKVEYKVLYAIEFIKTDEKIDDQTLYKIIFDNGWEYDKTTTKPELWKGIAKEFIVTTKVNKDGSIKRSFKKVDSEEDWEAIKRKTEQDLGDEFVGKYIYEALLKNPKQKIRGELIRTIDRDFYFGELEVILRTQLKFREKKWTDEKIYKKAVQELYPNNQEHQESLLKQKDKFVHLFLRDILFYHRPLKSQKSLISKCTFEKRFYRDKETGKIKKVAINGMPKSHPLYQEFRIWQLANNILIQRRETKIDGKVKLNVDVTNKYIKTKKDFADFFEFLYNKRDLTQKQLVAYFIKDKEEQSSYGWNYTDDDKLKLDCNQTRPILISKFSKKDKSKFTEEIELKLWHIIYSVTDKKEYTTAIKKFVDKYNLSVETHKKLERSPMLKKEYASFSEKAIKKLLSLMRANSYWQEAAINEKTLNRIDKLLTGEFDETIENRVREKAINLSKVEHFQGLPLWLVSYVIYGKHTEVDATQWKTSRELEDYIKSFKQHSLRNPIVEQVLLESLRVTLDIWGYYAHEFGVEYETYFDEKTNKEKKSFHRLFDEIHIEIGRDLKNPKKVREKLSNSINKNKDTNQRIRKLLYELKNFEDVKNVHPKSRNHFDKLKIYEQTILSQYSDKELTKEKLDGKLTVDKFIKKNQPTSKEILKYKLWLEQKYLSPYTLKTIPLSELFTSKYEVEHIIPQGKFLDNSFNNKVICEGEVNSLKDNRTAYAFIQEFQETEVPLSGGKKVTIPNQSSYEQFVRDNYDGKKLLNLLREDIPQQMSERQKNDMRYISKAALKIFSNIVREENEQESTVKNVIPIAGGVTAKLRSEWGLNAVWSELVEDRFKRLNRLICGFENEENGLFGSIKKNGGFFKPEVPLELRDNFNIKRIDHRHHALDAIVIACATRKHVNYINNNHAKSDLKRFDLGRILRNTKKIEKTDILTGEKTEHVVLDDYKKPWDNFTGEAKLSLQQIVISFKQNLRAINKATNFNWRYKDENGEFKYGKNGKKKKQRVEQSNGKKNWAIRKPLHEETFFGLIKYGKYRGYLVKREQLNITYTKKKIADVVDKTVREILFKHLELEKFLNQKDENGKDLPPYEVAFSPKGIVDMNQNILELNNGISHHPIKKVRLKFTKGKQFSIKKWEDQNGNLLRETKFVKSASGTNLYFCIYEKDGNRKYYVPQFEEVIETQKLEQDLPLNKKKNVPERHPKHADYHLKFYLQPNDLVYVPKSENEEVDFSNLNKEQIERIYLFKDGSGTTANFIPMYSADIIYNIKDNTKRKAFAQEYNLSFNELIKNEYGLGSPQLKNQNTIEGVQVKSVCWKLKVDRLGNISKV

SEQ ID NO: 3311 - protein, 1244 aa, unidentified
  REGION 1..1244: note = Description of Unknown: Cas Enzyme sequence
MKKILGLDLGVSSIGWALIEENDSEKKILGMGTRIVPLSTDDIKEFTSGNAITRNQERRQKRMQRRRYDRFQLRRDSLIKVLSEKNMMPGNDLINANKLHLWELRSKASEQQIGLQEIGRVLLHLNQKRGYKSVRKSVNADRKETEYVSEIKNRYEKLKETGKTIGQFFYENLLNDRFYRIKNQVFPREAYIEEYDRIMAVQKNFYPETLTDDFIDKVKNEIIYYQRPLKSQKKLVSLCEFEKKTILIDDGKGGKTEAEKGPRVAHRSSPLFQICRIWENINNIKIKDKYGKDLIIPHDKKLEIFNYLDNNEKLRFSDLLKILNLKSNDGWTANSMLDKGITGHTTKVQILKCLNNTGANNNLLKFEIKFIERDKILECVDRETGEIIIKVQERIVDRSIEKEPLYRLWHTIYSINDEKDCINALIRNFNIPEESAKKLANLDFTKEGYGNKSVKAIRKILPYLMDGFGYSDACCIVGYNHSDSLTKEERVARELLDRLPLLKKNTLRQPIVEKILNQMINLVNSIMDNYCINEEGEKIPIDEIRIELARELKQNMEERRNTTFNINRRERENEAIRKRLVEEYGQRATRNNVLKWRLFHSVRGDESKVNNICVYCGKPFGITDALAGIEVDVEHILPRTLFFDDSENNKVLAHRKCNQDKGNMTAYDFMYSKGEKEFNDFIERVNHLYSQGLINKIKKERLLTPAEGIPKDFIKRQLRETQYISRKAVEILSMVCREVNTTSGSVTDFLRRLWGWDDVLMNLHLPAYRNAGLTEWIDIEKDGHSIKKEIIPDWTKRLDHRHHAIDALVIACTKQGFIQRINNLSSEITREDMYKEIAELEDIKAGRRTLLEKYLAGKQPFSTAEVEKAATGILVSFKSGKKVATQGTRKVKIKGHKKIVQEGIIVPRGPLSEESVYGKIKILDKHKPVKYLFENPHLIFKNRIKRLVEERIEKFDGDVKKAYNSIKREPIYLDEAKTVKLEYGTCYREEYVIKYPVGSLKPQDVNSIVDEEIRRKFQKRLEEFKGNEKNAFKDLENNPVWYDEEKKIPVRSVRCFTGLSMVEPVRYNEKGEPVGYVKPGNNHHIAIYEDNEGNKYEHVCTFWHAVERKKFGLPVIIENPTEVWNQILNEEKELPEDFLKKLPLDGWKFLVSLQQNEMFLLGLPDEEIEKAISENDNALLSRHLYRVQKIASKDYFFRHHLETEINDSADALKLKKFYRIPSIKSFEQLNPVKVRINLLGQLKV

SEQ ID NO: 3312 - protein, 1379 aa, unidentified
  REGION 1..1379: note = Description of Unknown: Cas Enzyme sequence
MEKVLGIDLGTNSIGLTLREDNEFSWYGVYTFKKGVGEGKTGEFSYAAERTKHRSSRRLYNARRYRKWETLKVLIDNDYCPLGKDNLSKWKHFEKGIGRLFPIDDIAFSRWIKLDFDNDDIPDMTSPYQLRKLLISEKLELSIPENRYKVGRALYHIAQRRGFKSSRKSGINEKTAVFKGSTETKTIGRNEYESLIAEKGSLGAAFAYMEEAGIRVRNRYTLRSDYQQEVMKIIDIQQVDDKIFVEDIQKAIFFQRPLRSQKGLIGKCTLEPQKSRCPSSHPNFEEYRAWSFINNIKFRENENADFKTIPLELKEKIFHEKFFFKSKREFKFFEIRKFINENGGKYWELNYSNKMDDISVPSCYVSARLKSVFGEDWRSFRKTIERIDKRNRKETITYTIDDIWHILFSFEDEENFTELITKSLGLEENQIKELITLFNAFPVGYANLSLKAINNILPFLREGLIYSEAVIIAKVPEIVGKKLFIENKFILLSAIKSEIDSNRHEKIITSIVNNLIFKYYSSDYNERFAWKNFAYKLDGSDHEDIEKYALEYFGRATWTERMSKNDRHKIISDVARKYQEFFADEKREHIKPPHLVNQIKVFLQSNFEIDDKMINKIYHPSQIDIYPRTEDQQFLKSPKTAAFKNPMAYKSLYKLRDVINYLIGSERIDKETRIVVEIARELNDSNKRWAIETYQRKREVENLVFKATISELTKDSNFRGNANPDSNDDINKLRLWAEQVENFDEVTKAMEEIEKDKSISDKDIEKYRLWKEQECRCIYTGKVINLTDLFDQNRIDFEHTIPRSKSFDNSLTNLTVCYADYNRNVKQNKLPVDLPNYESEALGYSPIEPRLKSWENKVIDLEKQIDFWRSKVKYTLDKDAKDNAIRQRHLRQMDLDYWKNKLDRFTRNEVPQGFVNSQLIDTQIITKYAFHYLKTVFDKVDVIKGSNTAQFRKIYGIQSKIEKKDRQKHYHHAIDAAVLTLIPSAKNREEILKKAYLYEESPGNYNKQYHEKPFPSFTHSMIESIQKNILINNIPDKDRTLTPSKRIVRKRGRIVWIDKNKNIPKIAQGNSIRGELHLQTYYGKIKIAAKENSGSLKRDEKGRVIYNQVNGKDEVWMVIRVFVTDNKFNADNIVDEKLRNHIKEQLKVKKVTELVDFNNKPIRHIRCRVKSGRGYMNSENVTIVKEQTYKSTKDYKNFIYADSGENYLFGLYENENGRSIVPINVFESALYKNIIDNTDIKELFKCKDPIYIGRGKNKTEATLKHIFTIGQKVLFFEKGIEELDDLDTPETSRRLYYVKNLADAKQGLIRFQHHLDARDDKQLLADFPEKDYGKQGLNGFSKFTRNFVAPRLLLSPSNFNFIIEGKDFEMRLDGTIILL

SEQ ID NO: 3313 - protein, 1372 aa, unidentified
  REGION 1..1372: note = Description of Unknown: Cas Enzyme sequence
MKKILGLDLGTTSIGWALVNEAENKDEKSSIVKLGVRVVPLSTDEIQNFEKGKSITTEAYRTLKRGMRRNLQRYKLRRENLIAVLKSNHFITGETILSENGNRTTFETYKLRAKATTEEISLEQLARVLLMINKKRGYKSNRKVNNQEEGSLINGMDIAKKLYDDNITPGEFVLELLKEGKHYIPDFYRSDLQNEFEKIWNKQAPYYSEYLTQDFKKQISNKSKTQTSKIFLGKYKIFTADNKGKDKKLQAYQWRVNALKDKLDINQLAYVISDVNGDITSSSGYLGGISDRSKELFFKKITVGQYKMLKLAENPNYSLKNKAFYRQDYLDEFEIIWETQAKFHKELTSELKKEIRDIVIFYQRNLKSQKGLVGYCELESKQIETTIEGKKKIITIGSKVCPKSSPFYQEYRIWQKLNDFTVINEKSEEKRALTQDEKQLIAKELNYKGKLSKSEVLKILFKNYRSYDANFKELIGNRTNTLIYHALSLIISESGNGDYDFSKTNADEINRITNEIYNGLGYKTDYFTFDSKIPGNPDTQPYYKLWHLLYSYEGDNSKTGDEKLIADIQTITGLPKEYAMVLSRIKFEPDYGELSTKAIRKILPFLIKGNNYSSACELAGYSHSKRSLTKEEIENKTLVKKLQLLPKNTLRNPVVEKILNQMINVINQLDDTYGKPDEVRIELARELKKSAEDRQELTDAINKSTAEYDGYKKLLTSDSNFHLQGSHISRNDLIKYKLYLELKDNGFKTLYSNTYISKEQLFSGDFDIEHIVPQARLFDDSFSNKTLESKSCNIEKGNMTALDYVESKGHSEEYLNKIEKLMKSGAISRAKYNKFKMHESDIPDDFLNRDLGNTQYIAKKANEILSTYVKTVIPTTGTITDRLREDWQLIDTMQELNWNKYDKLGLTETFANRDGKQVRRIKDWTKRNDNRHHAMDALTIAFTKHSYVQYLNNLNARSNKSSSIYAIEQKELTRNNHNKLVFNPPIPLNEFRAEAKKQLENILVSIKPKNKVITDNVNITRKKGGVNKKIQSTPRGQLHNETIYGHIKHYSTKEEKIGATFDEAKILTVVNKAYRVLLLNRLKEFDGDAKKAFTAKNSLVKNPLFTDAAHSIRVPEKVATMQFTDLYTIRKAVDKDLSVDKVVDGHIRAILENRLKEFGGDANKAFTNLDGNPIWLNREKGISIKRVTIKGVNNVVALHDKKDKNGKLVLDKENNTQPTDFVSTGNNHHIAIYKDEKGELQEVPVSFFEATVRANNNLPIVDKTYKQSEGWKFLFTLKQNEYFVFPNLAIEFDPSQIDLKDPNNYSAISPNLYRVQKIATKNYFFRHHLETNVNEPNELKSITYKNIRSESGLEGIVKVRINHIGKITNVGE

SEQ ID NO: 3314 - protein, 1236 aa, unidentified
  REGION 1..1236: note = Description of Unknown: Cas Enzyme sequence
MKKILGLDLGVSSIGWAIIEESDSSKKILGMGTRIIPFSDDEDNEFSKGNAISKNQTRTLKRTQRKGYDRYQMRRENLRKALKEKEMLPESDLMNADKLVLWKIRNDAVSDKIGLKELGRVLLHLNQKRGYKSNRSEANLDKKDANYVTEVKNRYEKLKETNETIGQYFYRQISTNRYYRIKDQVFPREAYMEEFDRIMKKQQEFYPDVLTPEFIKRLRDEIIFYQRPLKSQKKLVSLCELEKRLVLTDDGKGGKIKSFKGPRVTHRSSPLFQVCTIWESINKIKLKNKYGEEYEIPLEKKKQIFDYLNNNEELSFKELLKLLDLKKNEDWTGNEWLSKGLKGNFTKSEIVKCFDSPSCAEKFVEFNLEIEISKKTEQINIETGEVKTISGKVISPSFEQQPLYRVWHTIYSINDEADCINVLVKKFGIPEETAQKLAKIDFTKKGFGNKSSRAIRKILPYLMDGLVYSEACRYAGYNHSGSLTKEENEKRELLDFIPLLQKNSLRQPVVEKILNQMINVVNAVIREYGRPDEIKVELARELKQSRKERANTVKMINQRERENEKIARRLVEEYHVRATRNNILKWRLFHNVKDDESKVNNICIYCGKSFGIVDALTGAEVDIEHIIPRTLLFDDSENNKILAHRKCNQSKGNMTAYDYMKSKGENEFKDYLERVNQFYRKEIINRIKRDRLMTPAEKIPQDFIQRQLRETQYISKKAMEILSSVCREVHSTTGSVTEFLRRLWGWDDVLMNLQLPNYREVGLTEWIEVESNGQTHRKEIIKDWQKRLDHRHHAIDALTIACTKQGYIQRINTLSSVITREEMYKEVSKTDSGKAAWKTLLEKYIAGQQPFKTAEVEKHAEKILVSFKQGKRVATKGVRKINIHGKKKIVQKGIIVPRGPLSKENIYGKIKIIEKNKPVKYLFENPHLIFKPKIKKLVEERLTRFEGNVTEAYQSLKKEPIFLDDEKTVKLEYGTCFKEEYVIKYPLSKLKAKDIKYVIDKHVRQILEKRLNEFNGNEKEAFGNLENNPVWYDKEKKIPIKTVRCFTGLTAVEPVKYNEKKEPVGFVEPANNHHVAIYIDDKGKEQEHVCTFWHAVERKKYGFPVIITNPQKMWDEIIKKNINLPDNFRNKLPLAEWKFLLSFQQNEMFILGLSEEEVNEALRERNTALLSKSLYRVQKVANSNYYFRHHLETELKDDANSKKMRKFYCIQSLKSFFKLNPVKVRVNCLGQISKAD

SEQ ID NO: 3315 - protein, 1443 aa, unidentified
  REGION 1..1443: note = Description of Unknown: Cas Enzyme sequence
MKKILGLDLGTNSIGWALINYDCDNKQGEILGMGSRIIPMSQDILGEFDKGNSISQTATRTGYRSTRRLRERHLLRRERLHRVLNLMGFLPEHYAKQIDFKNRLGKFLEETEPKLAYWDKDFIFKGSFNEMLEDFRVNQPELLNRQNKKGEGAKIPYDWTIYYLRKKALTQRIEKEELAWLLLHFNQKRGYYQLRGEEEEENPNKSVEFYSLKVIDVIADEETNKKGETWYTLHLENGWIYRRSSKTDLSNWKDKVHDFIVTTDLDEGGSIKNDKEGNAKRSFRAPSEDDWTLIKKKTEQEINDSAKTVGTYIYDTLLKNPNQKIKGKLIRTIERKFYREELKAILNTQIQFHPELQNEDLFNDCVRELYRRNDAHQNILSKKDFVHLFVEDIIFYQRPLRSQKSSIGNCSLEFRKYKLNGEEKIQYLKAIPKSHPLYQEFRLWQWLKNLKIYERENETNVTAQFISGIEDLESLFDFLNERKEIDQKALLKYFALTDKKYRWNYVEGKKYPCNETGTQIKTRIAKIARLDNVPKDFLKPDIEQKLWHIIYSVTDKTEFEKALKSFANKHGFDELSFVENFKKIPPFKSEFGSFSEKAIKKLLPLMRLGRYWRWENIDQKTRSRIAKIINGEYDEEIKNRVREKSIELKKETDFQGLQLWLAQYIVYDRHSEASIIGKWNSVADLEEYLNEFKQHSLRNPIVEQVVTETLRVVKDIWTKYGNGVKDFFNEIHIELGREMKNTAEDREKITKQVMENENTNLRIKALLADLLNNEDVVNVRPYSPMQQDILKIYEEGALNSSDELPDDILKISKTAQPTKSELQRYKLWLEQRYRSPYTGEVIPLNNLFTSAYEIEHVIPQSRYFDDSFNNKVICEATVNKLKDRQLGLEFIKNHHGEKVETGFGNAVEIFSEEAYKGFVNEHYAKNRPKRNKLLLEEIPEKMIERQLNDTRYISKFISNLLSNIVRAESGDDGLNSKYILPGNGKITSKLKQDWGLDSVWNDLILPRFERLNELTKTSDFTAWNEQYKKYLPTIPLELSKGFRKKRIDHRHHAVDALVIACVTRDHINLLNNTYARTDNIRYDLQRKLRSFKKVQYQDKNTNKLAEREVPEDFLKPWNSFTKDARVELEKIVVSFKQYLRVINKTTNKYQRFVEKNGKKVKELVPQTKGDSWAIRKPMHKDTVSGEVTLNWVKVPKGKILTATRKVVNSTFDLKTIESITDTGIQKILKNYLTYKGNNPELAFSSEGLEEMNKNISHYNDGKWHQPIYKARIFELGSKFPLGQTGNKRMKFVEAAKGTNLFFAIYKDKNGIRTYDTIQLNIVIERQKQGLFSVPEVNEKGHKLIFYLSPNDLVYLPSTEEMEFPNMVDFKNITVEMINKIYKVVSFSGNQCFFVRQDIANSIVNKFEYSVLNKMEKSIEGIMIKELCWKLKIDRLGNVILTYF

SEQ ID NO: 3316 - protein, 1425 aa, unidentified
  REGION 1..1425: note = Description of Unknown: Cas Enzyme sequence
MKKILGLDLGTNSIGWSLVDKENKKILGMGCRIIPMGTDKQDYEKGIGMTKNADRRTKRTIRKMNKRYKLRRNKLLYILHELEMLPKQFQFKNGIPEATKIQDLELLPIKKGTLQLNSLQHYQLRVKALNESIEPKEFGKILYSFNQLRGYSGGNNDEEDTKKKKEEDNDDENDTVKKYEVFTQKVAIQKVAIQKVELSESKFQGRGKNKGQEFNKFDVTVLIDDEELEGETELQNLSEKINQEEELEIRIRRNKKGETTSVVFALPQKTNWRKQMEKTEEDLKQGNLHISQLILQDLIQNKWTKIRNRVFLRNRYQAEFDAVWDIQSKAHPILNSCPKETLEKIANYLFPGKSETQEKLRQTAIKNGLKYIIKEQVIYYQRPLKPQTELISKCPFEKEETVLANSHPLFQEFRCWKQINNLFITSKQEVYNERKKKNVFQYTDRFLTDDEKQEIFDRLQTQKQLSFGEVAKIVKLKNDKTEYLNGLNVKAKLIGCDTQITIKKILGAHFEILNSIDEKVIEKIWKAIFDNANNGSEYDPNSLKVSSIKEILKPLNDEDLATELALKFAQSVKFPRKYASLSEKTILNILPLIQLNPKNVSEQIKIKFDNIKDNIERLNKNENVDIETGEIINDLQDYVIDFVQNNPNALEKGGIMEAFAISLAYSKHTAEKISAQFKDYHEIQRVDRNLRNPIVEQLANETMQVVKAIWKQYKFNPEELEIRVELARDLKNSAKERDKIYKGQLKSQKTNETIKKRLTELKQELSPKNIELYKLWSNQNTENYPAPKKVTEPTKDEIEKLRIWEEQGCISPYTLKPIPLSKLFSPERLYDIDHIVPKSRFFDDSASNKVVCETNINEEKSNRTAWEYISQQNSAYEICSIESYVAHINQIFYGKKKKNLLLEKIPTNPVERQIKDTQYISVAVKNELAKIVGSDNVKTSTGEVTSFLRNRWGLRDLFMRLTQDRFKQMELWDINKETQKTNDEWVKLEFDERKNKKVLKIKNWSKRYDHRHHAIDALVVALTEQSHIQRLNNLNKYLQDELLKRKEEFNLEVKEDETILEAFFNLDKNRRAEIQRQIESSRHFEKPFEDLVKQARTLLEAMVVSVKPKDKLGIKKDDRGNVQLKIRGALHQETNYGKTKDPKTGVLRDTKTIDISKITAKDISQIIDQDILAKEIDNHRKKYDSMKEAFTGEGLKAFNENRFQTKKPTEFKPPVYKVKVWYSNKITEESTLQRLYNDNNKLSVVTGDNYLFMIMEKAGKRIFDIASLYDSADIAKRALREKDENYKQRICEDYRIKHKEKPGKVLFTLQQNDLVYLPENIDDPVLNFSNDEFKEWLNNVENKSKFSKRVYKAAKFTGKDCHFVPHNFANVISIPKDLTDEQKETLKEQYKDKKIPKKELNFIEYGSYRDCSPYESGEVSYQKSK

SEQ ID NO: 3317 - protein, 1566 aa, unidentified
  REGION 1..1566: note = Description of Unknown: Cas Enzyme sequence
MKKTILGLDLGTNSIGWALIRQNFESKEGEILGMGSRIIPMSQDILGDFGKGNSVSQTAERTGFRSVRRLRERYLLRRERLHRVLNILGFLPNHYAAAIDFQKRLGKFKEDEEPKLVYKPVWNDAKNKQEFEFIFKDAFAEMITDFAEKQPQLLINKHGEPALIPYDWTIYYLRKKALTQKIAKKELAWIILNFNQKRGYYQLRGEEDQDATRTSQTRIYFDTQIISEITDTGAVYKGLKVINIKLSNGDTGKYFAKELPNWIGVKKNIIATIDLDKDGNDRLEDDGALKRRFSIPTEDDWDKKWKLVKIKTEKEIGDSQKTVGSYIYDTLLQNPRQKIKGKLVRTIERKFYKEELKAILEKQIAFHPELQNDEIYNDCVRELYRNNEAHQIQLSAKGFAHLILNDIIFYQRPLRSQKSSIGNCSLEFHRYKDKEGQWQKQYLKAIPKSNPYYQEFRIWQWMYNLSIYKKDNDDNVTQDFLATTKDWESLSEFLNDRKEIKQSELIEHLLKRKLGVKKLPKAEGEKYRWNYVEDKEYPLNETRGLIKSRIQKLSGIPKDFLTREIEQQLWHIIFSVTDKVDYEKALKTFAIKHQLEENAFVDLFRKFPPFKSEYGSFSEKAIKKLLPLMRLGKYWDEQRILEHNAVYLKNIKRVLEKLSTKSEAISEKDKEDWNKSINNKLEAELMGFMDGDVQALQGLRLHIAQYLVYGRHAEAAVAGRWNSVEDIEQYLKEFRQHSLRNPIVEQVITETLRVVKDIWKSYGDGANNFFDEIHIELGRDLKNPADKRKDLTNKVTANENTNLRIKSLLIELQNDIAIENVRPYSPMQQEILKIYEDGVLNSDIEVPDDILKISKTAQPSSSDLQRYKLWLEQKYRSPYTGIPIPLSRLFTPEYEIEHIIPQSRYFDDSLSNKVICEAAVNKLKDNQIGLAFIKKHHGEIVPTGLGKTVQIYDVDAYELYVKQNFDKNRSKRNKLLLEEIPEKMIERQMNDTRYISKFISGLLSNIVRAESNDDGVNSKNLIPCNGKITTELKQDWGLNDVWNDLVLPRFERMNQITNSTLFTVWNENHKKYLPTVPLDLSKGFSKKRIDHRHHAMDALVIACATRDHVNLLNNQSARSDTRRYDLQNKLRRKQPYFNEKEQRQKDAFRDFIKPWDSLTQAAREALENIVVSFKQNLRVVNKSTNKYEKWVEVNGEKVKERQTQSGINWAVRKSLHKDTVSGKVQLPRIKVPNGKILTATRKSLDTSFDLKAIGAITDTGIQKILKCYLKAKDGNPDLAFSPEGLEDLNKNVAQYNDGKYHQPIYKVRVYELGSKFPLGQTGNKKDKYVEAAKGTNLFFAVYGNGKGKRSFETIPFNEVVERQKQGLGPAPDINHKGDSLLFTLSPDDLVYVPTPDEWENATKLDDLNFGKERKERIYKVEKASGTECYFVRHDIAFLIKQYDAKTKWGELESQNKLQTTMTPDRMKIADHCVKITLDRLGNIRPAKDSGSHFNGQPTILRETDVSYGKRTIKKFDSFEAMEDEQLAYYASLSPEELLRNHKLLSMAAFGIKDEKSIDQPDRKIKF

SEQ ID NO: 3318 - protein, 1400 aa, unidentified
  REGION 1..1400: note = Description of Unknown: Cas Enzyme sequence
MMKRILGLDLGTSSIGWAYVLEAQDDNEISKIEKLGVRVNPLTTDEQLNFEKGKPITTNAGRTLARSARRNLQRFKLRRDNLIEVLKREKWIDDKSILTENGNKSTFETYALRATAASKEIGLEELARVLLMINKKRGYKSSRKVNKEDEGQLVDGIEVAKKLYHENLPPGAFVYQLLKEGKKKLPDFYRSDLQRELDLIWDFQANYYPDLLTPDFKEELKGKGLRATSAIIWSKYKFNTAENKGTREEKKIQAYQWRKDGLTKQLEKEEVAYIIAEINGQLTNSSGYLGAISDRSKELYFNKQTVGQYLFNQLQQNTHARLKNQVFYRQDYLDEFEKIWSVQSQFHHCLTEQLKEEIRDIIIFYQRKLKSQKGLISFCEFEQREVVVNGKNKVIGLRVAPKSSPMFQEFKIWQQLNNVKLRNKTNKEVYNLAEEQKKYLFETLNLKGKLSAHQVLSLIEGKPKEWELNYTELEGNSTNAALYNAYLDILDMEGYDVRNELKIKLNKDEITLSDLDKPVSEIKDMIRRIFQHLGINTFILDFDAQLQGDDFEKQLSYQLWHLLYSYEEDDSKTGMDRLYNQLNLKFGFSLDQAKIIGKIALQDDYGNLSTKAMRQIYPYIQDAEYSAACKLAGYNHSKSSLTKEQLTNRVLKDHLDILPKNSLRNPVVEKILNQMVNVVNTLIDTENDKLVQEGKEADFRFDEIRIELARELKKNAKEREELTKAINTSKAEHEKIINILQTEDGIKNPTRNDIIRFKLYQELKNNGYKNLYTNEYIQRKDLFTNVYDIDHIIPQSRLFDDSFSNKVLVPRNVNIEKGNQTAFDYIHTKFGEDGIEAYEARVERLFNLREEGVSRSKYRKLLMRGSDIGEGFIERDLRDSQYIAKKAKAMLFEITPSVISTSGSVTDRLREDWGLVSVMKELNLPKFKAVGLTEYLETKDGNRKEVIKDWSKRNDHRHHAMDAITVAFTKHSHIQYLNHLNARKNEKSEFFSTIKAIEMKETYVDRDDLGNRKRFFKEPIAHFRSIVKAHLERILVSHKAKNKVVTKNRNKIDGKKEAQEVLTPRGQLHKETIYGKILQYTSKEEKISAKFDAATIAMVSNPRYRSALLDRLTAYGNDPKKAFTGKNSPIKSPIYFDQQRQLAVPEKVKLVWLEEDYTIRKAIGPDLKIEKVIDRGVKRVLEQRLSAYGGDTKKAFSDLENNPIWLNEEKGIAIKRVTISGVKNAEALHTKKDHFGQVLKDKDGNTMPVDFVSTGNNHHVAIYADENGALQERIVSFYEAVARVNSGFSIIDKDYNQHLGWKFLFSMKQNEMFLFPSEDFDPKQINFFDRNSYKLISENLFRVQKFTIKDYFFRHHLETNVEDNSKTKGKLWRREGLNGINGIVKVRINHLGEIVQVGEY

SEQ ID NO: 3319 - protein, 1393 aa, unidentified
  REGION 1..1393: note = Description of Unknown: Cas Enzyme sequence
MTKNILGLDLGVSSIGWAYVQEDSKSPEHNKIIKLGVRVNPLTVDEQLNFEKGKPITTNAGRTLARSARRNLQRFKLRRANLIEILIKNNILTENDFLAEVGKNSTFQTQELRAKAAQEKIDLAEFARVLLLINKKRGYKSSRKAKNDDEGQIIDGMFVAKKLYEENLTPGEYSYQLLQEGKKQLPDFYRSDLHSEFDKVWNFQRNFYPEILTEQLYNDLQGKNKNATWAILKEPFSLVGIKQTGTTQEKKEEKYLWRSKAVKKQLDFESLAVVLQEINSNLNSSSGYLGAISDRSKELYFKNQTVGEYLFQQLKDNPHAKLKNQVFYRQDYLDEFDKIWETQAKYHKELTEDLKAEVRDIIIFYQRKLKSQKGLISICEFENREIEITENGKIKKKTIGLKVAPKSSPLFQEFKIWQVLNNLLFQNVDTKEVFPIDFDFKQSIFDEVNIKGKLSAKDVLDLVGYSGKEWKANLKEIEGNYTNENLYTAFLKIIASEGIEFPKEFKLTIEDEIKVSKINVSAKIIKAFVREKLSELGIDISILNFNPELEGSDFERQSSYQLWHLLYSYEGDDSPSGNEKLYELLEKKFGFKKEHSKILAEIGFPQDYGSLSTKAMRKIYPFIKEHKYSVACNYAGYNHSKNSLTKEQLENRVLKEQLEILPKNSLRNPVVEKILNQMINLVNELIKEYGRPDEIRIELARELKFSAEERATMTSEINKATIQHQKYAEILRKEFNIPVPSRNDIIRYKLYLELANNGFKDLYTNAKIERENLFSEKYDIDHIIPQSRFFDDSFSNKVLVPRGANLKKGNFTAFDYLEIEGKEKLEKFLNIIRDLYDKGAITKAKFEKLQKKGIEIGDGFIERDLRNTQYIAKKSKEILFGITNSVISTSGRITDKLREDWNLVNTMKELNLEKYRKLGFTETVINSKGEEKQRIIDWTKRNDHRHHAMDALTVAFTTHNHIQYLNYLNARKNEEHKEHKIITNIEKNITEIVEKKNGSKERRFKEPVKNLRKEARKYLDEILISHKAKNKVVTKNINKIKKKGGIIAKTELTPRGQLHKETIYGSSKFLKTREEKISGKFDWETVQKVQNESYRKALLHRLKEFGEDPKKAFTGKNIISKNPIYLSENEKIPESVILAWYETGYTIRKAVNPDNFKDYKNIEKVIDKGVKNILIERLKEFNGNSKEAFSDLEKNPIWLNKSKGIAIKTVTISGINNAEALHYKKDHLGREILDENGRKIAVDFVSTGNNHHVAIYEDVNGNFQEKVVSFYEAVERVNQNLPIIDKEYNAELGWKFLFTLKQNEMFLFPSEDFDPLEADLFDDKNLSLISKNLFRVQKFTIKDYFFRHHLETNVEDNSALKGVTWRREGLSGLKGVLKVRLNHLGKIVQVGEY

SEQ ID NO: 3320 - protein, 1400 aa, unidentified
  REGION 1..1400: note = Description of Unknown: Cas Enzyme sequence
MTKNILGLDLGVSSIGWAVVQEDSKNPENNKIIKLGVRVNPLTVDEQLNFEKGKPITTNAGRTLARSARRSLQRFKLRRVNLIDVLKKNNILKETDLLTEVGKNSTFQTQEIRAISARQKIELSEFARVLLLINKKRGYKSSRKAKNEEDGQIIDGMAVAKKLYEENQTPGEYSYQLLQQGKKQLPDFYRSDLQAEFDKIWNFQKQFNPEIFTNELYARLQGKNRNATWKELEIPFSLVGIKQIGTLQEKKIERYLWRSEAVKKRLDFESLAVVFQEINSNMNNSSGYLGAISDRSKELYFNNQTVGEYLYNQLKINPHTKLKNQVFYRQDYLDEFEKIWETQAKYHKELTKELKEEIRDIVIFYQRKLKSQKGLISICEFENREIEIKDISTGSTGKIKKKTIGLKVAPKSSPLFQEFKIWQVLNNLQFQNLETKEIFPIDLDFKQSIFDEVNIKGKLSAKDVLDIVGYSGKEWKTNFKDIEGNYTNENFYTAFLKIIANEGIEFPKEFKLTIDDEIKVSKINASAEIIKLFVKEKLSELGIDISVLDFNPELEGRDFEKQASYQLWHLLYSYEGDDSPSGNEKLYELLEKKFSFKKEHSKILAEIGFPQDYGNLSSKAMRKIYPYIKEHKYSEACNYAGYNHSKNSLTKEQLENRVLKEQLDILPKNSLRNPVVEKILNQMINLVNEVSKEYGRPDEIRIELARELKNNAEERANMTSEINKATLLHQKYAEILKKEFGIPVPSRNDIIRYKLYLELANNGFKDLYTDVKIERENLFTEKYDIDHIIPQSRFFDDSFSNKVLVPRGANLKKGSSTAFDYLEIEGKEKLEKFLNIIRELYDKGAITKAKYEKLQKKGVEIGDGFIERDLRNTQYIAKKAKEILFGITNSVVSTSGRITDKLREDWNLFNTMKELNLEKYRKLGLTELIENSKGEEKERIIDWTKRNDHRHHAMDALTVAFTTHNHIQYLNYLNARKDEKHKEHQNIFAIENLITKIIEKKNGSKERRFKEPIINFRIDAKKHLDEVLISHKAKNKVVTKNINKIKKKGSVVAKTELTPRGQLHKETIYGSSKFLKTKEEKVSGKFDLETINKVQNEKFRNTLLARLQEFDGDSKKAFTGKNVISKNPIFLNDEKTEQLPESVILAWYETGYTIRKVVNPDNFKDYKNIEKVIDKGVREILMNRLKEFNGNSKEAFSDLDKNPIWLNKSKGIAVKTVTITGINNAEALHYKKDHLGKDILDENGKKIAVDFVSTGNNHHVAIYEDERGNLQEKVVSFYEAVERVNQGLAIIDKDYNADLGWKFLFTMKQNEMFLFPSEDFNPKEMDLFDEKNLNLISKNLFRVQKIATKDYFFRHHLETTVEDNSALKGITWRREGLNGIREILKVRLNHLGKIVYIGEY

SEQ ID NO: 3321 - protein, 1281 aa, unidentified
  REGION 1..1281: note = Description of Unknown: Cas Enzyme sequence
MVKNILGLDLGTNSIGWALIKIDDNGTPIRIIAMGSRIIPMSPNDRDEFERGLSITKNQNRTVSRTQRKGYDRKQLKKSYLKEILNKYNIFPSEELLKLPTLDLWKLRSDSVNPNESISAEQLGRILYMLNQKRGYKSARSEANADKKDTDYVQAVKGRYAQLKDKNQTIGQFFYDGLYNASVTDSYFRVKEEVYPREAYIEEFDTIINVQKDKHDFLTEEVINQLRNEIIYYQRKLKSQKGLVSICEFEGFEKTVFDKEKNKNKVVFVGPKVAPKTSPLFQLCRIWEVVNNISLKVKNPEGSKYKWGDKIPNLEEKEALADYLFKNESLSFTKLLEILSLNKSDVYVNKQILKGIKGNETYSTLHHILGDNELLNFDVTIIPTNHTSMLVDKKTGEILEERAGLELDVSLEQEPLYQLWHTIYSLKDLDECKNALIKRFGFDNEIAEQLSRIDFNKQAFGNKSNKSMRKILPFLMEGYDYSQACSLAGYNHSNSLTKDEREQQVTLGKLELLPKNSLRQPIVEKILNQMINVVNAIIEQYGKPSEIRVELARELKQSKDERNNADLQNSKNKKLNEEIGKRLAELGLPVTKRYIQKYKFIFPSLSKNLKDAQVNNQCIYCGETFNLSEALSGDAYDVDHIVPKALLFDDSQTNKVLVHRKCNSTKTNQTAYDYIATKGEEQLRVYSERVDDWFKRGIISYSKMQRLKVSHKEYLERKNLQKETETDKKLWENFIERQLRDTQYIARKSREILQKVCNNVTTTEGGVTAKLRNVWGWNDVLMNLQMPKYKDLGQTVVKEWTSDHGKRKHQKEEIENWTKRDDHRHHAIDALVIACTKQGFIQRINTLNSSDTRDEFKKEIEEHKKRLGKSFNEDNYEHLHKEKSTLLDDYLRSQKPSTFTTKYVEQEADKILISFKAGKKVATITKFKATGKNKEQGVIVPRGALHEQSVYGKIKIIEKDKPLKYLFENSDKIVNPKIKSLVEERLNENKNDIKIALSSLKKKPIFLNFEKTEILEKSSCYNDATVLKYKLQSLKANQADDIVDERVKFLVKERLAQFGNKEKEAFKDTLWFNEEKQIPIITVRLFARPDANNLQAIKTNENGKEIGFVVMGNNHHIAIYEDKDNKLFQHSCTFWHAVERKKYNISTVIKNSSEVWNQVLDKKLPESFLNKLPADNLNLKFSMQQNEMFILGLSQEEFDEALKNNDKSLLSKHLYLVWSISNNDYYFRHHLETKNTELKNISTAKDSKRYFRFKSVGALVGMNPVKIRLNHLGEITKVGEL

SEQ ID NO: 3322 - protein, 1437 aa, unidentified
  REGION 1..1437: note = Description of Unknown: Cas Enzyme sequence
MSKNILGLDLGTNSIGWALINQDFASKEGKILGMGSRIIPMDEGEKGKFAEGASISKTADRTKYRGVRRLRERYLLRRERLHRVLNIIKFLPEHFANEIDFDKRFGKFKSDNEPKIAYNEGGFVFKNSFEEMLSDFKTHQPQFLKNEKGEDRLVPYDWTIYYLRKKALSQKIEKEELAWILLNFNQKRGYYQLRGEEEEENPNKLVEFYSLKIVDVTADEPQRGKTDIWYSLMLENGWVYRRASKTPLFDWKDKTRDFIVTTDLNDDGSIKKDKDGNEKRSFRAPAETDWTLIKKKTEQEIDQSHKTVGTYIYDTLLQNPKQKIKGKLVRTIERKFYKAELKEILEKQKEFHPELQSDDLYNDCVRELYKNNNAHQLTLSKKDFVHLFLEDIIFYQRPLRSQKSSISNCTLEFKKYIDKEGAEHTQYLKAIPKSNPYYQEFRIWQWMYNLNIYRKDDDSNVTQEFLNSYEDLESLFEFLDGRKEVDQKALLKHFKLNEKTHRWNFVEDKKYPCNETKTMIATRLGKVENIADDFFTRAIEQQIWHIIYSVNDKIEYEKALKSFARKNNLDEVSFFEAFKKFPPFKSEYGSFSEKAIKKLLPLMRVGEYWNYDHIDNSSKARIDKIITGEYDENIKDKVREKAINLTTESHFQGLQLWLAQYVIYGRHSEASIIGKWNSADDLEAFLQEFKQHSLRNPIVEQVITETLRVVKDIWVQYGKGAKDFFSEIHIELGREMKNTAEDRKKITNQVTENENTNLRIKALLAEMMNDADVENVRPFSPMQQEILKIYEDGVLNSDIEIEDDILKISKTAQPSSSDLKRYKLWLEQGYKSPYTGQIIPLNKLFTPEYEIEHIIPQSRYFDDSFNNKIICESAVNKLKDNYIGLAFIKQFHGTIVECGFGKTVKIFEADEYEEFVKKHYAKNRGKKAKLLLEEIPEKMIERQLNDTRHISKYISGVLSNIVRVEDGTDEGVNSKNIVPGNGKITTTLKQDWGLNDVWNDLILPRFERMNQLTNSTDFTAWNENHQKFLPTVPIELSKGFSKKRIDHRHHAMDALVIACATKDHVNLLNNQSAKSDTKRYDLKKKLMKFEKAVYNDAKTGERIEREIPKQFLKPWETFTVDAKNSLENIVVSFKQNLRVINKATNYFEKYVEKDGVKTKERVAQTGINWAIRKPMHKETVSGKVSLPWVKLPKGKILTATRKSLDTSFDMKTIGSITDTGIQKILRNYLTVKGSPELAFSPEGIEDLNKNIRQYNNGKDHQPINKIRIFEMGSKFQVGYSGNKKDKYVEAAKGTNLFFAVYEDEKGKRSYESVPLNIVVERQKQGLVSVPERNEKEHQLLFNLSPNDLVYVSDGSSENIETNRIYKMVSSTGVECHFVPNHYSSPILKNECGTNNKSERLLEYFNDNDLKGEDDKMLMIKNFCIKLKVDRLGNISKA

SEQ ID NO: 3323 - protein, 1444 aa, unidentified
  REGION 1..1444: note = Description of Unknown: Cas Enzyme sequence
MGKNILGLDLGTNSIGWALIKQDFENKQGKIIGMGSRIIPMDEGEKGKFAEGASISKTADRKKYRGVRRLRERYLLRRERLHRVLNIIKFLPEHFANEIDFEKRFGKFKTENEPKIAYNNDSFIFKNSFEEMLADFKTHQPQILKNEKGEDKLVPYDWTIYYLRKKALSKKIEKEELAWILLNFNQKRGYYQLRGEEEEENPNKLVEFYSLKIVEVTADELQGGKSDIWYSLTLENGWVYRRASKTPLFDWKDKTRDFIVTTDLNDDGSIKKDKDGNERRSFRAPAETDWTLVKKKTEQEIDSSHKTVGTYIYDTLLQNPKQKIKGKLVRTIERKFYKAELKEILEKQKEFHPELQNEDLYNDSVRELYKNNDAHQLTLSKKDFVHLFLEDIIFYQRPLRSQKSSISNCTLEFKKYKDENGVEHTQYLKAVPKSNPYYQEFRIWQWMYNLNIYRKDDDENVTKEFINSYGDLENLFEFLDGRKEIEQKPLLKFLLEQKDIKGKLLTAEVEKYRWNYVEGKTYPCNETKTMISTRLSKVENILNTFFTREIEQQIWHIIYSVSDKIEYEKALKSFARKNNLDETSFFEAFKKFPPFKSEYGSFSEKAIKKLLPLMRVGKYWNYDNIDEHSKERIDKIITGEFDENIKDKVREKAINLTTESHFQGLQLWLSQYIIYGRHSEASIIGKWNSGDDLEMFLKEFKQHSLRNPIVEQIITETLRVVKDIWVQYGKGVKDFFSEIHIELGREMKNTAEDRKKITNQVTENENTNLRIKALLAEMMNDANVENVRPFSPMQQEILKIYEDGVLNSDIPIDDEMLKISKTAQPSSSDLKRYKLWLEQGYKSPYTGQIIPLNKLFTPEYEIEHIIPQSRYFDDSFSNKIICEAAVNKLKDNYIGLAFIKQFHGTIVECGFGKTVKIFEADEYEEFIKKHYAKNRGKKAKLLLEEVPEKMIERQMNDTRYISKYISGVLSNIVRVEDGTDEGVNSKNIVPGNGKITTTLKQDWGLNDVWNELILPRFERMNQLTNTTDFTAWNENHQKYLPTVPIEFSKGFSKKRIDHRHHAMDALVIACATKEHINYMNNEYALRKGKSKDEKQTIRYDLRANLCYKKYNDGSKENYRWIFKKPWETFIVDARNSLENIVVSFKQNLRVINKATNYYEKYVEKDGVKTKEQVVQTGINWAIRKPMHKETVSGKVNLAWVKLPKGKILTATRKSLDTSFDMKTIGSITDTGIQKILRNYLTAKGSSELAFSPEGIEDLNKNIRQYNDGKDHQPINKVRVFEMGSKFQVGYSGNKKDKYVEAAKGTNLFFAVYEDEKGKRSYESVPLNIVIERQKQGLDVVDLKGPKDFYLSPNDLVYLPSADEVENKINIDFKDFSKEKKQNIYKVVSFSGNQLFFIRQDVATSVVNKAEFSALNKMERAIDGRMIKETCLKIKTDRIGNILKA

SEQ ID NO: 3324 - protein, 1429 aa, unidentified
  REGION 1..1429: note = Description of Unknown: Cas Enzyme sequence
MKRNILGLDLGTNSIGWALITQDFPNKQGEIRGMGSRIIPMSQDILGDFGKGNSVSQTADRTKYRSVRRLRERFLLRRERLHRVLNVLNFLPQHYASQIDFEKRLGKFKAETEPKLAWRIKDEKYTFLFQNSFNEMLEDFKVDGQDLKIPYDWTIYYLRKKALSKKIEKEELAWILLNFNQKRGYYQLRGEEEDENPNKLVEFYSLKIVDVVADEPQRGKSDIWYSLILENGWVYRRSSKIPLFDWKDKTRDFIVTTDLNDDGSIKTDKEGNEKRSFRAPSENDWTLVKKKTEQEIDQSHKTVGTYIYETLLQNPKQKIKGKLVRTVERKFYKDELRQILEKQKEFHLELKNDDLLSDCIRELYRNNESHQLTLSKKDFVHLFMEDLIFYQRPLKSQKSSISNCSLEFRKYKDANGIEHTQYLKAIPKSNPHYQEFRLWQWMYNLNIYRKDDEANVTNDLLNSIEDLQNLFEYLNSRKEVDQKALLKHFKLNEKTHRWNYVEDKKYPCNETKTMISSRLDKVHNISDAFLTRELEQKIWHVIYSVNDKIEYEKALKSFANKNDLDESSFIEAFKKFPPFKSEYGSYSEKAIKKLLPLMRLGNYWNYEGIDNKSKDRIQKIITGEYDENIKDKVREKAINLTTESHFQGLQLWLSQYIVYGRHSEASMIGKWTSADDLEEFLKDFKQHSLRNPIVEQVITETLRVVKDIWLKYGNGAKDFFNEIHIELGREMKLPSADRDKLTRQISENENTNLRIKALLAEMMNDSAVENVRPFSPMQQNILKIYEDGVLNSDIEIEDDILKISKTAQPSSSDLKRYKLWLEQKYKSPYTGQIIPLNKLFTPEYEIEHIIPQSRYYDDSFSNKIICESAVNKLKDNYIGLGFIKQFGGTIVQCGNGKSATVLKQDEYEDFVKKHYANNRGKRNKLLMEDIPEKMIERQINDTRYISKYISGLLSNIVRVEDGSDEGMNSKNIVPFNGKITTELKQHWGLNDVWNDLILPRFERMNQLTNSTDFTAWNENHQKFLPNVPIEFSKGFSKKRIDHRHHAMDALVIACATKDHVNLLNNQSAKSDTRRYDLKRKLMKFEKVAYSHPQTGARIEREVATHFLKPWNNFTVDAKDSLETIIVSYKQNLRVINKASNYYEKYVEKNGVKVKERLQQQGTNWAIRKPLHKETVSGKIDLPWVKVPKGKILTATRKILDTSFDSKTINTITDTGIQKILKNYLAFKDGNPDLAFSPEGIEDLNKNIEKYNDGKPHQPINKVRIFELGSKFQLGASGNKKDKYVEAAKGTNLFFAVYENEEGKRSYETIPLNEVIERQKQGLNSVELKGANDFYLCPNDLVYLPTEDERENIINSDFNSFTKDKNKRVYKVVSFSGAQIFFVRQDISTSIVNKMEFSTLNKMERAIDGSMVKENCVKLNVDRLGIISKA

SEQ ID NO: 3325 - protein, 1437 aa, unidentified
  REGION 1..1437: note = Description of Unknown: Cas Enzyme sequence
MGKNILGLDLGTNSIGWALINQDFDKKEGKILGMGSRIIPMSQDILGEFGKGNSVSQTASRTGYRGVRRLRERFLLRRERLHRILNLLKFLPEHFASQIDFEKRFGKFKEETEPKLVYDKNEFIFKKSFEEMLSDFQKHQPKLLENDKKVPYDWTIYYLRNKALTQKIEKEELAWILLNFNQKRGYYQLRGEEEEENPNKLVEFYSLTIVDVLADEPQKGKSDIWYSLILENGWIYRRASKTPLFDWKDKIRDFIVTTDLNDDGSVKTDKDGNEKRSFRAPSDNDWTLVKKKTESEIDKTKKTVGAYIYNALLQNPKQKINGKLVRTIERKFYKEELKKILETQQSFHPELKNDDLYNDCVRELYRNNEAHQLTLSKKDFVHLFLEDIIFYQRPLRSQKSSISNCTLEFKKYVDKDGVEHSQYLKAIPKSNPYYQEFRIWQWMYNLNIYRKDDDENETKEFLNSYEDLENLFKFLDERKEVDQKALLKFLLEQKDFKGKLLTAEIEKYRWNYVESKPYPCNETKTMIATRLSKVENISDTFFTREIEQQIWHIIYSVNDKIEYEKALKSFARKHNLDELSFFEVFKKFPPFKSDYGSFSEKAIKKLLPLMRLGKYWNYENINDYSKDRIQKIITGEFDENIKDKVREKSINLTTENHFQGLQLWLAQYIVYGRHSEASLIGKWNSADDLEEFLKEFKQHSLRNPIVEQIITETLRVVKDIWVKYGNGVKDFFDEIHIELGREMKQTKDERLDATKRITENENTNLRIKALLAEMVNDSSVENVRPFSPMQQEILKIYEDGILKSDIDIEDDILKISKTAQPSTSDLRRYKLWLEQKYKSPYTGQIIPLNKLFTPEYEIEHIIPQSRYFDDSFSNKIICESAVNKLKDNYIGLGFIKQFHGYKVSDKVKIFEVEEYEDFVKKHYANNRGKRTKLLLEEIPEKMIERQLNDTRHISKYISGVLSNIVRVEDGSDEGVNSKNIVPGNGKITTLLKQDWGLNDVWNELILPRFERMNQLTNSNDFTVWNENHQKFLPTVPIEFSKGFSKKRIDHRHHALDALVIACATKDHVNLLNNQSAKSDTKRYDLKRKLMKFEKAVYNHPQTGDRIERDVPKQFLKPWDNFTVEAKNNLETIIVSFKQNLRVINKATNYYEKWVEKDGVKTKERVEQKGINWAIRKPMHKETVSGKVDLPRIKVPKGKILTATRKSLDTSFDLKTINSITDTGIQKILKNYLEFKGNPELAFSPEGIEDLNNNIEKYNDGKAHQPINKVRIYELGSKFQVGQIGNKKNKYVESAKGTNLFFAVYEDEKGKRSYETIPLNIVVERQKQGLSVVDLKGVNDFYLSPNDLVYIPSGDESENVNNIDFENFSKAKIGNIYKVVSFSGNQLFLVRQDIATSVVNKAEFSTLNKMERAIDGSMIKESCIKLKVDRLGKISKNL

SEQ ID NO: 3326 - protein, 1440 aa, unidentified
  REGION 1..1440: note = Description of Unknown: Cas Enzyme sequence
MAKNILGLDLGTNSIGWALIKQEFQNKQGEILGMGSRIIPMSQDILGEFGKGNSVSQTAARTGYRSVRRLRERFLLRRERLHRVLNVLNFLPEHYASQIDFEKRFGKFNQETEPKLAYNKEGFIFKKSFEEMVSDFRIHQPQLLENDKKVPYDWTIYYLRKKALTQKIEKEELAWILLNFNQKRGYYQLRGEEEEENPNKLIEFYSLKIVDVFADEPQKGKSDIWYSLVLENGWIYRRSSKTPLFDWKDKTRDFIVTTDLNDDGSIKTDKDGNEKRSFRAPSENDWTLVKKKTEQEIDQSHKTVGTYIYETLLQNPKQKIKGKLVRTIERKFYKEELKQILEKQKEFHPELQNEDLYSDCIRELYRNNEAHQLTLSKKDFVHLFMEDIIFYQRPLRSQKSSISNCTLEFRKYKDENGAEHTQFLKAIPKSNPYYQEFRIWQWIFNLNIYKKDNDDNVTKEFLKTTKDFENLFEFLNNRKEIEQKSLLKFLLEQKEFKGKLLNLEVEKYSWNFVEDKKYPCNETKTMISSRLDKVENISADFLTREIEQKIWHIIYSVNDKIEYEKALKSFAGKNNLDENSFIEAFKKFPPFKSEYGSFSEKAIKKLLPLMRLGKYWNYADIDKYSKDRIQKIITGEYDENIKDKVREKAVHLTTENDFQGLQLWLAQYIVYGRHSEASMIGKWNSADDLEEFLKDFKQHSLRNPIVEQVITETLRVVKDIWLKYGNGAKDFFSEIHIELGREMKLPADDRKKLTNQISENENTNLRIKALLAEMMNDHSVENVRPYSPMQQEILKIYEDGILKSDIEIEDDILKISKTAQPSSSDLKRYKLWLEQKYKSPYTGQIIPLNKLFTPEYEIEHIIPQSRYFDDSFSNKIICESAVNKLKDNYIGLGFIKQFGGTIIELGFGKNVKVFEVEEYEDFVKKHYANNRGKRNKLLLEEIPEKMIERQLNDTRHISKYISGVLSNIVRVEDGTDEGVNSKNIVPGNGKITTTLKQDWGLNDVWNDLILPRFERMNQLTNSTDFTAWNENHQKFLPTVPIEFSKGFSKKRIDHRHHAMDALVIACATKDHVNLLNNQSAKSDTKRYDLKKKLMNFEKVAYNDAKTGDRIEREVPKQFIKPWKNFTVEAKNNLEKIIVSFKQNLRVINKATNYYEKYIEKDGVKAKERVEQTGTNWAIRKPMHKETVSGKIELPWVKVPKGKILTATRKSLDTFFDLKTINSITDTGIQKILKKYLEFKESPELAFSPEGIEDLNKNIEKYNDGKPHQPIHKVRVFELGSKFQVGQTGNKKNKYVEAAKGTNLFFAVYEDKKGKRSYETIPLNEVVERQKQGLSVVELKSEKDFYLCPNDLVYIPSDDELDNTSGIDYKNMSKEKRKHIYKVVSFSGSQIFFVRQDVAVSIVNKAEFSTLNKMERAMDGNMIKENCIKLKIDRLGNISKA

SEQ ID NO: 3327 - protein, 1426 aa, unidentified
  REGION 1..1426: note = Description of Unknown: Cas Enzyme sequence
MSKHILGLDLGTNSIGWALINQDFDKKEGKILGMGSRIIPMSQDILGEFGKGNSVSQTASRTGYRGVRRLRERFLLRRERLHRILNLLKFLPEHFASQIDFEKRFGKFKEETEPKLVYDKNEFIFKKSFEEMLSDFQKHQPKLLENDKKVPYDWTIYYLRNKALTQKIEKEELAWILLNFNQKRGYYQLRGEDFEEEKDKTFVRLKVERIVDSGDNIKGKILYDVYFDNGWKYDKQIVKTEDWVERVKEFIVTESFLKNGDIKRTFKAVDSEKDWIAIKTKTEQEIDNSDKTVGTYIYNALLQNPKQKINGKLVRTIERKFYKEELKKILETQQSFHPELKNDNLYNDCVRELYRNNEAHQLTLSKKDFVHLFLEDIIFYQRPLRSQKSSISNCTLEFKKYVDKDGVEHTQYLKAIPKSNPYYQEFRIWQWIYNLNIYRKDDDENVTKEFLNSYEDLENLFKFLDERKEVDQKALLKCLLEQKDFKGKLLTAEIEKYRWNYVESKPYPCNETKTMISSRLDKVKNIADDFFTREIEQKIWHIIYSVNDKVEYEKALKSFANKNNLDKVSFFEAFKKFPPFKSEYGSFSEKAIKKLLPLMRVGKYWSYDNIDEHSKARIDKIITGEYDENIKDKVREKAINLTTENHFQGLQLWLAQYIVYGRHSEASLIGKWNSADDLEEFLKEFKQHSLRNPIVEQIITETLRVVKDIWVKYGNGVKDFFDEIHIELGREMKQTKDERLDATKRITENENTNLRIKALLAEMVNDSSVENVRPFSPMQQEILKIYEDGILKSDIDIEDDILKISKTAQPSPSDLKRYKLWLEQKYKSPYTGQIIPLNKLFTPEYEIEHIIPQSRYFDDSFSNKIICESAVNKLKDNYIGLGFIKQFHGYKVSDKVKIFEVEEYEDFVKKHYANNRGKRTKLLLEEIPEKMIERQLNDTRHISKYISGVLSNIVRVEDGSDEGVNSKNIVPGNGRITTQLKQDWGLNDVWNELILPRFERMNQLTNSTDFTVWNENHQKFLPTVPIEFSKGFSKKRIDHRHHALDALVIACATKDHVNLLNNQSAKSDTKRYDLKRKLMKFEKAVYNHPQTGDRIERDVPKQFLKPWDNFTVEAKNNLETIIVSFKQNLRVINKATNYYEKWVGKDGMKTKERVEQKGVNWAIRKPMHKETVSGKVDLPRIKVPKGKILTATRKSLDTSFDLKTINSITDTGIQKILKNYLEFKGNPELAFSPEGIEDLNNNIEKYNDGKAHQPINKVRIYELGSKFQVGQIGNKKNKYVESAKGTNLFFAVYEDEKGKRSYETIPLNIVVERQKQGLSVVDLKGVNDFYLSPNDLVYIPSGDESENVNNIDFENFSKAKIGNIYKVVSFSGNQLFLVRQDIATSVVNKAEFSTLNKMERAIDGSMIKESCIKLKVDRLGKISKNL

SEQ ID NO: 3328 - protein, 1418 aa, unidentified
  REGION 1..1418: note = Description of Unknown: Cas Enzyme sequence
MAKNILGLDLGTNSIGWALINQDFENKQGKILGMGSRIIPMSQDILGDFGKGNSVSQTAARTGYRGVRRLRERFLLRRERLHRVLNIINYLPEHYASQIDFEKRFGKFKEETEPKLAYNKDGFVFKNSFEEMLTDFKNNQPQLLENNKKIPYDWTIYYLRKKAISQKIEKEELAWILLNFNQKRGYYQLRGEDFEEEKDKTFVRLKVEKIIDSGDNVKGKILYDVYFENGWKYDKQIVKTEDWIERVKEFIVTESFLKNGDIKRTFKAVDSEKDWIAIKTKTEQEIDKSHKTVGVYIYEALLQNPKQKIKGKLVRTIERKFYKDELKQILEKQKEFHQELKNDDLYNDCVRELYRNNEAHQLTLSKKEFVHLLMEDIIFYQRPLRSQKSSISNCSLESRKYKDENGVEHTQFLKAIPKSNPYYQEFRIWQWIFNLNIYKKDDDTNVTKEFLNTIENFESLFEFLNNRKEVDQKALLKHFKLHEKIHRWNYVEDKKYPCNETKTMISSRLDKVENISDDFFTRETEQKIWHIIYSVNDKVEYEKALKSFSRKNNLDENSFFEAFKKFPPFKSEYGAFSEKAIKKLLPLMRLGKYWNYENISDDSKERIQKIITGEYDENIKDKVREKAIHLTSENNFQGLQLWLAQYVVYDRHSEASMIGKWNSAGDLEEFLKDFKQHSLRNPIVEQVITETIRVVKDIWLKYGNGAKDFFNEIHIELGREMKQTKDERLDATKRITENENTNLRIKALLAEMMNDHSVENVRPYSPMQQEILKIYEDGILKSDIEIEDDILKISKTAQPSSSDLKRYKLWLEQRYKSPYTGQIIPLNKLFTPEYEIEHIIPQSRYFDDSFSNKIICESAVNKLKDNYIGLGFIKQFGGTIIELGFGKSVKVFEIDEYEDFVKKHYANNRGKRNKLLLEEIPEKMIERQLNDTRHISKYISGVLSNIVRVEDGSDEGVNSKNIVPGNGKITTQLKQDWGLNDVWNDLILPRFERMNQLTNSTDFTAWNENHQKYLPTVPIKESKGFSKKRIDHRHHALDALVIACATKDHVNLLNNQSAKSDTKRYDLKKKLMKFEKAIYKHPQTGERIERDVPKQFLKPWESFTIDAKNNLDKIIVSFKQNLRVINKATNYYEKYVEKDNVKTKEIIEQTGTNWAIRKPMHKETVSGKIDLPWVKVPKGKILTATRKSLDISFDLKSINSISDTGIQKILRNYLEFKESPELAFSPEGIEDMNKNIEKYNDGKLHQPINKVRVFELGSKFQVGQTGNKKDKYVEAAKGTNLFFAVYKDKNGKRSYETIPLNIVIERQKQGLSAVDLKGANDFYLCPNDLVYIPSEDDLENINNIDFKNFTKDRNDRIYKVVSFSGSQIFFARQDIAVSIVNKAEFSTLNKMERAIDGSMVKENCIKLNIDRLGNISKA

SEQ ID NO: 3329 - protein, 1282 aa, unidentified
  REGION 1..1282: note = Description of Unknown: Cas Enzyme sequence
MSKNILGLDLGTNSIGWALIKVDENNIPIRIIAMGSRIIPLSSSDKEEFQRGLSITKNQSRTVSRTQRKGYDRKQMKKSDLKKLLIKYNIFPTEELLKLPMLDLWKLRSDSANPNENISAEQLGRIFYMLNQKRGYKSARSEANADKKDTDYVQAVKGRYAQLKDKNKTIGQFFYDGLNNANANNSYFRVKEEVYPREAYIEEFDTIINTQKGKHDFLTDEVIHQLRNEIIYFQRKLKSQKGLVSICEFEGFEKTIFDKVKDKNKVVFVGPKVAPKTSPLFQLCRIWEVVNTITLKIKNPEGSKYKWGEKIPSLEEKELLVDYLFTNESLSFTKLLEILNLKKDDVYVNKQILKGIKGNETYATLYNILGNNALLNFDVSIIPSDKTSMLVDKKTGEILEERAGLELDASLEKEPLYQLWHTIYSLKDLDECKNTLIKRFGFEDEIAEKLSKIDFNKQAFGNKSNKSMRKILPFLMEGYDYSQACSLAGYNHSNSLTKEEREQQITLDKLELLPKNSLRQPIVEKILNQMINVVNAILEQYGKPSEIRIELARELKQSKDERNDADLQNSKNKKLNEEIGKRLAELGLPETKRYIQKYKFIFPSLSKSLKDAKVNNQCIYCGETFNLTEALSGDAYDVDHIVPKSLLFDDSQTNKVLVHRKCNSTKTNQTAYDYIATKGEEQVRIYSDRVDDWFKRGIISYSKMQRLKVSHKEYLERKSLKKETETDKKLWENFIDRQLRDTQYIARKSREILQKVCNNVTTTEGGVTAKLRNLWGWDDVLMNLQMPKYKELGQTVIKEWTSDHGKRKHQKEEIENWTKRDDHRHHAIDALVIACTKQGFIQRINTLNSSDTKDELREEIKEQKKLTGKSYNENDYEHHHNSKLNLLDEYLRSQMPPTFNTKYVETEADKILISFKAGKKVATITKFKATGKNKDTGVIVPRGALHEQSVYGKIKVIEKDKAIKYLFENSDKIVNPKIKNLVEKRLLENGNSSKTALSTLKKNPIYLNEEKTEILEKASCYNDATVLKYKLQSLKSSQADDIVDKRIKFLVKERLAQFNNKEKEAFKDTLWFNEEKQIPIITVRLFARPDANNLQAIKKDENGKEIGFVVMGNNHHIAIYGDKDQKLVQHSCTFWHAVERKKYKIPTVITNSSDIWNQFLDKELPESFLNKLPADNLNLKFSMQQNEMFILGLSKEEFDEAVKNNDKSLLSKHLYLVWSITDGDYFFRHHLETKNSELKKTDGAKEGKRYFRLSTKALIDLNPVKVRLNHLGEITKIGENQL

SEQ ID NO: 3330 - protein, 1429 aa, unidentified
  REGION 1..1429: note = Description of Unknown: Cas Enzyme sequence
MAKNILGLDLGTNSIGWALINQDFENKQGEILGMGSRIIPMSQDILGDFGKGNSVSQTAARTGYRGVRRLRERFLLRRERLHRVLNIINYLPEHYASQIDFEKRFGKFKEETEPKLAYNKDGFVLKNSFEEMLADFKNSQPQLLENDKKIPYDWTIYYLRKKALSQKIEKEELAWILLNFNQKRGYYQLRGEEEEENPNKLVEFYSLKIVDVVADEPQKGKSDIWYSLVLENGWVYRRASKRPLFDWKDKTRDFIVTTDLNDDGSIKTDKDGNEKRSFRAPAETDWTLVKKKTEQEIDKSHKTVGVYIYEALLQNPKQKIKGKLVRTIERKFYKDELKQILEKQKEFHQELKNDDLYNDCVRELYRNNEAHQLTLSKKEFVHLLMEDIIFYQRPLRSQKSSISNCSLESRKYKDENGVEHIQFLKTIPKSNPYYQEFRIWQWIFNLNIYKKDDDANVTKEFLNTTENFENLFEFLNNRKEVDQKALLKHFKLNEKTYRWNFVEDKKYPCNETKTMISSRLDKVENISDDFFTRETEQKIWHIIYSVNDKMEYEKALKSFARKNNLDENSFFEAFKKFTPFKSEYGSFSEKAIKKLLPLMRLGKYWNYENINDDSKERIQKIITGEYDENIKDKVREKAIHLTSENDFQGLQLWLAQYVVYGRHSEASIIGKWNSTDDLEEFLKEFKQHSLRNPIVEQVITETLRVVKDIWIKYGNGAKGFFNEIHIELGREMKLPADEREQLTRQISENENTNLRIKALLAEMMTDNSVENVRPYSPMQQEILKIYEDGILKSDIEIDDDILKISKTAQPSSSDLKRYKLWLEQRYKSPYTGQTIPLNKLFTPEYEIEHIIPQSRYFDDSFSNKIICESAVNKLKDNYIGLGFIKQFGGTIVECGLGKNVKVFEVDEYEDFVKKHYANNRGKRNKLLLEEIPEKMIERQLNDTRHISKYISGVLSNIVRVEDGSDEGVNSKNIVPGNGKITTQLKQDWGLNDVWNDLILPRFERMNQLTNSTDFTAWNENHQKYLPTVPIEFSKGFSKKRIDHRHHSLDALVIACATKEHVNLLNNQSAKSDTKRYDLKKKLMKFEKAVYKHPQTSVRIERDVPKQFLKPWESFTIDAKNNLDKIIVSFKQNLRVINKATNYYEKYVEKDGVKTKEKIQQTGTNWAIRKPMHKETVSGKIDLPWVKVPKGKILTATRKSLDTSFDLKSINSITDTGIQKILRNYLEFKGSAEAAFSPEGIEDMNKNIEKYNDGKLHQPINKVRVFELGSKFQVGQTGNKKDKYVEAAKGTNLFFAVYEDKNGKRSYETIPLNIVIERQKQGLSVVDLKGVNDFYLCPNDLVYIPSEDELENVNNIDFKNFTKEKNERIYKVVSFSGSQIFFVRQDVSTSVVNKAEFSTLNKMERAIDGSMVKEHCLKLNVDRLGNISKT

SEQ ID NO: 3331 - protein, 1404 aa, unidentified
  REGION 1..1404: note = Description of Unknown: Cas Enzyme sequence
MKRTLGIDLGTHSIGWAIRNTDLSENQIEDYGVITFEKGVASEKGNEFPKVQKRTESRGKRRNYQAEKYRKFAILEFLIQRGMCPLSIEDFNQWKLYRKGKKREYPQTKEFLNWISFDFDWDGLPDFHLFGKDKDESYYVFRAFSTDEAHKDVFSKNPHILGRVLYQLVQRRGFKGRDEEEAKTMLTGSDKNGTRGRNDIEEYLEKFRTLGSALYHYQKDSGERIRQRYNLRKDFEFELQEICRVHQICQEDYDKLWKAIIWQRPLRTQKGLIGNCIYEKGKKRLAVSHPLYEEYRTWVFINNLNLVAPKGENQQDYILEKIYPLFYKSKPDFELIDIDKQLKKDGAKRQSKHHEKTKVLSVKLLKQFQDIFGEDWKELLQWNITGNRDSQPIKRSSTSYTFEDLWHILLTFDGQENLKKFAVEKLNLDEEKATKFSRIKLQQGYATLSLSAIKKILPYLQKGFLYSHAVYMANLYRMLDEGTISETLVNHFADEVLQILNKDSNNRKNATIINGLISEMLNDENRYYISDNRNLDDKEKEIVLKSIIDNYGQDTWENFSEQVKAETIEFVSDKYLEFLKKTYTQKGNLFIQPERIHDKIFAFLRDTYHVTEDKKKYLWHPSEQENYTKAEDYNEYSIGNKKYYVKEASSQYFVAKNADAYFEGRQIKLLGNPEPLSKGFKNPMALKSLHKLKNLVNFLLQTGKIDEETKVVVEIARELNDKNKRKAIEIWQKEREKENEAYKKELETYREAFPNVKLIDENTLIRKIRLWHEQNKICLYTGKPISFADLIIGNKYDFEHTIPASISFDNELKNLTISDSTYNRVHKKKLFPTQLSNYESEQNLDGKTFNPIIRNIEFIFGERTVEDEVIKKEKVEVVKWKKIEELKNQFDYWKIEARKAPTKERKDYSIQKYHTIKMDLDYLKAKLATFTITEYKAGWRNNQIRDTQIITKYALPYFKTLFKKVSVEKGTVTDIFKKVYKVQSKDEKKDRNVHSHHAQDAAILTLIPNAFHRERIIKLYQNEIDNRTGKTYHEIPLDWENFSERYILELKDKILINNLTDNRTITQTYKTVRKRGKVFYDVDKDGNSSKRISRGDTIRGQLHGETFYGAIKQPVRDEENKILFDENKKMILKDEIYLAVRKPLLYKKDANSLGFKTLEEVEKVIVDKALFEMIKKQVEESDFKTVLTEGVYMLDENGNKVNKIRRIRCFENGLKYATAIKVHQHCFTSDKDYKKTTLATNGENTYCLFYKNDQGKAMRILSIVDLADLKLKNIQSLYSEPEFSSFESGKGKNKFQIPLYSVLKNGDKVLFYKNNKHELKDLEQEDLVRRMFKIYQFEKDGRIKFRHHLAAGIDTELKKDNQEYSSVSFDDNPIFLRLRQAQWNFAVENTDFEISIDGQIHWKF

SEQ ID NO: 3332 - protein, 1472 aa, unidentified
  REGION 1..1472: note = Description of Unknown: Cas Enzyme sequence
MTKNILGLDLGTTSIGFAHVIEDDMPEQSQIIQIGARIIQYDNFDKIDKSGKVTESKSPKDDFAAGRGLSPNAGRTLKRGARRTLDRYQLRRENLIEVLLKANIISKDSILAEDGKQTTFETWRLRAKSESEKIEKEELARVLLAINKKRGYKSSRKAKNEGEGQAIDGMAVAKKLYEENLTVGQLVYQLLKEGKKTIPDFYRSDLQAEFDKVWNLQRPFYPEILTDELRQNLWNKNKTQTWAICREPMNLVGIKRSTKGFEQKVENYQWRSNAVKMQLDLEQLAIVLQEINNNLNSSSGYLGDISDRSKELYFNQETVGQNLYKQLQANSHTRLKSKVFYRQDYLDEFEAIWKEQCKHHSELTDELKSEIRDITIFYQRKLKSQKSSISFCEFESKEVGIEKNGKKVKITIGAKVAPKSSPLFQEFKIWQMLHNLKFINKSTGEIEVFKDDGFSETKRQLFNELNLRGNLTATQVLEILNYYTKEWVLSNYKTVEGNRTNLAFYDAYLKILEQEGFGEIDWEGYKTVKEGSAKTIFNHFQFTKNAEPFLEGKVKAFDTYNADEIKIFVKNIFQHLVINTEILEFDAELEGKLFEEQKSYQLWHLLYSAEDDNKKYDSKEILLYGNDNIGLKKLLCQKFGFQPSHSKILSNVNFADDYGSLSTKAMRKMYTDIIDNDLTTAKILSGYKQKEFENADMFELLRKNSLRNPVVEKILNQLANVVNALIEKNSKKDENGKIIEYFKFDEIRIELSRELKKNAKERADMTENVNKGKIENDNIRAIIKKDFPNVPNPTKNDIIKYKLYQEMAFNGYKDLYTDTKIEYHNLFGKDYDIDHIIPQAKLFDDSFSNKVLVPYGANRDKGKMNNATAYDYMSNNPELFDKYVSTVEALYKSDKISKAKYQKLLKKEADLGNGFIERDLRETQYIAKKAKDLLIPLTKTGERHCVVSSSGQITDRLRDDWDLVNVMKELNLPKFRVLGMTEMEERKFGQKVEVIKDWTKRNDHRHHAMDALTVAFTKRSFIQYLNNLNARRENKNEGISNKENLKSLETKGYKLSTKDVITIEKKELKRDDEGKLRFRLPILNFRQVAKEHLENVLVSHKAKNKVVTKNKNKTKAKNGERTKVELTPRGQLHKETVYGKYQYYVNKDEKVSAKFDEETIKKIANPTYRRLLLQRLSENGNDPKKAFSGKNVLSKNPIYLDKEKTEILPETIKLTWLEEDYSIRKDITPENFKDLKTIEKILDEGVKRILKNRLEEFGNDPKKAFSDLEKNPIWLNEEKGISIKRVTISGVKNAEFLHYKKDHLGNEILDKNGKKIPVDFVSTGNNHHVAIYRDEKGNLQERVVSLFDAVQLVNAGEPVIDKNYNQGIGWQFLFTMKQNEYFIFPNDKTGFNPKEIDLLDPKNKKIISPNLFRVQKLATKNYMFRHHLETTVDDKKEMKNIAFIHIQSCNLLKDIVKVRLNHLGDIVKVGEY

SEQ ID NO: 3333 - protein, 1404 aa, unidentified
  REGION 1..1404: note = Description of Unknown: Cas Enzyme sequence
MKKTLGIDLGTHSIGWAIRNSDLSENQIEDYGVITFEKGVASEKGNEFPKVQKRTESRGKRRNYQAEKYRKFAILEFLIERKMCPLSIEDFNHWKLYRKGKKREYPQTKEFLNWIRFDFDGDGLPDFHLFGKDKDESYYVFRAFSADEAYKDVFSKNPQILGRVLYQLVQRRGFKGRDEEEAKTMLTGSDKNGTKGRNDIEEYLEKFRTLGSALYHYQKDSGERIRQRYNLRKDFEFELQEICRVHHISQEDYDKLWKAIIWQRPLRTQKGLIGNCIYEKGKKRLAVSHPLYEEYRTWVFINNLNLVAPKGENQQDYILEKIYPLFYKSKPDFELIDIDKQLKKDGARRQSKHHEKTKVLSVKLLKQYQDIFGEDWKELLQWNITGNRDSQPIKRSSKSYTFEDLWHILLTFDGQENLKKFALEKLNLDEEKATKFSRIKLQQGYATLSLSAIKKILPYLQKGFLYSHAVYMANLYKMLDEGTISETLVNHFADEVLQILNKDSNNRKNATIINGLISEMLNDEHRYYISDNRNLDDKEKEIVLKSIIDNYGQDTWENFSEQVKSETIEFVSDKYLEFLKKTYTQKGNLFIQPERIHDNIFNFLKDSYGVSEDKKKYLWHPSEQENYTKAEDYNEYSIGSKKYYVKEANSQYFVAKNADAYFEGRQIKLLGNPEPLSKGFKNPMALKSLHKLKNLVNFLLQTGKIDEETRVVVEIARELNDKNKRKAIEIWQKDREKENEAYKKELETYREAFPNVKLIDENTLIRKIRLWHEQNKICLYTGKPISFADLIIGNKYDFEHTIPASISFDNELKNLTISDSTYNRVHKKKLFPTQLPNYESEQNLDGNKHNPIIRNIEFIFGERTVEHKEIKGKIEKIVKWKKIDELEKQFDEWKKKASYASTKEIKDNCIVKYHTVKMDLDYLKAKLSTFTITEYKAGWRNNQIRDTQIITKYALPYFKTLFKKVSVEKGTVTDIFKKVYKVQSKDEKKDRSVHSHHAQDAAILTLIPNAFHRERIIKLYQNEIDNRTGKIYHETPLDWGNFSERYILELKDKILINNLTDNRTITQTYKTVRKRGKVLYDINKDGNSSKRISRGDTIRGQLHGETFYGAIKQPVRDEENKILFDENKKMILKDEIYLAVRKPLLYKKDANSSGFKTLEEVDKVIIDRALFEMIKKQVEKSDFKTALTEGVYMLDENGNKVNKIRRIRCFENGLKYATAIKVHQHGFASDKEYKKTTLATNGENTYCLFYKSDQGKAMRILSIVDLADLKLKNIQSLYSEPEFSNFESGKGKNKFQIPLYSVLKNGDKVLFYKNNKHELKDLEQEDLVKRMFKIYQFEKDGRMKFRHHLAAGIDTELKKNNPENSSIDFQEQQVFLRLSQAQWNFAIENTDFEVSLDGQIHWKF

SEQ ID NO: 3334 - protein, 1395 aa, unidentified
  REGION 1..1395: note = Description of Unknown: Cas Enzyme sequence
MIKNILGLDLGVSSIGWAYVQEDSENLENSKIIKLGVRVNPLTVDEQLNFEKGKPITTNAGRTLARSARRNLQRFKLRRANLIDVLKKNNILKESDLLAEVGKNSTFQTQELRAKAAREKIELSEFARVLLLINKKRGYKSSRKAKNDEDGQIVDGMAVAKKLYEENVTPGEYSYQLLQQGKKQLPDFYRSDLQAEFDKVWNFQKQYYSEILTDDLYKELQGKNKNATWAVLKEPFSLVGIKQTGTMQEKKVEKYFWRSEAVKKQLDFESLAVVFQEINSNLNNSSGYLGAISDRSKELYFNNQTVGEYLYNQLKANPHTKLKNQVFYRQDYLDEFEKIWETQSKYYKELTKELKLEIRDIIIFYQRKLKSQKGLISICEFENREIEIIENGKTKKKTVGLKVAPKSSPLFQEFKIWQVLNNLQFQNVDTKEIFPIDLDFKQSIFDEVNIKGKLSAKDVLDLVGYSGKEWKTNFKDIEGNYTNENLYTAFLKIIASEGIEFPKEFKLTIDDEIKVSKVNASAEIIKLFVREKFSGLGIDTSILDFNPELEGNDFEKQASYQLWHLLYSYEGDDSPSGNEKLYELLEKKFGFKKEHSKILAEIGFSQDYGSLSSKAMRKIYPYIKEHKYSIACNYAGYNHSKNSLTKEQLENRILKEQLDILPKNSLRNPVVEKILNQMINLVNEVSKEYGRPDEIKIELARELKLNAEERATMTSEINKATIQHQKYAEVLQREFGIKSPSRNDIIRYKLYLELANNGFKDLYTDVKIERENLFTEKYDIDHIIPQSRFFDDSFSNKVLVPRSANLKKGNFTAFDYLENEGKEKLEKFLNVIKDLYDKGIITKAKYEKLQKKGSEIGEGFIERDLRNTQYIAKKSKEILFGITNSVVSTSGRITDKLREDWNLVNTMKELNIEKYRKLGLTELIANSKGEEKERIIDWTKRNDHRHHAMDALTVAFTTHSHIQYLNYLNARKDEKHKEHQNIFAIENTITEIVEKKNGSKERRFKLPIKNFRIEAKKQLEEVLISHKAKNKVVTKNINKIKKKGSVIAKTELTPRGQLHKETIYGSSKFLKTKEEKISGKFDLKTIQKVQNEKYRNALLKRLQEFGGDSKKAFTGKNVTSKNPIFLNAEKTEQLPETVTLAWYETGYTIRKVVNPDNFKDFKNIEKVIDKGVRDILTERLKEFNGNSKEAFSNLEKNPIWLNKSKGISIKTVTITGINNAEALHYKKDHLGKEILDENGQRIAVDFVSTGNNHHVAIYEDENGNLQEKVVSFYEVVERVNQNLQIIDKEYNSELGWKFLFTMKQNEMILFPSEDFDPKEVDLFDDKNLSLISKNLFRVQKFTIKDYFFRHHLETNVEDNSTLKNVTWRREGLSGLKGILKVRLNHLGKIVQVGEY

SEQ ID NO: 3335 - protein, 1437 aa, unidentified
  REGION 1..1437: note = Description of Unknown: Cas Enzyme sequence
MIMTKNILGLDLGTNSIGWALIKQDFENKQGEILGMGSRIIPMSQDILGDFGKGNSVSQTAERTKYRSVRRLRERFLLRRERLHRVLHILNFLPEHYASQIDFEKRFGKFKVETEPKLVWENLDRKFSFLFQTSFNEMLEDFRVKGQNLQVPYDWTIYYLRKKALSQKIEKEELAWILLNFNQKRGYYQLRGEEEEENPNKLVEFYSLKIVDVLADEPQKGKSDIWYSLILENGWIYRRSSKIPLFDWKDKTRDFIVTTDLNDDGSIKTDKDENEKRSFRAPSENDWTLVKKKTEQEIDQSHKTVGTYIYEAFLQNPKQKIKGKLVRTIERKFYKDELKQILEKQKEFHQELKNDDLYNDCVRELYRNNEAHQLTLSKKDFVHLLMDDLIFYQRPLRSQKSSISNCTLEFRKYKDENTAEHIQYLKAIPKSNPYYQEFRLWQWVYNLNIYRKDDEANVTKEFLNTSKDFENLFEFLNNRKEVDQKALLKYFKLNDKTHRWNFVEDKKYPCNETKTMISSRLDKVEDISDDFLTREIEQKIWHIIYSVNDKIEYEKALKSFANKNDLDENSFVEAFKKFPPFKSEYGSFSEKAIKKLLPLMRLGKYWNYAEIDKYSRERIQKIITGEYDGNIKDKVREKAIHLTTENDFQGLQLWLAQYIVYGKHSEASLIGKWNSADDLEEFLKDFKQNSLRNPIVEQVITETLRVVKDIWLKYGNGAKDFFNEIHIELGREMKLPADDRKKLTNQITENENTNLRIKALLAEMMNDVSVENVRPFSPMQQEILKIYEDGVLNSDIEIPDFITEIQKKFKESDQKRKPTSTEINRYKLWLEQKYKSPYTGQIIPLNKLFTPEYEIEHIIPQSRYFDDSFSNKIICESAVNKLKDNFVGLEFIKKLGGTIVECGNGKSVTVLKEDQYEDFVKKNYANNRGKRNKLLMEDIPEKMIERQMNDTRYISKYISGVLSNIVRVEDGSDEGVNSKNIVPGNGKITSQLKQDWGLNDVWNDLILPRFERMNQLTNSKDFTAWNDKHQKFLPTVPIEFSKGFSKKRIDHRHHPLDALIIACATKDHVNLLNNQSAKSDTKRYDLKKKLMTFEKVVYNHPQTGDRIEREVPKQFLKPWDNFTFEAKNNLDKIIVSFKQNLRVINKATNYYEKYTEKEGVKVKEKVEQKGTNWAIRKPMHKDTVSGKIDLPWVKVPKGKILTATRKSLDTSFDLKSIGSITDTGIQKILRNYLEIKGSSELAFSPEGIEDLNKNIEKYNDGKPHQPINKVRVFELGSKFQVGQTGNKKDKYVEAAKGTNLFFAVYEDEKGKRNYETIPLNEVIERQKQGLSVVDLKEANDFYLCPNDLVYIPSDDELENINNIDFKNIEKEKNERIYKVVSFSGSQIFFIRQDIATSIVNKSEFSTLNKMERAMDGSMIKENCVKLNVDRLGNISKA

SEQ ID NO: 3336 - protein, 1527 aa, unidentified
  REGION 1..1527: note = Description of Unknown: Cas Enzyme sequence
MKTILGLDLGTNSIGWALVSIDEENKPCKIDGMGSRIIPMSQEILGKFDRGNSISQTAERTGFRGVRRLRERYLLRRERLHRVLHIMQFLPEHYAEQIDFKKRLGQFFEEREPKIAWKKDATGAFEFLFKKSFLEMTDEFKANGQENNIPYDWTIYYLRKKALQHKIEKEELAWVILNFNQKRGYYQLRGEEDEEETPNRLVEYYALEVVDVTADESQRGKADIWYNVVLKNGWVYRRSSKNPLFDWVGKEKEFIVTTDLNDDGTVKTDKEGAEKRFFRSPSPDDWGLLKKKTEADIDKSKKTVGVYIYETLLSNPNQKIKGKLVRTIERKFYKDELKQILERQKEFHPELNDKGVFERCINELYPHNELHRNTLQNCSFTKLFLDDIIFYQRPLKSKKSLISNCPYEFRVFKNKDGICEKSPIKCITKSNPLFQEFRLWQFIHNLRIYEREKEVGGKLQTDVDVTSEFLPTIEDRVKLFDWLNNRKEIKQDTLLNAYFSIRKKRGEEKLPYRWNYVEDKEYPCNETRGQMRARLAKADVNKDLLSKDTEYALWHILYSVEDKNEIEKALKKFAHKHELTDAFVEQFVKFPPFKKDYGSYSEKVIKKLLPLMRMGKYWNQESICCDAINRLNSIIERLEYLEQNQVKIENVADDEIPKQVLRSFYKLTSEDKDFYSGLNTYQACYAVYGRHSESSETTIWKTPQAIDDYLKEFKQHSLRNPIVEQVITETLRMVRDIWKKYGDLSEIHIELGREMKNPAEVRAKMTQQNSDNESTNLRIRALLTELKNRGLSKPDDVENVRPYSPNQQEILRIYEEGALISAENIDDDILKISKSSQPTEKELTLYKLWLEQKYRSPYTGEMIPLGKLFTSAYQIEHVIPQSRFFDDSLSNKVICEAEVNRLKDNQLGYEFIKNHAGEKVELNFGKTVNIFTIDGYEKFVKDNYRKNQSKMRKLLLEDIPDGFIERQLNDSRYISKVVKELLSNIVREENEQEAMSKNVIACTGGITSRLKQDWGLNDVWNRIITPRFERLNQLTNSNRFGEWVNKDGKRVFQTEMPPELQKGFNKKRIDHRHHALDALIIACATRSHINYINNESARKDAKITRYDLRKLLCFKTRPDEQGNYKWQFYKPWKSFTQDTQATLENIIVSFKQNLRVINKSVNYIQSYKDENGVLQTDKNCSPIKTRRKQVKGDNWAIRKPLHTPMPYSKKTFQFDVLKIHENVGKLDTIIDEDIKEKVRQEYERFNRRVTKAQEYLRKNPLLDKNEKPIVATAFKIFVEKYRKRIPIARLSDRGQNGIKNADGAIKLINKISDLKIRKDLLQHLDENSGDIDKAFDVEGIEGFNNKRSIPIYRLPIAEKGTERFAIGARIGSKHKWGEAEKGTNLFFAIYVNNEGTRSYETIPLNMVVERLKYNLKEVPETDDNGSKLLFYLSPNDLVYLPTEDEIENGVFLDFSKLDNERKERLFIVNDFSGVTIYFTPNRFAKAITPKELDANFDSKTAKYGPLSIKQFCIKVKADRIGNITGNN

SEQ ID NO: 3337 - protein, 1345 aa, unidentified
  REGION 1..1345: note = Description of Unknown: Cas Enzyme sequence
MKKILGLDLGTTSIGWAHVHEAEDESEVSKIIDMGVRIVPLTSDEENDFAKGNTISVNADRTLKRGARRNLQRFKQRRNALLQIFKGHSFIPPNFQYAEDGPSSTFSTLKLRAKAAIEQVSKEDLVKVFLQINKKRGYKSSRKAQADDEGQAIDSMGIAKELYERELTPGQYTYERLQKGSVKVPDFYRSDLQEEFEEIVQTQKIHHPEFFTNDFIEKIKGEKANDTKKAFNHVNIQLVEVKGKRDEKKLFEYELRNKAVEQRIELPEIAFILSQINNQINASSGYLGSISDRSKELYFNNETVGQNLYKQIQKNIHTRLKGQVFYRQDYLDEFERIWETQMKFHPELTEKLKKEVRDVTIFYQRKLKSQKHLISKCEFEPQHKVVPKSHPLFQEFRIWQNLNNLLVIKKADPNDKRELELDLKKEIADEFAFKSNMSAKDLFTYLPLSDKTHELNFPKIEGNRTNDAIYEAFAKIIEMEDGEQINLTKMKSDDILDQFSEAFLRLGINTDLLKLDEELGGEDYEKQAYIQFWHLIYSAEENENLKNNLIKKFGFKESHCKALLNISLQDDHASLSSKAIKKILPHLKDGLEYSEACKMAGYNHSSSLTKEDNENRKLADKIELLKKNALRNPVVEKILNQMINVVNAIINDPKLGKPDEIRVEMARELKANAEQRKNMTSNIAAATRDHEKYRKVLREEFGMPRVTRNDLIRYKLWLETDGISLYTGKPIEASKLFSKEYDIEHIIPKSRLFDDSFSNKTLCERQLNIDKSNSTAYSFLEDTFTKEEFEQYQERVKSFYGKISKTKVQKLLMPNDKIPEDFIERQIQETRYISRKAVEVLFDAVRNVTVTTGKVTDKLREDWGLIEVMKELNWDKYDALGLTTILEGKNGEKLRKIKDWTKRNDHRHHAMDALSVAFTKPAFIQYLNRLNARGREDKKGKEIYGIEQKYLEKVNGKFLFKSPIDNIREEAKKHLSNILVSYKAKNKVVTINTNKTKKRGGFNEQKVNTPRAQLHKETVYGKSHIYETKLEKVGASFDYEKIKTVARKAEREALKKRLDEYTGNAKKAFTGKNALSKNPVYLNLSQNIKLDEKVKTVQFVPGYTIRKDVSPDLKLDKVMDVGVKRILQNRLDEFNGNAKEAFGNLEENPIWQNKDKGIAIKRVKISGVSNTEVLHVKRDHFGNPIFDTNGNEIPSDYVSTGNNHHVAIYKDDKGNLQEEVVSYFEAVIRKNENLPIINKQHPLGWEFLFSMKQNEFFVFANDDFNPQEIDLLDANNYELISPNLYRVQKIATKNYMFRHHLETNVEENEMLKNKAFRNIRSTSPLNGIMKVRLNHLGKIVQVGEY

SEQ ID NO: 3338 - protein, 1324 aa, unidentified
  REGION 1..1324: note = Description of Unknown: Cas Enzyme sequence
MQFFYVFISFCNNLFLSLTLKCKTTMKMKKILGLDLGSASIGWSLIDYPLIDGENAEIIAMGVRIIPLTSNDADEFSKGNAISKNATRTQARGARRCLHRFKLRRKELKLALIKLGMLPTKEYFELSALNLYALRDKALREKISLQELGRIFLHMNQKRGYKSNRKTQDDTDKEKKEKDAESSKKTKKGYLDLIADREQILFKKELTIGQYLYMQLCADPLFRVKENIFMRSSYVDEFNKIWDVQSKYYPVELNEINKVQIRDKIIYYQRPLKSQKGLVSVCTFEGRQYKDKRSGYKSDVFSGPKVAPKSSPLFQVSKIWQELNNIVITSFQSIKNPVIFETEGKLGFDIYGNRPLTQNEKVKLFNKLNWGEKLSPKDILKELGYKSGFNEYKINLRNEKFMEGNRTLTAIRKIFEKYKIERDDLLQFKLLISNGRLNSETGELLSQVDASFEKEPLYGLWHLIYSVDSPDELVRTLINKYGFSEPVAKDLSRIDFLKQGYGNMSAKALRNILPHLMTGEQFSDACESAGYNHSNSINKAENELRPLLDKLEIYPKNSLRQPVVEKIINQVVNLLNDIIDPLNGLITKEERLAKDQFEIRVELARDLRQSAEERNKAYLNNSKTDKYNKEIVDILKRELEFKRVSQNDVIRYKLWREFGQVSPYEPNKVISLKAAFNLEEGVLYEIEHIIPKSRIFDDSYSNKTLCPRSLNSGINGKNQDTAYDFMKRQGGDKFQQYIEFLKIQLNRKEGISKSKYNKLLMSGDKIPEDFIERQMQETRYISREVHSLLQKVCRNVYSTTGTVTSKLRKLWGWDEILMNLHIDEYRAQEQTEIIEINRCGQISHKERIKDWTKRLDHRHHAIDALCIACTTQSMIQRINTLNAEYTRKETDDNVNKYNDRLNSLERYLIQNKPFKTHQVEDAASKIIVSFKKGKKVGVLSSNNVNGKIVKTLIPRGELHKSQIYGTINQYEKVRLNPMFNRFDDIVDETLKKKLRMYISTFSIDKNVFSEQEKFMSQVKIAFSKKELDRFVLNGGFSELSVYKRDFVYSYSLDSNFKAKDVEYIVDRKVRMIIRNRLIEFENDPKKAFKDLVENPIYLNRTKGIKINNVRCFTGLSDLVPLHKNEFGSFIDYVSTRNNHHIAIYKDKNGNLKENVVTFWEAFERKKMGLPVVVKSPSDLWSHIIDSDIETNSVIENLPQDGWEYVTSMQQNEMFVFGISLDELKDNIDKNNYCLISKHLYRVQKIATKNYFFRLHTETKVDDVYNGEKNEMLSKKLGNIIIVQSLNNMSGIKVVVNKLGRIRLDADYDKENIILWQPSVFELKQ

SEQ ID NO: 3339 - protein, 1356 aa, unidentified
  REGION 1..1356: note = Description of Unknown: Cas Enzyme sequence
MRKVLGLDLGTTSIGWALVNQAESPEEKSSIIRAGVRVNPLSSDEKTQFEQGKDATTNAGRRIKRSMRRNLQRYKLRRDTLIGILKREGWIDDKTILAEHANGSTFETYRLRSEALDREVDLSQFARILLMINKKRGYKSNRKIKNQEDGSLYDGMDLARELDETGKTPGEYCYHILKNGAKYVPEFYRSDLASEFDRIWEFQKQYYPEYLTDKAKDGIKDKTKSVTASFFKANYGILTADNKGKDKKIQSYEWRMKALQTKLPIEELVYVLADINGKISDASGLLGKISDRSKELAFNNETVGQFLWRQICSNPNVSLKNITFYRQDYLDEFEKLWASQSRFHSELTEDLKKEIRDVVIFYQRRLKSQKGLVSKCEFEKNHRVIPRSSPLFQEFKIWQNLNNIILTDVDTGEQRALSQDEKDRLAAELQFKPKLQSSTALKLLFGKKSKSLTANFKAVEGNTTIASFAKVLLDIAGIEDDREYEAEKLDAELILETVNGTLKNEKLTGLLSFDSSLDRDSSEGQVSWKLWHLLYSYEGDNSRTGNDSLISKISEICGLQRDYAAMLSNVSFESDYGSLSSRAIKRILPYLKEGNRYDEACVLAGYNHSHSKTKEELEARELEETLSPIPKNSLRNPVVEKILNQMINVINAISEEYGKPDEIHLEMARELKMDKESRKRKYESISANEKENEEIREKLIKEFGFSHVRKSDIVRYKLYEELKPRGYKTFYSNQYIPREKLFSKEIDIEHIIPQSVFFDDSFANKTLEYRAVNIEKANETAYDYVCSKYGKEEAEQYKSGIQDMVGKGQISRTKGRYLLMRGSEIPEDFLNRDLTNTQYIARKAKEMLESYVRTVVPTTGSITARLREDWQLVDVIKEIDFPKYEKAGLTFIDYDNDGRAVKRIKDWSKREDNRHHAMDALTIAFTKPAHIQYLNNMKAKSDKSSSIYAIWQKETVKTGDKRIFVPPMPLDELRAAFRKELESVLVSIKAKNKVATRNVNKTRSSQGDNRQLALTPRGELHKETVYGRSKKYETYEATVGGRLTREEILNVASKKEREALLQRLEANGGDPKKAFYGKNAPDKNPIWLDAVHSEQIGTKVKCVKLKDVYTIRKTVDPNLKIDKVLDAGIRNLLNERLQEYGGNAQKAFSNLDDNPIWLNKEAGIAVKRVVIEENVPAVAIRNKRDHAGNVMKDADGNSLPADYVNLRNNHHIAIYRDAEGNLQEKVVSFFEAMDRVSNGLKPVDKGYRKTEGWKFLFSMKINEMFVFPNPKTGFEPAEIDLTDQKNYGRISPNLYRVQKLSSKYYCFRHHLETSIEDTKELQGITWKRITSLDNLKGAVKVRINHIGEIVAVGEYD

SEQ ID NO: 3340 - protein, 1383 aa, unidentified
  REGION 1..1383: note = Description of Unknown: Cas Enzyme sequence
MKKILGLDLGTNSIGWALVNESENEDEKSSIIKLGVRVNPLTVDEQTNFEKGKSITTNADRTLKRSMRRNLQRFKLRKDNLIDILKENGFISDETILSENGNKSTFETYRLRAKAASYEISLKQFARVLLMINKKRGYKSSRKAKSQDEGQLIDGMAVAKELYENNLTPGQFVLELLKSGKKTVPDFYRSDLQVEFDKIWNFQKQFNSEILTDEFRVEIEGKGQRASSAIFWKKYNFNTAENKGTREEKKLQAYKWRSEATNKQLTKEEVAFVLAEVNNNLNSSSGYLGSISDRSKELYFNKKTVGQYLMDQLDLNPHSRLKNQVFYRQDYLDEFEAIWETQAKFHSKLTQQLKTEIRDVVVFYQRKLKSQKGLISFCEFESRKIEVEVEGSKKIKTVGSRVCPRSSPIFQEFKIWQVLNNIQVFSKTGGDKRFLDQEEKEVLFKELNFKDKISKNDCIKILFKNQKDLDFNFKENIEGNRTYGAFISAIQQIIDISGHGEFEFSKMNTDEILKVIIPFFDGFGYNLDLLKFNSGSEGEAFEQQAFYQLWHLLYSFEDDNSNTGDKKLIQKIQEKYGFETEYARIIANIALQSDYGSLSTKAIRKILPHLKEGNEFSVACTYAGYRHSKDSLTKEEIENKILKDKLDILPKNSLRNPVVEKILNQMINVVNTAIETYGKPDEIRIELARELKKSAKEREDATKSMNQTTLDHEKYRSTLQNEFGLTHVSRTDIIRYKLYLELESRGFQTLYSNTYIAPNKLFSKEFDIEHIIPQSRLFDDSFSNKTIESRSVNIEKGNETAYDYVKNIKGEYALNEFLKIIEELFKAGKISKTKYNKLKMKGIEIPSDFIARDLRDTQYIAKKAKNILGELVKVVVSTTGSITDRLREDWQLIDVMQELNWEKYNLLGLTEIIENREGHKIKRIKDWTKRNDHRHHAMDALTIAFTKRSHIQYLNNLNARSDKAGSIYGIEQKELERNEKGKLRFKSPILPIEAFRSEAKKHLENTLVSIKAKNKVATININTTTKAHGVNKKKQLTPRGQLHLETVYGSQCKYVTKEEKVNASFTIELISKVANQKIREALLKRLTEFDNDPKKAFTGKNSPDKNPIFLDSLQMQKVPEKVKTVTTEIIYTIRKEISPDLKIEKIVDSRIKKILQARLSEYNGDAKKAFTNLVENPIWLNKESGIAIKRVTITGISNAEALHYKKDKEGNLILDKNGNKLAVDFVNTGNNHHVAIYRDADGNLQENVVSFYEATERVNQGLPIIDKTYKQNDGWQFLFTLKQNEYFVFPNEKTGFKPAEVDLLDEKNYHLISPNLFRVQKISSKNYVFNHHYETKSVDGELLKTKKSLSGITYYFVQTPSKLLGINKVRINHIGKIVTVGEY

SEQ ID NO: 3341 - protein, 1366 aa, unidentified
  REGION 1..1366: note = Description of Unknown: Cas Enzyme sequence
MKKILGLDLGTTSIGWALVNQAENNEEKSSIIKSGVRLNPLTVDEKSNFEKGKSITTNADRTLKRSMRRNLQRYKLRRNALISTLKRAGWINDETMLSENGNKTTFETYRLRAEAASAPISLEELSRVLLMINKKRGYRSNRKTDVSEGTVSFDGMDIAKELYENNLTPGQYCLDIIKSDKKSLPEFYRSDLYNELDKIWEVQKNYYPDILTDDFKNQISGRGKNDVAKIFYAKYGLTTADNKGKDKKLLAFTWRVDALSSMLSKEQMAYVICEVCGDIRNSSGYLGDISDRSKELIFNKKTVGQYLYENLTGNPEFSTKNKVFYRQDYLDEFEKIWETQATYHTELTPELKKEIRDIIIFYQRNLKSQKGLISICELEGRDILINKAGKERIVPAGPKVAPRSSLLFQEFKTWQVLNNLSLTDKETGEIRPLSMDEKERLARELMTRAVMKSGDALKFLFSSSSKDYELNYLSLEGNATYSAITDKLIEIVNSVDDRDLKTAKMCTDDILENIRAYLRPYGFKEEILYFDSSLEKEDFERQPIFRLWHLLYSYVGDNSKTGAGGLAKKISELTGLQEDLSLKLSSVRFIQDYASLSHKAMHKILPFLKSGLTYDKACAEAGYVHSKHSLTSEQIENKTLVDKLEILPKNSLRNPVVEKIINQMIHVVNGIGEEYGKPDEIHIEFARELKQSKQQRVKAYDDIVKNTKRDEDLKKRLETEFNIKYVRKSDIIRYRLWLELEKNSHKSLYSNIYIPKEKLFTPEVDIEHIIPQALLFDDSYYNKTLEYKSVNIEKGNSTARDFVLSKYGEDGFRQYTERVNYLAKIGAIDRRKAERLLKKGSEVEAGFISRDLTTSRYIAKKAREILESYVKVVVPTNGSITAYLREDWQLVDIMKELNLAKYRKIGMTHFEEKNDGDIEKINDGWTKRNDNRHHAMDAITIAFTKASHIQYLSSVHAGTIDDALFSKVGKKKILTPPMPLGELRSAFRDSLSSILVSIKAKNKVVTRNENKIKTKNGVKSVVQLTPRSQLHKEQIYGRKLVYTSREVSVGSSMTADVIKKVALRLEREALERRLEEFGFDPKKAFTGKNSLEKNPVYIDSIHSKVLPGKVKIVELTPVYTIRKDIDSNLSVDKVIDRRVREVLMERIKDFGGDQGKAFSNLDENPIWLNKEKNIKLKKVTIGENFDLEAVRSKRDKSGSLIKDTEGHVMPSDYVNLRNNHHISIYQKEDGTYEEHVVTFFEALDRVVNGLPAVDKSYKSEEGWKFIFSLKINEMFVFPNEESGFNPQELDLMDPDNFKDISPNLFRVQKLSSKYYCFRHHLETTVEDPASLRDVTWKRINSIANVVSAIKVRIDHLGKIVSIGEYD

SEQ ID NO: 3342 - protein, 1378 aa, unidentified
  REGION 1..1378: note = Description of Unknown: Cas Enzyme sequence
MKKILGLDLGTTSIGWAYVNESENESEKSEIKKLGVRIIPLSTDEETDFQKGKAASINADRTLKRGARRNLDRYQQRRDSLVEILIKKKFISNSTILSEEGKATFETYKIRAKATKEKITKEDLAKVLLMINKKRGYKSSRKAKNDDEGIAIDGMEVSKYLYDNDLTPGQYVYELLKTGKKNVPDFYRSDLQNEFNKIWGKQKEFYPNILNDKLKISLNNKNKTQTWAICKEPFDIVGIKRETKGLELKKENYKWRVEGLRTMLNLEQLAIAFQEINNQTNKSSGYLGAISDRSKELYFNTQTVGEYLYSQLKQNPHARLKNQVFYRQDYLDEFERIWEKQSEFYSELTNELKTKIRDVIIFYQRRLKSQKHLISNCEFEKYHKTIPKSSPLFQEFKIWQIINNLEIRHIPTRTKYKNEDIEQETKDLLFNELNIVEKLSAQDVLKILVENPIEYELNYKDGLEGNRTNAALYKAYLEILKLENQEINIKKLSADDVNYQVSTKFSELNIEQEVLSLNTNLVENEYDKQPILQLWHLLYSFEGDNSRTGDESLIKAISEKFGFKLEYAKIISNIELQSDYGSLSTKAIRKIIPYLKEGNTYDIACDNAGYNHSSSLTKEEQEKRELKDILTLLPKNSLRNPIVEKILNQLVNVVNAIIKDENLGKPDEIRIELARELKKSAKERADATTYINKATIAHDKIRKELANLYPFNTGVRITKNDIVKYKLYLELAPLGYHTIYTNTYVPLEKLFSKEFDIEHIIPKAVLFDDSFSNKTLATRHFNSHEKSNKTGIDAIIEKYGDDSPNYYRYKENIEKLYNKGKGEFSKAKYNKLLMRGTELPDGFIERDLRNSQYIAKKAKQMLEEVVRTVNTTTGKITSRLREDWQLINIMQELNWEKYDKLGLTHYEKSKDGKDIPKITDWTKRNDHRHHAMDALTVAFTTYSHVQYLNNMSARKNEAHKEYHSVYGIEQKYLYRNEQNKLLFKSPMPLDKFRVEAKKHLEDILISFKAKNKVVTRNKNKTKLQGKDNYKTKVELTPRGQLHEDTVYGEIFWSRVSLTDKISKKEIEAIKDKKLKKYVSEYILEKGGIRKAFSKENLQNLKYKNKSLTEITVNISCYTKRIEISKFFTDSQKTRSAKEKAINNLLDLGIRKIFKARLDKFEGDYKNAFSNLDENPIWLNKEKGISIKRVTITGVSNVEALHSKKDHNGKYILDDNGKKQAVDFVSTGNNHHVAIYRDEKGKLQDEVVSFYEAVSRVNEGLSIIDKEKDGLEFLFTMKQNEYFVFPSAIFKPDEIDLLNPENASLISNHLFRVQKFSKVEYGNSAVRDYVFRHHLETLLIDKKETKDITFKVAKSLPRLEGIIKVRINHLGQIVKVGEY

SEQ ID NO: 3343 - protein, 1466 aa, unidentified
  REGION 1..1466: note = Description of Unknown: Cas Enzyme sequence
MEKILGLDLGTNSIGWAIRDSSLAQDQIIKFGVTTFKKGVGRNKTGEFSFAAERTKKRATRRLYQARKYRIWNTLEVLITQGYCPLSIENLDKWRKYDQEEARKNNNGGRLYPVWDVAFEDWVKLKFGSDLKPRFTSPYALRRFLIENQLDFNQEENRFMLGRAMYHLAQRRGFKSSRKDKTDTDSSKEGLGENELADLKYSEKKKNRKLEPFWDKYPHAKTVGALFAYLEDEGLRIRQEINQYVIRQDLKTEIQKIFTFQQLGLDHSLYIGLVRGEKDKGGKERKKDYGSIFFVRPLRSQKGLVGKCTLEPNRARCQVSHPDFEEFRAWSLINNIKVKKAADPIQSFTQLSLENRSQLYKDLFLGRKKDHFPFFDIINYFKNKGQIWDFNYTGKTNVSGCPVSCRLYEIYGENWKTIIIQAPFTKPNRKGEEKPVTYTYEDLWHVLATYQDDEYVEHFATDVLGLDEKGVKQFKIAWNTIPEGYGQLSLYAIKKINRFLQKGLIYTEAVLLAKLPDIIGEEEFAANEAEIVGVISRVIEENRLQKRLLSTANGLISQYKNMVAEEKFGYKNKDYVLDTDDLKTVEKALIDQFGETTWGNLPEETRKIYFDTVKSCYQAFWQTGFEMVEHYGEKHFKVKIGGQNFLRADTGFYRLPKLSDTLAEFLSNHFEVNVSALAAIYHPSQMDIYPRGKANEAGMLLLGSPKSGSFKNPMAMRTLHVMRGLINHLILVGDIDEDTRIVVEVARELNDANKRWAIESWQRTREAENQEFAKAIEDILINESGVIADSKSISDIDKFRIWYEQSDEDAYPDFVEEKKDVKGIKWASTEKETIKKIRAEKDRVLRYRLWQEQSCRCIYTGNPIRISDLFQPNLIDFEHTIPRSISFDNSLANLTVCYADYNRNIKKKQIPFQLTKHYEGILDRIRPWEERVAVIKQQIEFWKGKAKKAATKGDKDDAIRQRHLWQMDLNYWENKVNRFKMEEVTTGFRNSQLVDTQIISKYAFHYLKTAFNRVDVQKGSITADFRKIYKLQPQDEIKDRSYHSHHAKDAAVLTLIPVAVRRDAILEKAYKWEEEKWTQYHEPPYASFKTTEVLKIDDEVFVNQVSKDQTLTRAKKKLRQRGKLKYFEDPITKEKKIRVAQGDIIRGQIHGDTFYGKIKRVKFDEDGKPIRDEEGKFILDDKNGGFVFVKRETITKDFKTDRIVDPILKLDIDKQVSAEGSMLKAIEAGLFRLNSKGEKIKVDKNGRPLRPVRHVRIIADVTDPLVIKDQTHKTGKEETEYKNHYYATNTGNYAYGIFENETERDFVVNNLFDSTQMLKGRKGEGLKVEELFEKEKETGKGKKKLLVPLTRVIIPGMRVIFFKENKDELKEISKSEMRKRLYVVNRIFDRKQGLIQFQHHMEARDDAALSLAYPKSTYGEKGKNGFSEFNFEIPNPRLLLSKSKLNFALEGSDFEILPHGEINWLY

SEQ ID NO: 3344 - protein, 1522 aa, unidentified
  REGION 1..1522: note = Description of Unknown: Cas Enzyme sequence
MEKTLALDLGSNSIGWNIRDISFPDEQFRKAGVVTFKQGVGENQTGEYSFAAERTSKRSIRRLYQARKYKLWETLDSLRRAGYCPISEDELNQWRWYKKEEGYMRKYPVNAVQFNNWIKLDFDGDGKPDYESPYQLRAELATIKLDFNLETNKQKLGRALYHIAQHRAFKSSKKVNLKEDVDLNTTDVGAERAKHRELNKKLEELNLHYDGTRTIGEIFADAERMFAEKKVGRIRNNLHTYVIRKDLQAEVKTIFEFQGLSFGSIFNKKGVELPINRSPIFWQRPLRSQKGTIGKCTLETSKYRCPVSHPAFEEFRAWSLLNNIQFKPKGDSEARWTQLDLQLRRELYNEKFIERMKPNFDFVEIYLWLRKKNGHDNWDLNYHGKTNVAASPVSARLRDIFGDDWDTLQIAHAPNSRRKGQQGKKTYYNMEDIWHVPFSCDDDEFVKSFAKEKLGLNDEQTQGYYKLWESMPVDYANLSLKAINNINYFLRRGLIYTEAALLAKVPEVLGDRWAENEADLIANISEVIDLNRTTKKRLSIVNNLIAQFKAKPFNEKSAESSFEYVLDAEDKKQILHESRESFGAASWNRMSADEHNEIIDFVTVQYQNFFNDAKRHFKKMPHLLDAMKVFLIDKFDLTSEQVKKLYHPSQVEIYTPAKWKYYKEHGRELLLLGSPKTGAFKNPMAMRALYEVRKLVNYLIVTDQIDEQTRVVVELARELNDANKRWAIETYQTIRAKENQEFADAIGELVKENGSVADANSNEDIDKFRLWYDMLQGDVAKFGFEKNKVFIENTIETKSKKGKKGNEEEYEVFTENKFENLNKHLYFKLKSAGDDTLKKYRLWEEQKYVCMYTGKIIGIHQLFQQGTIDFEHTLPRSKSFDNSLENLTVCYADFNRRVKKNQIPFDLPNYNHDTVDGTAIKPRLEAWEKKVKDLEMHIEFWKAKSKRATMKEDKDKAIRQKHLWQFELDYWKGKLSRFKMEEIKTGFKNSQLVDTQIISKYASHYLKTVFNKVEVQKGTNTAVFRKIFGVQSLDEAKDRSKHSHHAKDAIVLSVIPVAAKRELILKVWYEIDERRKLLADSGSESGRIQSEINSFQSQLNELLYQCNLPRINDAIDKLDSQILINNIARDQTLVPASRRVRKRGKVVLVKNQDGSVKLDANGERIEKWAKGDVIRGQLFMDTFYGKIRPAKWDEEGRPMKDDVGNFIYSEKNEGFRFVVRKEVNKDLTIDSIVDPTLKKRMVAQLNGRTLDKTLNDDGGLWMVDRHGNQINKIRHIRCFADDVTNPLAVKRQTYLSSKEYKNDYWAKSAVNYICALFQSVKRNKKGDVVKKDGMELIEREFAIYNLAEIAAKKKSGESNDSNLGIFRKDKKTGLDLIREDGTKDSPYAFLRKGTKVIFFKESIDELKEIQQTNSEELHSRLYKIKKFANARITIDFHMEGRDDKELTKAFPEQSIFKIDENGKEVPFGQRGKNGFTEDFFEFGTLNNGKPWHRLRYSKDYFDFAIEDKHFSVNPDGQIKWLF

SEQ ID NO: 3345 - protein, 1377 aa, unidentified
  REGION 1..1377: note = Description of Unknown: Cas Enzyme sequence
MKKILGLDLGTTSIGWAMVNQAENNEERSSIIKAGVRVNPLTTDEKDAFEKGKAVTTNTDRRLKRSMRRNLQRYKLRRNELISILKELGWIDDSTILAEHGNKSTFETYMLRSKACTEMISLSELSRVLLMINKKRGYKSNRKLNADEDGHLVDGMAVAKMLYDEDKTPGQYCYELVRKGNNALPEFYASDLVAEFRKVWKTQSSYYPEYLTDEFWQQAEGKSKSSLSKLFFAKYKITTADNKGKDKKVKAYEWRSSAIERQLPMDQVAYVLCEIAGNIGSSSGYLGNISDRSKELYFNKQTVGQFLYSNIQKDPHFSTKKKVFYRQDYLDEFEVIWEKQASFHPEMTADLKKEIKDVVIFFQRRLKSQKGLIGYCELESRKVDVVVNGKTVRKIRGCKVAPVSSPLFQEFRMWQKINNVIVTNKATGEQRPLEQEEKERLAEALHVKDRMSSNDILKLLFKKPKELEMNFNAIEGNETLSKLYSKFLEIISMTDGMDYEYSKMRPEELIHTLKVGFDKNHFNSEVLEYDALLSKEEYERQPLFKLWHLLYSYEGDNSQTGNESLVKKIGELCAMPDDLAKMAASISFKQDYASLSHKAMRNILPYMMDGNEYSVACICAGYNHSKQSLTKEQIDNKILKERLDEIPKNSLRNPVVEKILNQMVNVINAVGDRYGKPDEIHIELARELKSSQEERAKATESIASNNKENERIKTILEDRFHLTYVSRNDILKYKLYEELKNNGYKTLYSNQYVPEEKLFSREIDIEHIIPQAVLFNDSLSNKTLEYRDINLEKGKDTAYDYVKNKYGETGLEDYRLRVQKLFESGGISRTKRDNLLRDASNIPEGFVERDLRDTQYIAKKAREILLEYVRVVVSTTGSITDRLREEWGLVNVMKELNMPKFEAAGLVETITSSDGKDIRKIKDWTKRNDHRHHAMDAITIAFTKLAHIQYLNNLNAKSDKSSSIYGIMMKETYLSGSKRLIVPPMPLDQMRRAVREQLGSILVSIKAKNKVMTENYNRIKTKEEVKVTKCLTPRGLLHKEQVYGQRRRYEAYFVKVNAKMDEDQIASVASSEIKATLLLRLSQFNGDPKKAFSGVNSLDKNPIWLDDNHSRKVPEKVKCVRFVNVYSIRKPIDPNLSVEKVMDGKVQRILRARLAEFGNDPKKAFVNLDENPIWFDKEKGIVLRSVTIAERFDLDPIRIKRDNFGREILDREGNPIPSDFVNFRNNHHAAIFEDADGNIQGHIVPFYEAVRRKASGLSIIDKKYNSDKGWKFLFTMKSNEMFVFPNEKTGFDPKKVNLMDPGNYSIISPNLFRLQKMSNKKVCQEYYFRHHLETTLGYDLSLKDITWKCVQSLNILSGIVKVRINHIGEIVSVGEYD

SEQ ID NO: 3346 - protein, 1379 aa, unidentified
  REGION 1..1379: note = Description of Unknown: Cas Enzyme sequence
  MOD_RES 1374..1376: note = Any amino acid
MKKVLGLDLGTTSIGWAMVNQAENNEEKSSIIRAGVRVNPLTTDEKDAFEKGKAVTTNTDRRLKRSMRRNLQRYKLRRNELVSILKELGWIDDSTILAEHGNRSTFETYELRSKACTESVSLTELARVLLMINKKRGYKSNRKANAEEDGQPVDGMSVAKLLYEKGKTPGQYCYSLVKKGNKVLPEFYASDLKSEFRRVWETQRLYYPEYLTEEFWNQIDGKTRSSLTKLFFAKYKITTADNKGKDKRVKAYEWRAAAVENRLPIDQVAYVLCDIAGNLGSSSGYLGKISDRSKELYFNKQTVGQYLYSNIQKDPHFSTKNKVFYRQDYLDEFEAIWESQASFHPELTDELKKEIRDVVIFYQRRLKSQKGLISYCEFESRKVDVEINGRIVQKIRGCKVAPVSSPLFQEFRMWQKINNIIVTNKETGEQGTLEQDDKVRLAECLRVKDKLSDKEILKLLFKKPKNLEMNFKSIEGNETLGKLYSKFLEVVSLAGNSDYEYSKLRQEELMNILRTEFARNGFNTAVLEYDPSLPKEEYERQPLFRLWHLLYSYEGDKSQTGNASLINKIAEICGMPENLAKIIASVSFKQDYASLSHKAMRKILPYMMDGNEYSLACEYAGYRHSKQSLTKEEIENKVLKDRLDQIPKNSLRNPVVEKILNQMVNVINTVGDRYGKPDEIHIELARELKSSQEERARATESIASNNKENDRIRMILENEFHLAYVSRNDIVKYKLYEELKNNGYKTLYSNQYIPADKLFSREIDIEHIIPQAVLFNDSLSNKTLELSPPLFSINLEKGKDTAFDYVKNKYGESGLEDYKLRVNHLFESGGISRTKRDNLLRDSKNIPEGFVERDLKDTQYIAKKAREILLEYVRVVVSTSGSITDKLREDWGLVNVMKELNMPKFEAAGFVETITTSDGKDIRKIKDWTKRNDHRHHAMDAITIAFTKLAHIQYLNNLNAKGDKSSSIYAILQKETYLSGSKRLIIPPLPLDQMRREVRRQLESILVSIKAKKKGMTENINRIRIKDGVKNVKCLTPRGLLHKEQVYGQRKRYETYDVAVNGKMTEDVIATVASSETKAALALRLAQFKGDPKKAFTGANSLDKNPVWLDANHSRKVPAKVKCVHFVNVYSIRKNIDPSLSVEKVMDGRVRRILKDRLAEFGNDPKKAFVNLDENPIWFNKEKGIILKSVTIAENFDLDPIRIKRDNLGRVICDAEGNHIPSDYVNFRNNHHAAIFEDADGNIQEHIVSFYEAVRRRSAGLAVVDKEYNADKGWKFLFTMKSNEMFVFPNERTGFDPRAVDLMDPENYSVIGPNLFRVQKMASKDYWFRHHLETTLGDDLKLKDITWKRITALNNLKGIVKVRINHIGEIVSVXXXEYD

SEQ ID NO: 3347 - protein, 1435 aa, unidentified
  REGION 1..1435: note = Description of Unknown: Cas Enzyme sequence
MNKLGIDLGSSSLGWTLRDGHVFRKKGVITFDSGMVKGQGGYTSPTRDRREARSKRRLIQARKYRKWELLKVLSNKHVPLSIEELEKWSKYQKGHKRKFPESENFKKWLSCDFTYLENGVKYKNPYDLRVKALDSKLTDHELGRVLYHLVQRRGYKDIGETDKETQNQIDRRDESGLKKALERNRTLGEALKKDFIEKGERARNQYPLRNEYEEELLEIFKSQNFDISKTKSGTLRDDFVNNVRNSIIWQRPLRSQKGTIGKCTLEPNVLRSPLSHPVFEIYRAWSFINTIKYFDENGVKKDLDQESRDKLFENLFLKKDKFKFEDIKKFLDKQFGKKQKYNYPIDSRTNKYETSVSGMPVCKELIKIFGADIKEFLLELDTYTENNAPKFIKNYSVYDIWHAVFHFDEDYLEKLATNTFNIDNIEVTRNKKKVEVSPLAILKKSLTVGYADLSLKAMRKIIPFLREGFVYNKAVLLAKLPELLVGKWDDNKKAIINTINSANDKYNFQKTIVSIANKLIEKHKALEYPNNFAYKDFDYIIESSDENDIHEACEGYFGEKTWSGLENRDNYIQEVGLLYQEYFSDSKRAYRETKTLNDLVEKGLDNLGFKFDGELYHHSMRKNIYGQPIKYNKAGVEIDVLPEPRIDSIKNPMFNKSMSILRKLINELIISGDIDNDTEVIIEVARELNDNNKRAAIERFQNQRKTKREKYRAFLNEFKERENSSINVDQSIYAFELWSEQIFDKTEDKNIKELPSDGILKEKDALKRYELWSEQKGQCIYTGKMISITQLFSNEIDIEHTVPRSILPDNTMANQTVCYAKYNREVKGNKIPYDCENFSISTPNGSSIEPRLVVWKKIRDNYKELFEKRRKPFGGEDEDKKNKRIQEKHFYRMHFDYWKDKVNRFEAKEIKDSWARRQLVDTQMVSKYAREFLKTYFKKVSVQKGQVTAEFRKIFGFQEEDEIKSRNKHTHHAIDAAVLTLIPVNSSKREEILKKHFEAKENGNKLNQKRPFKEFNAQNLIKDIENNILIVNYQKDKIIQQTKKVVRNRGEIEYLKNKKGNFILDENGEKIVKKAQGDSLRSTLFKQTYIGKIKAIERDENGKPIRVNGDWKYKTGDDEFIYTERKPIKDVLKKTSDIIDPDIRKLVEKQKGNDDIFDFQGNKMRHVRIKVRAGKKVKERINYRSKHEHKNHFYSASGSIPYAVMLQKSEGNKIERKMIPIASYQIAEVYRKTRKFNEVEFVKEYYPEYESYNKKLLKVGQKVFVIQDDKEYNQRKEKEFQRNRLYKITQIGDNTIYLKFHLEASKDDDIDTKVKLKKDEIISQLDRKYNLPDICEDETITDAQERKKKYEDQKYRFVGLKDFRFKRLIPLMGKDEVIKLKNSLSKFKKQSSEIEHGMDGQTPLLKLNKEESWNFLYENYDFELNIKGELNWLYD

SEQ ID NO: 3348 - protein, 1338 aa, unidentified
  REGION 1..1338: note = Description of Unknown: Cas Enzyme sequence
LYEHKLFLMKKVLGLDLGTTSIGWALVNQAESETEKSSIISTGVRVNPLSTDEIGSFERGKAITTNAVRTLKRGARRNLQRYKLRREQLIEILKREKWISDETVLSETGSKSTFQTYLLRAKAVEKEITLTELSKVLLMINKKRGYKSNRKCVGKDEGHLIDGMSVARRLYEEDITPAQLCLILIGEGKKKLPEFYRSDLNAELMKIWNIQKDNYPDVLTDEFKEQIENKSKTAVSKIFFAKYGIYTAANKGKEKRIQALKWRVSALTEKMSIEEVAYVISDISGEISNSSGYLGAISDRSKELVFNQKTVGQYLYEHLQSDSSFTTKNKVFYRQDYMDEFEKIWEVQAQYHPSMTAELKKEIRDIVIFYQRRLKSQKGLISFCEFENRCRVAPRSSMIFQEFKIWQILNNLEISGPGIEGSRKLSVEEMNILASELSVKEKMPVTEAFNVLFGSGKGYSANYKSLEGNHTICAFYRKFLEIVDASGHGEYSLDKLSFSKTTGLIRSVFDALGINLRILEFNSCLKKDEYEKQPLFLLWHLLYSYEGDNSKTGDHSLIEKIGSICGTSEEYSRLISGIVFKDDYASVSHKAISKILPFLKEGNTYDMACLLAGYRHSKSSLTREEIENKVLKERLDVLKKNSLRNPVVEKILNQMINVVNSVADAFGKPDEIHIELARSLKQTAKQRETASQAIADNTKENERVTEILQKEFGLSYVRKTDIIRYRLYQELKRNGYKTLYSNQYVSREILFSDEIDIEHIIPQALLFNDSYANKTIEFKDINREKGKETARDFVESKYGAEGYKNFVLRVDDLFKNGAISRSKRANLLMAKSEIPEDFLERELTCSQYIAKYAKEMLESYVRFVIPTSGGITERLRREWQLVDVMKELNLPKYRTAGKTFTTQDESGNITERIQDWTKRNDHRHHAMDALTIAFTTPAHIHCLNTLSSRGVENTSVKLPSPMPLNELRAQFKSHIESTLVSIKAKNKVVTRNINRTRGRNGITETLTLTPRGELHKEQVYGMRKVYETYYISVGSKLTVEAAESISSPSEKRRVLERLAAFANDPKKAFVKKDVKDLFPEKIKCTRFKIVFSIRKGVDQSLSVEKVMDVKIRKLLQDRISRFGGDQTKAFANLDENPIWFSEEKRIPLKRVTIAESFDLCALHDKIDKDGNLILDDEGRNVPTDFVNLRNNHHIAIYEDSLGNLQECVVSFFEALNRIICGQSAVDRYYRQSEGWHFLFSMKINEMFIFPDPQEGFYPEEIDLMNPDNYAAISKHLFRVQKLASSYYCFRHHLETTLNDDKALKETTWKRITAIKNMKGVVKVRINHIGRIVSVGEYD

SEQ ID NO: 3349 - protein, 1448 aa, unidentified
  REGION 1..1448: note = Description of Unknown: Cas Enzyme sequence
MNKKILGLDLGTNSVGWALVEQDFENKKGKILGMGSRIIPMSQDILGDFGKGNSVSQTAERTRYRSVRRLRERNLLRRERLHRVLNVLGFLPEHYAAEIDFEKRLGKFLEETEPKLAWKKDIDGKFSFLFQSSFNEMLADFKANGQDIKIPYDWTIYYLRKKALTQKITKEELAWLILNFNQKRGYYQLRGEEQEETTNKLVEFHSLKIVDVFADETPNKKGELWYTLKLENGWEYRRSSKTPLFDWKDKVRDFIVTSELNDNGTVKIDKEGKEKRSFRAPSEDDWTLLKKKTEHEIEQSKKTVGKYIYEALLQNPTQKIRGKLVRTIERKFYREELRVILEKQIELQPNLFTDEFFNDCVSELYRSNEAHQLQLSKRDFVHLFLDDIIFYQRPLRSQKSSIGNCSLEYRTYKVNGEEKKEYLKVIPKSNPYYQEFRVWQWLYNLKIYANTDDIDVTETFLKSTEDLENLFEFLMSKKEVDHKDILKYFFKDLKGKVQTAEIAKYRWNYVYDSEKDESKTYPMNETGYEIHRRLEKVENVPANFLNGEIEQHLWHIIFSVTDKKEYEAALETFAKKHSLYFVPKSERDDKNPNKKCFVYNFRNMVWKEKNYGSYSEKAIKKLLPLMRLGKYWNWENIDLKTQTRIDKILTGEFDEEMQIRVREKAITLTEHSHFQGLQLWLASYVVYDRHSEAGNISKWNTTEDLNTFLIEFKQHSLRNPIVEQVITETLRVVKDIWRKYGNGAKDFFDEIHIELGREMKNTAEDRKRITNQISESENTNLRIKALIMELKENSDGKLPVDDVRPYSPMQQEALKIYEDGVLNSNIEVPDDIVKISKSAQPTKAELTRYKLWLEQKYRSPYTGKAIPLSKLFTSAYEIEHVIPQSLYFDDSFSNKVICEAEVNSLKNKQLALEFIKNHHGQKVSTSIGLVEIFSEEAYTSFVKEHYEKNRSKKTKLLLEEIPEKMIERQMNDTRYISKYISSVLSNIVREEKDDDGVNSKNILPGNGKITAQLKQDWGLNDVWNELILPRFERMNELTKTSAFTSKNTNNKIIPTVPLELSKGFQKKRIDHRHHAMDALIIACATRNHVNLLNNQSAKSDTRRYDLQYKLRNTEKWNDKSGKERDKFTEFKKPWETFTQDTRNELEKTVVSFKQNLRVINKATNTYERFENGKKTDKKQEGVNWAIRKPMHKDTVSGKVELKRIKVPKDKILTATRKSIDTSFDIKTIESITDTGIQKILKNYLASKNNLPELAFSPEGIEDMNKNIAQYNDGKPHQPINKARIFELGSKFPLGQTGNKKDKYVEAAKGTNLFFAVYESHGKRSFATIPLNEVIERQKQRLISVPEMNENDASLLFYLSPNDLIYLPTDEELMDDIKIDFSTLTNEQKKRIYKIVSFTGNRLYGIPFFVATVIVNKVEYSQLNKIEFFKEKEKCIKLKISRLGNISKA

SEQ ID NO: 3350 - protein, 1387 aa, unidentified
  REGION 1..1387: note = Description of Unknown: Cas Enzyme sequence
MKKILGLDLGSTSIGWALVSEAEEVNESSAIIKTGVRVIPLSTDEQGNFEKGKAITTNQDRTLKRGARRNLQRYKLRRSELLKVLKETNIITEKTILTEDGNNTTFQTLSIRAKAARERIERDELARVFIAINKKRGYKSSRKVNNDDEGQLIDGMSVALELNNRNITPGEFALELLKNDKKYLPDFYRSDLQNEFDKVWNIQKNFYPTILTDKLYESLKGKNQKAVWAICEKPFDIVGSKRTTAGWEKKIENYEWRALGIKRKIDLEQLVVVLQEINSQVNNSSGYLGDISDRSKELYFNKQTVGEFLYEQIIENPHTRLKGQVFYRKDYEDEFDVIWSEQSKHHKELTPELKETIKDIIIFYQRRLKSQKGLISICELEGRIKEIKVDGKIKSKLIGPRVAPKSSPLFQEFRIWQRLNDIEIKEKISGTKHRLDEDQKQILFTELTVKEKLSKTEALKLLFENHRELDMNFDKLDGNRTNCKLLNAYQRIVEASGHGEYDFSSSTMKAVEIFEILESVFGALNISTEIMRFHSNLEGKEVELQPFYQLWHLLYSYEGDDSATGNDSLIETLSKKYGFEKEYAKVLAKLTFEDDYGSLSAKAISKILPHLKDGFQYDEAAEYAGYKSHSHSENKQERANKVLKAKLDLLPKNSLRNPVVEKILNQTINVVNAIIEEYGKPDEIRIELARELKKSASEREEMTKAINKSTTEYQNIRKVLSSEFGLSYVSRNDIIRYRLWKELEPRGHKTLYTDTYIAPDKLFSKEFDIEHIIPQSRLFDDSFSNKTLEKRSANIEKGDKTALDYVVEKFGEKGEEDYTTRVEELYKNGKDGISKGMYKKLLMSGADIPDGFVERDLRNSQYIAKKTKELLEEVCRTVNTTTGMVTDRLREDWQLIHVMQELNWDKYDKLGLTFFETNREGKKLPRIKDWTKRNDHRHHAMDALTVAFTRRSHVQYLNYLNARKDETHKLSSSVSAMETKELYRDDRGKLKFNPPMPLETFRAEAKKHLAQTLISFKAKNKVVTPNKNKISGSSKVQTTLTPRGQLHNETIYGSILQYRTTEVKVGGNMDEVIISKVAKKKYREALLKRLSENENDPKKAFTGKNSLIKNPLYIDGLQTQSVPAKVKLVEQETVYTIRKPIGPELKTDKVIDAKVKKILESRLKDFGGDPKKAFVNLDENPIWMNKEKGVQVKSVTITGISNAVSLHDKKDKFGNLVFDKNGNTLPVDYVSTSNNHHVAIYRDEKGNLQENVVSFFEAVVRVNQGLTIVDKEFNKSLGWEFLFTLKQNEYFVFPNEQTGFDPSGIDLVDEKNYHLISPHLFRVQKIATKNYMFTHHIETQAITGEILKNKKMLSKVTYNFIQTPSHLFNIIKIRLNHLGKIADIGEY

SEQ ID NO: 3351 - protein, 1455 aa, unidentified
  REGION 1..1455: note = Description of Unknown: Cas Enzyme sequence
MKKLGIDMGSNSIGWLIIEIEDEKTSCILKKGVITFNSGMLKEKNGYSSPTKDRREKRNPSVSRQHKKYRKQKLLQILVEKNMVPLEESELKVWSRYQKNEPRSFPETGCFKKWLACDFRYEGGGGNKYKNPYLLRVKAIDEKLHPHEFGRVLYHIAQRRGYKDIGEKDKETKKQIKKREDFGFKESMNNNRTLAEALKKDFLDKGKRARNQYPYRIEYEEELECICHKQGLNINKNERGQYEDELFKNIWRTIIWQLPLKSQRGNIGKCSLEPNSNRAPISHPLYEIFRAWSFINTIKHLNEEERWVELDLTIKQKLFREKFLKKASNFKFEEIHKFLCKKYGKQLTFNYLNKRTQKYDSTVSGMPTCKGLIDIFGEVITENLLKIHQFTGGDEPKIVGINKKYSTSDLWHVLYDFDDKDPSYIKKFATEKLGVETKNTQKRGKTIEENFEKLQSKLVSGYANLSLKAIRKIIPFLLDGHRYDKAVVLAKCPDLIDNWQEQKPIVLDIIEQSNTTYNKDKEIIAITNNCIAAYKALDKPFAYKDYQYQLQESDRREIEEKSEKNYGEKSWRKKENKEKEYILKAVEKKYQEFFHDKKRDYRKLKPIKDIIEENFKNHNIKLNGKELYHHSDRANPYSELNSFEDKEGRDFELLPSPIIGSIKNPMFNKAMTILQKLINQLIKQGDIDEDTEIIIELARELNDNNKRIAIEKYQRERENRREKYRECLEEYKKIEDDSIKIDNNNLEKFELWNEQVFKDKEGKIFKDEKGKEIIFGDFILKKKEALTRYELWIEQKATCMYTGKLISISDLFSINTDIEHTIPRSILPDNTMANKTIAYKYYNKDIKSKRLPSECPNYEKETKEGGPIKDRLRVWEKKRDHYKKLYESNLKANGKEDEDKKNKRVQDKHFYKMHYDYWKDKVERFTCEEVKESWARRQLVDTQLMSKYARWYLKRKFNKVFVQKGSVTAEFRKIYGIQDKDEKKSRDKHTHHAIDAFVLTIIPTNGSKREEKLKKAYEYQEKKNKQYKEIPFGFEKGKVQEFIKKDIETETLVNHLTEDYILKQTKKFTRKRGKLEYLKKEGKYVLDQNGRKIKIRKQGDTIRGELFKDTYLGKIRMVERDKDGNPIKDKQGNFVYKKEKQEFQFVKRVPAKDALEKVDAIIDPIIRELFIQAKQKKETNIKDYKGNIIRRVRIKTNAGRKVKGRLNYKSKHEYKNYFYSEAGKIPWALMLQKLVQKKGVQIIERKMIPISIHEIAQVYKEKKKFDIEYFMDRVEYKKEKDESVHLMKVGQKVLVLENDKEYEKRKDIKFQSERLYRITQFEDKKIILHHHLDSRTKSDIEKNIKKKKNAILRKYEKKHDIPEIEREKNENDSKYFKRGCSDKIIKERLEKLQLNECIKTIESELRKYKTQHSNIESDAIILGLTKQNWNFLYENTEYENIDFKIEVDGSIRWNK

SEQ ID NO: 3352 - protein, 1230 aa, unidentified
  REGION 1..1230: note = Description of Unknown: Cas Enzyme sequence
MIKKILGLDLGTSSIGWALIAENNDTVDIIGIGTRIIPLSTDEKDEFSAGNQISKNQKRTAKRTQRKGYDRYQLRRKALVSLLKSLDVLPEEDLMKLDALELWKIRANAVNQKIELKEFARVLLHLNQKRGYKSSRSDANLGKKDTEYVAEVKGRHQLIKEQGITIGQKFYSELMNNSNYRIKQQVFPREAYIEEFDLICEEQKKHYPEIITDELVEKLKNKIIYYQRKLKSQKGLISICEFEGFFKTNKKGKDVFVGPRVAPRSSPLFQVCKIWETINNLTLKNRSGEKYEFASDDKQKIFEYLDNNEKLTATELYKLLELNKNDGWYHNKQIERGIQGNMTKAEILKVLNINDENLIFNLNVNEEPLVDKDTGEILEKNTSKIIRPDIEDQPLYQLWHAIYSISDTDECENALIKKFGFDSETAKKLANIDFRKGGFGNKSSKAMRKILPYLIEGYMYSDACSLAGYNHSGSLTTDENLKRVLIDKLALLPKNSLRQPVVEKILNQMINLVNAIIEKYGKPDEIRIELARELKQSKEERNDTFKFMNKREKENEIIRKRLIEEYNVRATRNNVIKFRLFEEIENEDSKINAMCIYCGKHFGITDALSGDNVDVEHIIPKSLLFDDSQSNKTLSHRHCNEAKGNRTAYDYMASKGKEEFDEYLHRVEMLYKNRIIGKTKRDKLLMPQNKIPLDFIERQLRETQYISKKAREILMKVCRNVWSTSGSVTEYLRALWGWNDVLHNLQFPVYKEHGFTEIIDWESNGQLHTREVIKGWNKREDHRHHAIDALVIACTKQGFIQRINNLSSKGNREEMYELIRDMPFELRENLSLLEKYLIMQRPFTTAEVENKAAEILISFKPGKKVATTGKRIIKKNGRKKVVQTGIIVPRGSLSEESVYGRIKALSTDFKSGMLEKHPAKFLFNNPHLIFKPYIKNLVEARLAEYNDDVKKALASLKKKPIFLDKNNSVELTYATCFSDEYVLKYPIESIKPEDVKYIIDKQVQRLVKQRLDQYDGKPKEAFKEPVWFNEEKQIAIRSVRCFTGLSSTEPIKYDEAGNPIGFVLPGNNHHVAFYINSEGKIEEHICTFWHAVDRKRFGLPVIIKDPKVVWDKIITDNIELPASFIEKLPADGCVFMESMQQNEMFVLGLDENILSEALKVNDKKMLSKYLYCVRSISKSDYCFMQHMETKVEKLKEKRIIKKYYRIKSITAFMNLNPVKVKVDYLGDIKA

SEQ ID NO: 3353 - protein, 1398 aa, unidentified
  REGION 1..1398: note = Description of Unknown: Cas Enzyme sequence
METLGIDLGTNSVAIVKRNSDSSTKNLIEQIEYFGVTIFNKGVGHNKNGEFSYAAEKTKYKSTRKLYRVRKYRIWSTLQVLIENDYCPLSLEDLDKWRKYDTKNGFSRLYPINAFKFEQWVRLDFNCDGKPDYSSPYHLRAEIATKQLDLTKEVDRHKLGRALYHIAQRRGFKSSKGDSIKDIELNDSFDINDLKRSEELKIKEQHKAIEDLSINMKEYPTIGCLLYEIGKKGNRIRKEYQVVRSQLLDEVKFIFDFQKGLSQESKFFLDIKKSIFYQNPPRSQKGSVGKCTLEPQKSRCPISYPDFEYFRALSLINNIKFKKEVDDNWQYLSKEDKQELYERIFSRVRLRFKFEEIREWIEKKHNIILDYKSKTINYKDNTNISGCPITSRIKIFLGDDWKNKIIKSDKKRINKKTGEEKFIHYNWEDIWHVCFSFEDVECLIEFAKSSLKLEDNKKLKELVNIFSSISVGYSMLSLKAIRNINKFLFEGFNYSTSVLLAKMPEIFDSNWASNKDQIIKTLDDIIKSNVYKKRILNIVNALIAEYKSLEFSEQQAAHNTNYQLNEEDKTSIVEFCIKSYGQKSWLKIEDDVKDSLINEVSQKYQDFFASSKRDFYRLPKLVDEIKTFLFENYKFLDEKKIKSLYHPSMIEVYKPSKMELCDYKGVNLCLKLLNSPKTGSFKNPMAMRMLHILRKNINHLLLEGIINEETRIVVETARDLNDANQRWAINKYQEEKERQNSEIHKALCELLSINEVKDSDFEKAKSLIDQAEIIESINSDTILNKENIKKEKKKKIIEKADTFKINTTKYKLWLEQGMTCLYTGKIINLRDLFGENPKFDIEHTIPRSVSLDNSLENKTICCSYYNRSIKKNKIPTELPNYYTDSGDYTAILPRLKAWKDKVDRLENNVEYWKLQSKLAQTKEDKDFRIRQRHLWQMELNHWKGKLDRFELKEVTEGFKNSQLVDTRIITKYATLYLKSVFENVDVQKGIVTSEFRKILKLQELDKKKSRDKHSHHAIDAAVLTLIPASAKRDKILSLWYEMLENRSKNQYDSTIEKKLNKEIRSLNIGNINNFVEEIDDNILINHISKDRALTSTKKKIRTRGKVVYASENNPYYSTGDTIRGQLHGETYYGAIKLAKKDENNNILFDENNKMIIDDKVHFVIRKEISSFKKWEDIEKVIVDINLYHNIKIQNSDKSPEKDTITLTDKKGVKRIVRRIRCYEKSITNPIKLKNHTYLSSKDHKQSYYVNGGDLYSIAKYSNDSEVEYNVFGLFDISKNRELNSEDIPQTIISKKKKQKLELDYTLVSGMKVIVLNKDETFSDIKDILSKRLYVFERPERDLRINLKHHLCADPDIKSESIKDYSKLPSKIRCSINTIRILIEGVDFDMSLFGKIEQK

SEQ ID NO: 3354 - protein, 1865 aa, unidentified
  REGION 1..1865: note = Description of Unknown: Cas Enzyme sequence
MKKILGLDLGTNSIGWALVEIDHENGIVKILGLGSRIIPMNAGEIKDFESNGKIKSAAAQRTETRGPRRLNERYLLRRDRLHLVLNLLDALPKHYKLEIDFTNEKGEKSGKLKANKEPKLAYLPKRKGEKAEFLFKDSYQEMLDELKIENRKGNRIPYDWTLYYLRDKALKSKEMLKKENKEPLTLEELAWVLLSYNQKRGYEKNEVEDKATKQNEIIEEFDLQVKSVTPKVDIKGSSLFEIQLEGNDAFVYNEKSSVQLTQVGDIKEVIKISQVDEQGNVEKTHFKIIDIYSLEISALDYKKEDGKHKYTLTYKNGWEEQKRTNNYTFKYKNALKKIYDYIVETEYDTQGNLKLVQGKERKLREPDFNDTSNDWTLLKKKTEKETLAFNIDNGFKKDNGDARKFISPKIYNTLKCDAKTGLRTKIIGGVFQVVDRDFYREELNQIIATQKDFHTSLEDEKIFGQCVRTLYPKNQNHQKSLLNNKDAIQNLLVEDILLYQRPLKSKKSEIANCKYEVRYWDEVLDKKTKKAIEEVDEETGEVTIKQQPIYHKVVSASHPYFQEFRIWDKLHNIRLIQLEKVDKDTGEIQTNLDVTKGYFKTDVDYQNLFNKLNNQKSLSQNQFLKYCKDTFGIPYIKKEKNFVWNFPEDEELKGNETRVSFVTRFKRCGYTEYKDYLTQEKEIDLWHYLYSVSYKERTANNNKSVTTFFNRFFEGSDVTEEVKNKIIQDFVNYPKFPSRYCAYSEKALKKLMPFIRMGKNRFAGKFDVSEYLTDLQSIEFDSKRIRQLLKKSTLNGKEKEAYKQSLYDALWKHSVNERIEEILIRLKKIDFTAEKVDYSQVTRNKTNYGELPYPKGLFNAFKNFNKVDDFTSLDLTKTSYLVYGRHSELAQAKYWTSPDKVRNELRQELKQHSLNNPVAEKVLLEMMQIVAAIWEYYGEKNKNTEDYEKLFDKIHLEVGRELKKSVKEKEADSKRQSGNRAQNKRLRQVLEEFLTRKPYNANPINTDHFERLKILEEGAEHTKNNDKEFFKGKSYTKKDIEDILKKQSISKTDFEKYKLWIEQGYRSPYTNQVIKLTDLFDGAKYNIDHVFPQASITNNSLSNKVVCELEVNTTKSDQTGREFVNNPKQRNVPCEAHKTIKNPKGVVEIVNDETYVSIIKAQFSGNKKLILLSKEIPKGFTNSQLNNSRHIARKAMELLSHIVREPGEVEFRSKNVLPVTGAVTGKLKEAWKLDQVWKELVAPRYIRMNELTQSKLFGSWQKSKAGHDYFDCNLDKSIREKDDSYNIKRIDHRHHALDALIVALCTEDHVNYLSNINANKKLEKYGEQRKLEAYRKKLKRKIMFSKPKKDKPKENDWYYLKPGEARQKNAENSREDSVLTKSYFYKDLDSFNKDYKKMILTALQHTIVTFKQNLRVINKTVNLYNNSPDKKKKDRQEGEKGGNKENWAIRRSLGKGTYYGKIDIGDRINKQLLKNAKFFYENIDAIVDMDLRFQLQDIKTNSISVKDFEVKLKENFKNTFVECIAFKAASRFNSELNESFNREKIGTITDKGIQKILTNHLKQFDTTELPFEEALKYFDSILEKHELEAILKEDENLFKGIEDLTDFLRLNDFKYKKVNFSKLHLFIEHVPDEDFRNDERFKDKIGDHPEIAFTPEMITKMNEAENLIRLNEGKNHKPIFKMRTYSGFGNEKSVSDNKSSVKHKQFVKVDKGTNFYLAIYEIKDKSKISRENPIRIFKEISLFDLIEFQKSTNNFELPIEENVHSVGGEKYSFLFTLTQNDVVKINLKNDELIYAFNRYSGNDVYFRPINHSTEVEKYEVDRKINSLTGKLSGSQVNETTSINGAQIKNICLKLKVDRLGNILMP

SEQ ID NO: 3355 - protein, 1396 aa, unidentified
  REGION 1..1396: note = Description of Unknown: Cas Enzyme sequence
MKKILGLDLGTTSIGWALVNEAETDNEQSSIIKLGVRISQLDNFDKVDKSGKVSESKNPIEDFAGGKGLSPNAGRTQKRGARRNLQRYKLRRKNLISVLTENGIINNRSILTEDGENSTFQTLALRARAAKERIEKDQFARVLLSINKKRGYKSSRKAQNEEEGKAIDGMAIAIKLYEENLTPGSYCYQLLKQGRKIIPDFYRSDLKIEFDKVWSFQKQFYPDVLDDELYKAIEGQGLQNTRKRFLAIKGIYTAENKGKNDEKKLTAYLWRSLAISEQLEIDQVAFVLTEINNNLNSSSGYLGAVSDRSKTLYFNKQTVGENIFGQITENRHTRLKGQVFYRQDYLDEFEQIWETQKLFHPELTNRLKSEIRDIIIFYQRRLKTQKGLISHCEFESKQMVEDVDGKKKVRIIGPRVCPKSSPLFQEFKIWQNLSNLEFENKKTKQVEKFVEYDIETKQMLFNELNIKGNLKKKDVLKLFELSPTEWSIKYKELQGNLTNKILYEAFQKMIFHEGHEIDFSKKSADEIKGTIASIFEMLGICTDILNFEGEKDGVAFEQQKSFQLWHLLYSYEEDNSPSGTDSIFKLLLEKFGIKKEIAQYLINIKFQDDYGNLSTKAIRKIFPFIKYNNYSNACQQAGYNHSNFITKEENEKRVLKNRMDLLPKNSLRNPVVEKILNQVVNVVNAIVDDPTLGRPDEIRIELARELKKNAKERADMAQSINSAKDLHDKYRKILKEDFHILNPTRNDIIRYKLYLELKANGFKSLYSNQYIPHEKLFSKEIDIEHIIPKARLFDDSFSNKTLEFRQVNIDKSDETAYDYVKDTLGPERLDLYKNRVEKLYKDGGISKAKCKKLLMEGVDIGEGFIERDLRESQYIAKKARQMLLELCRNVVSTTGSITDTLRDDWGLINTMKELNIEKYRALGLTKIEERKEGQEIEKIIDWTKRNDHRHHAMDALTVAFTKHTHIQYLNNLNARRNEDHKKHGNIIAIERKEIFRDENNKRKFKSPMPNFRIEAKKELEKILISVKAKNKVVTRNKNSVKGNIKSRISLTPRGQLHKETVYGKSQHYETKLVKVGTGFDLLMINQVANQKFREALMKRLLENETNPKKAFSGKNSPAKNPIFTRDNEQLPEKVKIVSLADIYTIKKDINPENFKAEKNIDKVVDKGIRKILINRLDEYGGKPKEAFANLDKNPIWLNKEKGIAIKRVTISGVNNAEALHTKKNHFGNDILNSRGQKIPADFVSTGNNHHVAIYKDEKGNLQEEVVSFYEAVARVNADLPIITKQHEKGWEFQFTMKQNEMFVFPSDGFDLLEIDLLNPANNSLISLHLFRVQSISSKYYIFNHHYETRNADGNLFMTKKQLSGVTYNFIRTPQNLKDIVKVRINHLGQIVNVGEY

SEQ ID NO: 3356 - protein, 1380 aa, unidentified
  REGION 1..1380: note = Description of Unknown: Cas Enzyme sequence
MKKILGLDLGTNSIGWALVNEAENNTEQSSIVKLGVRVNPLTVDEQSNFERGKSITTTADRTLKRSMRRNLQRYKLRRENLIEILRINGLVSDDTTFSENGNRSTFETYRLRARAATEEISLSEFARVLLMINKKRGYKSSRKAKNQEEGQLIDGMGIAKKLYDENLTPGQLVLGLLLENKKHVPDFYRSDLISEFGRVWNFQSQFYPEIFTKEFRNEIEGKGQRVTSAAFWKKFGFNIAENKNTRDEKRLQAYKWRSKAIDSQLLKEEAAYVITEINTNLNSSSGYLGSISDRSKELYFNKLTVGQYLMSQLEMNSHTRLKNQVFYRQDYLDEFDVIWEKQSTFHEKLTPELKHEVRNIIIFYQRRLKSQKGLIGFCEFENRQIEILVDGKKKKRTVGFKVCPKSSPLFQEFKIWQILNNLEVFEKNNNKRRLLDQEEKDLLFKELTLKNKLTKADVLKLLFANPIELDLNYKEIEGNRTQAVLFEAYFRIIELTGHGEFDFSKMNYAQISSTVKSIFTGLNYNTDILFFNSELEGIEFERQAAYKFWHLLYSYEGDDSKTGNEKLVNKITELFGFEKEYAVILANVSFQQDYGSLSSKAIRKILPYLKAGNDFSEACKYAGYRHSKSSLTKEELDTKVLKDKLEILPKNSLRNPVVEKIINQMINVVNTVVDAYGKPDEIRIELARELKKSAKEREDLTNAINIATIEHEKYRAILQSEFGISNVSRNDIIRYKLYLELESRGFKTLYTNTYIAQEKLFSKEFDIEHIIPQSRLFDDSFSNKTIETRAANIDKGNYTAYEYVLAKYGQNGLIEYLDRLEELYKAGKISRGKYNKLKMKGEDIPDDFIARDLRDSQYIAKKAKAILEELVKEVISTTGSITDRLREDWQLIDVMQELNWGKFEMLGMTETIENRDGHKIRRIKDWTKRNDHRHHAMDALTIAFTKRSFIQYLNNLNARSDKAGSIYGIEQKELYRDERGKLKFKPPIPLNDFRYEAKKHLENTLISIKAKNKVATININETDKKNGTNKKKQLTPRGQLHLETVYGSIKRFISKMEKVGSAFNEEKIATVAKKSYRIALLKRLIEFDKDPKKAFTGKNSLDKNPLYLNDLQTLQVPEKIKTVGVVTIYTIRKDITPDLKIEKVIDKKIRELLQVRLNEFGGDSKKAFSNLDENPIWLNEEKGISIKRVTITGINNAVALHDKRDKDGVLILDTEGKKQAVDFVNTGNNHHVAIYNDDKGILQENVVSFFEATMRVNQGLPIIDKDYRKDEGWEFLFSMKQNEYFVFPNEKTGFNPKEIDLLDSKNYFLISPNLFRVQKISTKNYVFNHHLETKAVDGDTLKSKKYLIGITHYFIQTPTNLKDLIKVRVNHCGNIVSVGE

SEQ ID NO: 3357 - protein, 1488 aa, unidentified
  REGION 1..1488: note = Description of Unknown: Cas Enzyme sequence
MKKILGLDLGTNSIGWALVNQDVENGKGNIISAGSRIIPMSQEILGEFDKGNSISQTAERTGFRGVRRIRERFLLRRERLHRVLNQIGFLPSFYATQIDFEKHYGQFKEKTEPKLAYDGNTNFIFKDSFEEMLKDFAIHQPLLVANGKKVPYDWTIYFLRKKALTEKITREELAWLLLNFNQKRGYFQLRGEEDEEIPNKKVEFHELKVVKVEATEDRKKDDIWYNVILENGWIYRRSSKEALFDWVGKTKEFIVTTDLNEDGSIKTDKDGKEKRSFKAVNSEEDWIAIKKSTEEKIERSNKTVGCYIYETMLQKPEQKINGKLIRTIERKFYKAELKSILEKQKEFHSELQDETLYRECLEELYQYNEAHKSNIEKYDFTYLFINDILFYQRPLKSKKSLISNCRFESRSYKNEDGTLVTLPIKCIAKSHPLFQEFRLWQWMMNLKIYLKDNDKEVTAELLKTEEDWVNLFKWLNERKEVDQKAFLKYPGFNLKKETAKYRWNFVEDKTYPCNETRSMISTRLVKAGIAPDDFLTNETEEALWHILYSVENKNEIEKAIKSFGAKHHLGNEFEEQFVKFPPFKKEYGSYSAKAIKKILPLMRLGSYWNEESIHLQTQERIGKLLSGEFDEKIRNRVREKAIALSEISHFKGLPLWLTTYIIYDRHSEDGEVIKWHTANDIQLLEQHSLRNPIVEQVINETLLVVRDIWNAYGEGKEDFIDEIHIELGREMKNPAERRKQMTSQNTENENTNLRIRALLAEMQSDSSIENVRAYSPSQQEILKIYEDGVLYSQTEIPEDILKISKAPQPSKTELNRYKLWLEQKYRSPYTGVVIPLSKLFTPAYEIEHIIPQSRYFDDSFSNKVICEAEVNKLKDNQLGFEFIKKHRTEKVALNYGRTVGILTEEAYQDFIKTNYASPKSRGKRNKLLMEDIPESFIQRQLNDSRYISKVVKNLMSNIVRAEDEQETTSKNVLSSNGTITSVLKQDWGLNEIWNEIIEPRFTRLNGLTNSNRFGKINKNTGKFLPEVPLELLKGFNKKRIDHRHHTMDAIVIACATRNHINYLNNESAKADKKNIRFELRNKLCFKKFNDGSSDNYKWIFQKPWKTFTEEAKETLLNTLVSFKQNLRVINKTSNYYQNWVQQNDGTRKREIVKQTKGDNWAVRKPLNKETVSGLVKLKFKKNVSLSVALENAEMITDKSLKQKINELKELNKDKKQIVNYFKDTEYEWNKKDVSRVDIYYWDNENVASRVKIDESFNSEKIKSVTDTGIQNILMNHLKNYEENRDGKITEHPEMAFSADGIESLNKNILLLNQGKLHQPIYKVRTYEPKGNKYIVGSKGNKKDKYVEAAKGTNLFFAIYADEDGKRSYETLPLNIVIERLKQGLKEVPEISDKGSKLLFHLSPNDLVYIPTKDEDEAGKTGLLNNRIYKVVSFTGNRLYCIQHNIAKSIIDKIEFTLLNKLESDIESNLSIKQVCYKLKVDRLGRQIQ

SEQ ID NO: 3358 - protein, 1378 aa, unidentified
  REGION 1..1378: note = Description of Unknown: Cas Enzyme sequence
MEKILGVDLGTNSIGLTLREENNFTWYGVYTFKKGVGEGKAGEFSFAAERTKHRSSRRLYNARRYRKWETLKVLIEKDYCPLSKENLDNWKHFKKGTGRTFPIEDTLFQEWIKLDFNGDGIPDYSSPYQLRKLLINEILDLSLSENRYKIGRALYHIAQRRGFKSSRKSGANEKTAVYNGSNETKTIGRNEYENLIIEHGSLGAAFASLEDLCIRVRNRYTLRTDYQEEVQKILVFQTIQDEEFYSSIDKAIFYQRPLRSNKGLIGKCTLEPNKPRCPISHPKFEEYRAWSFINNIKYKNPDTNHFIPIPLNLKEKLYKEKFFYKSKRDFPFKEIRNFINANGGKNWELNYSAKMDDISVPSCSVSARLKSVFGESWENYKKETTRTNKKGEIEIINYSIEDIWHILFSFEDEEYFIEFLTNVLKLEEDQIKELTILFNSFPIGYVNLSLKAINNILPFLREGIIYSESVILAKIPAIIGEKLFEDNKKDILQAIQDKVEEIRNQKTIITIANNLIFKYYALDYDQRFGWKNTAYKLDESDIKDIEIASQEHFGEKSWSKFDLNFKQSILSDVTLLYQDFFASNKREHMPQPHLVNSVKEFLSKNFDATEKALSKIYHPSQIDIYPKKEGQQFLLSPKTAAFKNPMAYKTLYKLKDVFNYLIEKGIIDNETRIVVEIARELNDSNKRWAIEKYQRDRETENIEFANAISELIKDTEFSGVADPNSNSDIDKFRLWLEQIENTEEIVKDVQNINKNKQLSVSQKDVQKYRLWKEQNCICFYTGKVINLTDLFDANKVDFEHTIPRSKSFDNSLANLTVCYANYNRNVKKNQMPAELPNYSEPWNGYPAIKPKLEAWEKKVDDLFKQIDFWKFKSRIAMDKAAKDEAIKQKHLRQMHYDYWRNKIDRFSQTETTQGFVNSQLTDTQIITKYAFHYLKTVFNKVDVIKGSNTAEFRKIFEIQTKNEIKDRSVHSHHAIDAAVLTLIPSSKRREEILKKSYEYEESNYGKQYHEKPFRGFNYSMIEEIKQKILINNIPEKDQVLTPGRKIVRKRGRIVWIDKPNRIPKIAQGDSIRGELHLQTYYGKIKVAAKDENGSLNRDDKRNILYNQVDGKDEIWMVIRKPIENVNFTTDIIVDEHLSAVLKKQLEDGIKQIDLVDFQGKKLRHLRCRVKSARGFMNPDNVTVVKEQTYKSIKDYKNYVYADSGENFIFGLYENEKGREVKSINKFEAALYLKNIGRPENKSELFSQKEPVLIKNEESRLIHVFEVGQKVIFYNTLEELREKENDIQALSERLYFIKRLHQASVGNILFQHHLEARSDDELALAFPKEIFKSAGKDGFSKFQTDFVAPRLLFKPSKPNFIIEGEDFEMMFDGNIVFKF

SEQ ID NO: 3359 - protein, 1693 aa, unidentified
  REGION 1..1693: note = Description of Unknown: Cas Enzyme sequence
MKKILGLDLGTNSIGWALVEIDHDRKIVKILGLGSRILSMDAAEISKFESGSKLPSTAAQRTGKRTLRKLNERFLLRRDRLHCVLNLLDTLPEHYKLDIEFENEKGKRSGKFKKGTKVKFAYFKDEKGINQFLFMDAYKLMEADFKQIHPELFYEKKNGKNTHIPFDWTLYYLRHKALTDPNFQLTKEQLAWITLSFNQKRGYEKVIGQDEKMQKEGEIIDTFVGRVKSIKNAEGKDIYDIVLSDSNNEAIELFRYKEETKIPITEVGDLKEIERVSKYNDAGEIDSTKTEYIINEIRNLLITNVKNTGQKRKENFVFEIELETGWIKEQQSRFTPKWKDTRRDFIIKTKYDEKGDRILKGADKGRNIGIPKEEDWTLMKLKTETSITNFNAKNGTAGVASFIYYNLLQNPHQKIKGDLVTVIERDYYRDELERIYKNQERFHPELRQENKELYEQAIKLLYPNNINHQKTIRELDFNYLIREDILMYQRELKSKKSLISDCVYEKENYEHIDKRTGEKFKKPLKAIHKFNPLFQEFRLWQFIKRLRIIKLIDIENKETKINIDVTSRYLKALETKERLYEYLNDKDCVTEKNVLSFLAKEYRDKSINLENYKWNFTSEKEPCNTTRYEFILRTKRINGFDFKTFLSPENEYYLWHFFYSIKKRSKNNQELVSLLTKLLNKSGLPIDFLPELVKNFSTFGGFSNDYGTYSEKAIKKLLPFLRVGKYWVSKDVENNLKKDLTDKIRGKVIDKESINGEIKDFQGLWISSACYLVYGRYSEVGEVQHWESPYDIENYLRNEFKQHSLNNPVVEKVLIETLHLVKDIWKFFGETIAVDEKGNAVYAKLFDKIHIELGREMKKNNKQKEKEDIQNKEKRKANERIIELLKELKKENLALEVKSPFQQEKLRILEEGLLSSIEYHKDSTEYTNTATVSDRYPFFKISKKEIKEITTKDVTRISRSDFERYKLWLDQRFQSPYSGKFIKLSDLFDRKKYEIEHVFPQERITLNALSNKVICESEINKEKKANTGYGFILNSNEREIFCNAHNAKVKMLSAEEYEQLVNRNFVGKKREILLSREIPEDFTNSQMANMQYITKVAMKLLSNIVREKDEDTYRSKHVLATNGTITTTLKKHWKINEVWSELTAPRYKRLNELTKTNLFGDYRDINGRKVFLNDVPDEIKKNFDPKRIDHRHHAMDALVIALITEEHVQYLNNISSQEENDEEKLKTRKGLKYLLTNSRKGINDEKEWYFLPPAQFKTAEGIVEFQYLFKEIKSKVFKDIVKEALESTVASFKQKNRIIRQRWNKYLKPNEDGQILIYNEGNLESRLKYNVRQPLHLDTFYGQVKLQNTVNKSSNVIEKDISVAIKGGYELYETGIRERVEYLRYEKKSNEEIIRLLNNEFSKVKVYAKLVASRFGNELTSLASSEKIYETIESITDTGIQKILVNHLEDYKGRIDGEGKGIAPQTLAFSHDGITELNQNIKLLNNGKFHKPIYKVRIAEAMGTKFQISEEGTNSSKYVATAGGSNAFCSIYLKGNERKFYVPTLRESIINLKDGFEPCPSVHPLDSDYKLFCVLNPNDLVYVPTEDEVEYISSTQTIKLLADFSKLTKEKLMRIYKFTDGSGTTMNFVPVNIASVLFNLSKKEQDKIGMNLPIQNELGVGSPQSKNQNSLDGVQIKSVCWKIKIDRLGNITS

SEQ ID NO: 3360 - protein, 1507 aa, unidentified
  REGION 1..1507: note = Description of Unknown: Cas Enzyme sequence
MKKILGLDLGTNSIGWALVDTDEKKILGMGSRIIPMSQDVLDTFSGGKPLETQTAARTGFRGIRRIRERQLLRRERLHRVLNILGFLPEHYSNQIDFEKHFGQFVDESEPKLTYNNRNFIFTDSFNEMLSDFKQSQPQLFYTKPNGKETKIPHDWTIYYLRKKALSQKIEKDELAWIILNFNQKRGYYQLRGEEEYENPNKLTEFQSLKIVDVIADEKPNSKGDLWYSLHLENGWVYRRSSRTPLFDWKDKVRDFIVTTDLNDDGSIKTDKEGNERRSFRAPSEDDWTLLKKKTEQEINKSNKTVGAYIYETLLQNPSQKIRGKLVRTIERKFYKEELIAILKKQIELQPELFTEDLYNDCVRELYRNNEAQQLILSKRDFVHLFVEDIIFYQRPLRSQKSSIGNCSLEFRIHKDKDGNRVKKYLKVIPKSHPLYQEFRLWQWLTNLKIYRKEDDANVTTEFMKSTEDFVALFDFLMTQKEVGHKDILKHLVTPTLKEKFPNVKPAVFNKEIDKEIVKYRWNYVFDDSKEKEEDKSKKYPCNTTGYEIRRRLGKIENVPTDFLEITDTKEVEIKKGREKGQRITVSLGTREYQLWHIIYSVTDKKEYEAALKSFANKYKLDENSFVEEFRKFVPFPSEYGAYSEKAINKLLTLIRMGKYWSWNAIDAETQSRIEKILSGEYDENIKARVREKAINLTDNNHFQGLPIWLASYVIYDRHSEADIAGKWNSVAELEQYLKDFKQHSLRNPIVEQVVAETLRVVRDIWKKYGQGAKDFFSEIHIELGREMKNTADDRKYLTEQVIKNEATNLRIKALLAELKENSDSKLLVENVRPHSPSQQDVLRIYENAVLNSMAELPEDIAKISKSSQPSKKELQRYKLWLEQKYRSPYTGSVIPLGQLFTEDYQIEHIIPKSRYFDDSFNNKVICEAAVNQLKDKQLGWEFIKNHRGEKVECGKGKVVEIFTKDEYQAFVKEYYAKNKTKRQNLLLDEIPEKMIARQMNDTRYISKYISSLLSNIVRADKEDDGVNSKNLIPGNGKITTALKQDWGLNNIWNDLVLPRFMRMNEITETNYFTSINQEGHTIPAMPLELSKGFQKKRIDHRHHAMDALVVACMTRDHVQYLNNENAKSQKFHLQQGLARKLRRFEVVEISKMKKNEKGYWVKSEDKINKEVPKEFFKPWYNFTIDARTALGSVIISFKQNLRVINKATNSYQKWVDEKGLLVKEYVKQEGTNWAIRKPMHKETVSGKVVLNRIKVPKGKLLTASRKNVDTSFNRKTIDSITDTGIQKILISFLEFKGNNPEIAFSPEGLEEMNANIKQYNNGVPHKPIKKVRIFELGSKFPLGDSGNKKEKYVEAAKGTNLFFAIFQKEDGTRTFETYPFNVVIERLKQGLGEVPEINEKGEKLIFSLSPNDLVYVPSIEENQNQQNINLQQITTEQVSRIYKMVSCTGTECYFINHHIASLIKPYDAKSKIGELGSINKLETSFDGIRIKEVCIKLKVDRLGRVTF

SEQ ID NO: 3361 - protein, 1381 aa, unidentified
  REGION 1..1381: note = Description of Unknown: Cas Enzyme sequence
MKKILGLDLGTNSIGWALVYEAETKEEMSSIIKLGVRVNPLTVDEKQNFEKGKSITTNAERTSKRSMRRNLQRYKLRRENLIDVLKSNNFISDETILSENGNRTTFETYRLRAKAANEEISLEELGRVLLMINKKRGYKSSRKAKNQEEGQLIDGMDIAKKLYYDKITPGQLILQLLKAGGKNIPDFYRSDLQAEFDKIWEFQKSFYPEILVDDFKQQIGGKGKMNTSKIFLARFGIYTADNKGKDKKLQAGQWRVDSLSIQLPKSELAFVISDVNGSISNSSGYLGSISDRSKELFFNKQTVGQNLMSQLDEDPNTKLKNQVFYRQDYLDEFNIIWEKQAEFHSELTTELKKEVRDIVIFYQRHLKSQKGLVSFCEFESRPIELEIEGKKKVKIVGSKVCPRSSPIFQEFKIWQILNNIEVTDKASRIKRLLEQDEKESLFAELNLRTKMAKTDVLKHLFKNYRDLDLNYKDVEGNKTQAALFEAYAKIISLSGHNGFDFSELTSAQILERVHLIFEGLSYSTDILYFNAELEGKDFENQPIYQLWHLIYSFEGDDSKTGDEKLRNKLTSLYGFENEYAALLANLNFQSDYSNLSTKAIRKILPYLKAGHEYSIACEYAGYKHSKSSLTKEEIENKILKDKLDILPKNSLRNPVVEKILNQMINVVNSVVDSYGKPDEIRIELARELKKSAKEREELTTYIGQSTIEHDKYRKILQTEFGLTNVSRNDLIRYKLYLELEPKGFKTLYSDTYIPPSKLFSKEFDIEHIIPQSRLFDDSFSNKTLESRDVNIEKGNNTAYDYLHSKLGEGGLNEYLIRVDELYKFGKISKSKYNKLRMKGTDIPDDFIARDLRDTQYIARKAKSILEDLARRVTSTSGSITNRLREDWQLIDVMQELNWEKYNLMGMTEIIENREGQKIRRIKEWTKRNDHRHHAMDALTIAFTKTSFIQYLNNLNARSDKAGSIYGIEQKELYRDDKGKLKFKPPIPLEKFRAEAKKHLENTLISIKAKNKVSTSNINVTDKKGGNNKKKQLTPRGQLHLESVYGSISQYVSREEKVGSAFNEEKIATVSKWKYRDALLNRLIEYGKDPKEAFTGINSLDKNPIYLDALQTLKVPEKVKVVWMETVYTIRKEITPVLKLDKVIDVGIRNILQARLNDFGGNNKQAFSNLDENPIWLNEGKGISIKRVTITGVSNAIALHDKKDKEGNLILTSDGKNQGADFVNTGNNHHVAIYKDAKDKLQDNVVSFFEATSRVNLGLPIIDRDYYNDEGWEFKFSLKQNEYFVFPNEKTGFNPKDIDLLDADNYYLISPNLYRVQKFSKVIYGNAAVRDYVFRHHLESSIQDNKNMKDITYKSIKSLPIFDSIVKVRINHLGLIISTGEY

SEQ ID NO: 3362 - protein, 1375 aa, unidentified
  REGION 1..1375: note = Description of Unknown: Cas Enzyme sequence
MKKILGLDLGTTSIGWALVNEAENDNEKSSIIKLGVRVNPLTTDELSDFVKGKSITTNADRTLKRSMRRNLQRYKLRRENLVEILLKHNFINDSTLLSEHGNSSTFETYTLRAKAAVEKITLEELGRVLLMINKKRGYKSSRKAKSNDEGQLIDGMQIAKKLYEENLTPGQLCYEILNAGQKYIPDFYRSDLKSEMSKIWDCQKNYYPQILTEDLKTSLEGKNKGQTWKICEKPFDIVGFKRIGNSSEQKVENYLWRTQGLVEKLGLEELAVVFQEINSQINNSSGHLGAISDRSKELYFNKMTVGQYFMAQLEKDPHARLKKQVFYRQDYLDEFDRIWDKQSEFYSQFSSELKNEIRDIVIFYQRRLKSQKGLLSFCEFESWEMEVEIDGNKKVKTVGKRVCPRSSPLFQEFKIWQILNNIEVTDKKSSQKIKLDQEQKELLFNELSFKNYLSKNEALKIVFENPKNLEMNYPKIEGNKTQAALYNVYSKIIELSGHGEYDFDKMSGNDIYSTVNDVFHGLGFNTDILKYNSDVNSEELEKQPMFLLWHLLCSFEGDDSITGNEKLIKRIQEKYKFDKEYAQLIANLSFQDDYASVSSKAIKNILPHLKEGNEYSVACTLAGYNHSKSSLTKEEIESKVLKEKLDILPKNSLRNPVVEKILNQMINVINAASEAYGKPDEIRIELARELKKSADERAEMTSAINKTTLEHEQIKKMLQSEFGFSQVSRNDIIRYKLYQELSCNGYRTLYSNTYIPREKLFSKEFDIEHIIPQSRLFDDSFSNKTIESRSINIEKGNDTAIDFVKKKYGDDGLHQYLERIELFLKSADKRKTKFNKLKTKGDDIPEDFIARDLRDTQYIAKKAKSILESYVKVVLSTTGSITKRLREDWQLVDVMKELNWEKYNALGLTEIIDGKDGRKIKRIKDWSKRNDHRHHSVDALAVAFTKRSFVQYLNNLNARSDKKGSICEIETKSLCRDENGKLKFKSPFAIKEFRAEAKKHLESTLVSIKAKNKVVTININKTHKKCGYNKKNQLTPRGQLHNETIYGSSIVYKAKEEKVGGGFTEEYISNVGSAKYRKALIDRLNEFDNDPKKAFTGKNSLDKNPVWIDDLKTQEVPEKVKIVTTETIYTIRKDISPDIKIEKVIDKKIRELLQIRLAKFGGDAKKAFSNLDDNPIWLNEEKGISIKRVTITGISNALALHDKKDKDGNNILTNEGAPLPVDFVNTGNNHHVAIYCDKNDNLQEKIVSFFEATERVSQKLPVVDKEHNQSEGWEFQYTMKQNEYFVFPNEKTGFNPSEIDLLNPDNYYLISPNLFRVQKISTKNYYFRHHLETDVQERSALKDIAFKPYLGLKAIKNIVKVRINHIGQIVSVGEY

SEQ ID NO: 3363 - protein, 1375 aa, unidentified
  REGION 1..1375: note = Description of Unknown: Cas Enzyme sequence
MRKIIGLDLGVSSCGWAYVREAEIINEKSEIMHLGVRVYPLTVDEQNNFEKGKSITTNAKRQEKHSMRINLQRYKLRREHLVDRLKKAGFIDDDTILRECGNRTTFETYRLRAKAVTDEISLSELARVLLMINKKRGYKSNRKMNNSEEGSLVDGMEVAKYLCENDVTPGQYAYELLSNGNKNLPDFYQSDYKDEFEKIWNIQKAFYPEILTDDFKKALSGKNKTQSSKMFFTCYDVQIAQIKEKDKRLQALKWRCDALTEKLVIEQLAYVICDLNGLVNNASNYLGKISDRSKELYFQNLTVGQYQMKMLDENPNASLKNMVFYRQDYLDEFERIWETQAKYHPELTRELKKEICNMIIFYQRPLKSMKGLVGICELERKQVEVEIDGNKKIITVGSKVCPKSSPLFQEFRIWQRLNDIKIKNLSTRQEYFLNQDQKELLAKELEYKSRMTKQQMLKCLSLKPKEYDMNFKEVNGNETQAMLFDAYRKIIECSGNRIIDCSRNGEYDFSKMSADEIHALVKTVFDGLGYSTGMLDFDAQTADISQDSMYRLWHLLYSYESDKSAIGNETLVRKIQKLFGFESDEYAKIIAGITFKSEYGNLSAKAIKNILPFMKEGNNYSTSCAYAGYKHSVRSLTKEELASKQLKTHLDILPKNNLRNPVVEKGLNQMINVVNYLIDEYGQPDEIRVELARELKKSAKEREEMSKAISKSNDDNNEYRKILEDEFGIAHVSKNDILRYKLYLELKENGFRTLYSNTYIQREKLFSRDFDIEHIIPQARAFDDSFSNKTLECRSINLEKSDSTAFDYITGKYGQDGAEAYKKRVNDLYEAKQISKTKMTKLLMTADDIPADFINRDLCDTQYIAKKAKEILESVAPVVVTTTGSITERLREDWQLVDVMKELNWDKYDKLGLTETYNDKDGNLVCKIKDWTKRNDHRHHAMDALVIAFTKPSFVQYLNNMNARSDRSGSIYGIEKKEMYRDKHNKLRFKPPFPLDEFRAEAKRHLQDILVSVKSKNKVVTRGINKTKCVQGFNTRIQLTPRGQLHNETVYGKRQMYVLYEEKVGSSFTADKIATVANKKQREALLERLHAYGDDAKKAFTGKNSLDKNPVWLNEEHTEHVPLKVKCVGTETVYTVRVAVDKDLKVDNVMDPHVKKILQQRLDEYGGNAKKAFSNLDENPIWLNQEKGIKIKRVAVKAKVSNPESIHMTKDKDGNDVPVDYVLTSNNHHAAFYVDKDGKIHDEVITFKEAVNRAVNGKPVVDKDYNKDIGWKFLFSMMKNEYFVFPNADGFNPKEIDLTDEKNYHLISPNLYRVQLISKNEYPKGIMRSYMFRHHLETTVNVDLKDVTYKQMSSLSFVKDIVKVRINHIGKIVVN

SEQ ID NO: 3364 - protein, 1425 aa, unidentified
  REGION 1..1425: note = Description of Unknown: Cas Enzyme sequence
MKKILGLDLGTNSIGWALVNESETENEQSSIVKLGVRVNPLTVDEISNFEKGKSITTNAERTLKRGARRNLQRYKLRRENLIEILRENKIIADKTILSEDGKDTTHQTLKLRAKAAKEKVSLEEFAKILLLINKKRGYKSNRKAQSSDEGQLIDGMAVAKELYEKDITPGEFSYNLLKNGKNNLPDFYRSDLQMEFDRIWKFQHKFYPEILTDDLKNNLKNKAKKDTWAICQKPFNIVGIKRNTKGAEQKLENYKWRKDALTKQLELEELAIVLQEINGQTNSSSNYLGDISDRSKELYFNNQTVGEYQMAQLVANRHQSLKNQVFYRQDYLDEFEKIWETQAIHHKELTPELKKEIRDVVIFYQRPLKSQKGLLSFCEFESKEIEILINGVKKKKTTGLRVCPKSSPLFQEFRIWQVLNNIEVKGVTKKNKNNIEPTLFEDNFNEKKLIQKVQRPLEQEEKELLAERLMLCDKMTKNQMLTALGLNNYDMNFKEIKGNTTFAKLFQAYKEIAEIVGYDKDKIKNLEDINIIFKDLGIKTDFLSFNSELDRKELQQQSLYKLWHLLYSYESDNSATGNESLIRKISELCGMPEDYAKILANIVFESDYSSLSAKAIGKILPHLKDGLQYDVACEYAGYRHSKSSLTKEELENKKLKDRLEILPKNSLRNPVVEKILNQMVNVVNEVIDTYGKPDEIRIEIARELKKSAKEREEMTQQINKATNAHKAYKDILEKEFGLTNVSRNDIIRYKLYLELEDNGYKTLYSNTYIPREKLFSKEFDIEHIIPQAKLFDDSFSNKTIEKRSVNIEKSNMTALDYVASKDANSLSEYKLRVEKLHKSGQISKTKYNKLLMSEAEIPSGFINRDLRDTQYIAKKAREMLNELVKFVVPTTGTITARLREDWQLIDIMQELNWDKYDQQGLTMFYNDKDGRQIGRIIDWSKRNDHRHHAMDALTVAFTKHSFIQYLNNLNARVQKGIDEYFDLDMVELSDLPKEERSATIYAIEKKYLHRDKNGKLRFNPPIPLNEFRAEAKNHLENILISIKAKNKVVTQNTNITKKLSGKNKKTQLTPRGQLHLDTVYGSYQKPIIKEEQINGSFDESKIKTVTNNSFREALLKRLQEFDNDPKKAFTGKNSPSNNPIFVDKEKTLQIPNKVKTLTFETEYTIRKAIDPDLRIDKVVDTGIKEILEKRLAEFDNDPKKAFVNLDENPIYLNKEKGITIKRVSIKGISNAIALRDKRDKDGNFILNENGEKQAIDFVNTGNNHHVAIYKKPKLNRKGEVQLDDKGEQVYELEEVVVSFFEAVTRVNLGQPIIDKEYKQDEGWQFLFTMKQNEYFVFPNEKTGFNPNDIDLLNPENYNIISPNLFRVQKISTKNYMFRHHLETNVNETKELRDITWKNIHSTQNLVNIIKVRVNHIGQIEAVGEY

SEQ ID NO: 3365 - protein, 1493 aa, unidentified
  REGION 1..1493: note = Description of Unknown: Cas Enzyme sequence
MKKILGLDLGTNSIGWALVDNNVEGEGNIIGLGSRIIPMTQDVLGDFEKGNSISQTAKRTGYRGVRRLRERHLQRRERLHRVLNILKFLPKHYSEKIDFNIKFGKFLPGTETKLSYNESNDFIFKTSFKEMLKDFEKSQPELISNQKKVPYDWTIYYLRQKALSAKIEKEELSWVLLHFNQKRGYYQLRGEDEDLNQNKLVEFHSLKIVEVKADEPIKSKTEIWYSLILENGWIYRRSSKIPLYDWKNKTKNFIVTTDLNEDKTVKTDKDGKEKRSFRAPGDDDWTLLKKKTETEIEKSHNTVGQFIYNSLLQNPNQKVKGKLIRTIERKFYKEELFLILQKQVEFHPELKNVDLYNECINALYIHNEGHKSNLSKKNFVNLFLEDILFYQRPLKSKKSLISNCPFENRTYFFEGAKKSEPIKCISKSHPLYQEFRLWQWIQNLKIYTLSEDSNVTSEFLTSEDDYINLFDFLNEKKEIKQETLLKHFKINAKKYRWNFVQDKAYPCNETHFMIKNRLEKLVELPANFLTVEIEEKLWHIIYSVNDKIEYEKALKTFAKNNKLDEDSFFESFKKFPPFANDYGAYSAKAIKKLLPLMRMGKYWNFSAIDKNTKIRIENILTGEFDENIKNRVREKAIRLNNESDFKGLMLWLASYIVYNRHSESENNSKWNSVNDLENYLEQFKQHSLRNPIVEQVVTETLRVVKDIWNKYGNGEKDFFSEIHIELGREMKNPADKRKQIAESNTLNENTNLRIKALLLEMLNDSKVENVRPYSPIQQEILKIYEEGVLNSDIDIPDEIEKISKLAQPNTSDLVRYKLWLEQKYRSPYTGAIIPLNKLFTSAFEIEHIIPQSRFFDDSFSNKVICETAVNKEKTNQTGFEFIKNHHGQIIEIGSGQKTRIFTEDEYQDFIKQHYSKNRSKRNKLLMEDIPEKMIERQMNDTRYISKFIMQLLSNIVREDSSKDDGVNSINLLANNGQTTSILKNDWGLNDIWNDLILPRFERLNEITSSEKFTTYNEKFQKYLPCVPLELQKGFQKKRIDHRHHAMDALVIACATRNHINYLNNQNALDKNKNKVQKQSAREDLRTILCFKKFNYGSEKNYQWIFKQPWKTFAADAKYKLETAVVSFKQNVRVINKSKNKYEKFVKRNGIWIKEKVYQTKGESWAIRKSMHKDTVAGHVNLRNCKTVNLSNAIDNWELLVDKNLKTKIKKLINDGFDKKKIIKFFSELEFKWMNVDITKPEQYYFSDEKEVLVASRVNLDSSFNSLKISSITDTGIQKILLKYLEIKQNNPEIAFSQEGIEEMNQNLSNLNNGKPHQPILKVRTFEPKGNKFCIGQKGNKKDKFVEAAKGTNLFFAIYNDENGKRSYDTIPLNIVIERQKQGLSPCPEVNDKGNSIAFYLSPNDLVYIAKSEEIENPKIIDFQNLKKEQFGRIYKVVSFSGNRLYGISYNVAKSIVDKVEFTMMNKLEFSIDKYSIKQFCLKLKVDRLGNISI

SEQ ID NO: 3366 - protein, 1780 aa, unidentified
  REGION 1..1780: note = Description of Unknown: Cas Enzyme sequence
MGKILGLDLGTNSIGWALVEIDHENKMVKILGLGSRILSMDAGEISTFESGGKLKSAASQKTTDKTARKLHERFLLRRDRLHCVLNLLKTLPTHYQVSIDFENEKGYRSGKFKKGTEVKLAYATDTNGKPRFLFMDSYNEMAKEFKAKNPLLFYKKRNGKETKIPYDWTLYYLRKKALKQEISKEELAWITLSFNQKRGYEKTIGQDEKEQKDGELSETFVGIVRSVTEVGEKDGLKLFEIVLIDEKNETELYRYNEESLFQITNKGDLKEFEIVSKFDEDGNINEKNTIYTVKEIRKIKVSDVKYTDEKKNENFVFEIYLQTGWIKKNQQSKYLPKWKDTERDFIIKTNYNKDGDRILKGTDEGRNINAPKEEDWTLLKLKTETELTSFNTKNRTVGIASFVYNALLEKPQQKIKGDLITVIERKYYRDELESIFECQRQFHPELEDPELYKRAINLLYPHNENHKRKLEGFLSKQPFSKLLTDDVILYQRDLKSKKSLIADCVYEKENYKRIDKKTGQEYHQPLKAIHKANPLYQEFRIWQFIKRLKIIQHEEVENDEILLNQDKSVLLLTNEIKEKLFEFLNNREHITQSVLLKHLGLSDKEYKWNYESDHKEPCNETRYNFILRLKRIKGFNWKAFLSPENEYQLWHFFYSVKKQDEFKTGINTLFEKLLVKSNISLELKADIVKNFISFGGYNNDYGTYSEKALKKILPFLRIGKYWEESKDKAISILGKIEHSVKVKVLTKENIQGEIIDFQGLWISSACYLVYNRYSEVGDVKYWTTPYDIERYLQNEFKQHSLNNPVVEKVLIETLQLVKDIWKTFAEQEGKDKNGNVVYKKLFDRINIELGREMKKNAKERKRESDQNNENKKTNERIIELLKELKRENNDVRPLSPFQQEKLKILEDDLLSSVEYDKDATVYKFSNNQYAITKKEIKDITTKDIAKVSKSDFERYKLWLDQRYQSPYTGKVIKLSDLFNREKYEIEHVFPQERITLNAFYNKVICETEVNKAKKAFTGYQFILNSQGTRKIKCSAHGNEEVTILSPEAYQKLVKDNFTDKKKQEILLSKDIPDEFTSSQLNNARYISKMAMKLLSNIVREEDEDSFRSKNVLPINGVITTKLKQDWQLNDAWNELIQPRFKRLNEITKSNLFGDYEKINGHEVFINRVPEELNNDFDKKRIDHRHHAMDALVIALATESHVNYLNNISAQNSKDKKFKERFDIKEKFMTSKKNDAGDKSRFFLPPAQFKQEGKVVEYSYGFTDNNSNVFKEIVLEALQNTIVSFKQTSRVIKQRTNKYQKWNEEKGKFELISQENLNKKEKYNIRLTLHKATYYGKVKLKQKTSNVLLIDAIGQVDSIVDNNLKEHIINLKEQKFQSHEIRNQLEKNHPKVEVFDDYVATRYENTLASLGVIASDKIITFIESITDIGIQKILLKHLAGYNSVEKSIKEAIQYVDIIANEEHQKVIKALLEKNFPFEEIEIDNKSISKTEVFTKGIELSIDEGKNLILNPQFAFSFEGINELNKNIKALNGGKEHKPIYKVRMFTPLGKKFPVSEDKEKGNKYVITAADSNIFCGFYTNEMGEREFFVPTLRETAENLKQGSNPCPEIIFKDNAKYELLFILSPNDLVYLPTKDEIQTPSIVNYQKLNKEQKNRIYKFTDGNSQGVMNFAPYCVATPLIDVSKADYKKLQLGKLIFTEVSKSGKDSKTKELVNEIGLGSTQSKNQNSLDSEQIKSICWKLKVDRLGNIKLATQIEVHENKTPGHPAKMMQKGDIEPANEH

SEQ ID NO: 3367 - protein, 908 aa, unidentified
  REGION 1..908: note = Description of Unknown: Cas Enzyme sequence
VAPLSQSEKEKLFSKLQTVESLTSKETLEILFADKAKKYSLSNYKEKIEGNKTIAKIYKAFDGFLPDENLYELWHLLYSWEGENEDLVKKLTEKYGYPADIAKRLSGITFLDDYGSLSSKAIKKIMPYLKEGKLYNEACELAGYLFSRDSLTSEQIANKLLKDKLDILPKNSLRNPVVEKIFNQMAHVVNGIIDAYGKPDEVRIELARDLKKSAKEKEKITSAIGKATEENERIRKILQSEEFDVKNPGRNDVIRYKLYRELACNGYRTLYSDTYISPVKLFSGEFDVDHIIPQSRLFDDSFSNKTLEAKSINIEKGNRTAYDFVLEKYGDGGLEQYERKIKDLFDSEKISRAKYNKLRTQEKNIPGGFIDRDIRDTQYVTKLTKTMLGDLVRSVVPTTGSITDRLRKDWQLIDVMKELNWDKYHKLGLTEVIEKKDYDGNPVKIRTIKDWTKRNDHRHHAMDALTVAFTKQNIIQYLNNLNAKSNKNSSIYGIEKNELYRNDKDNLLFKPPFALDEFRNEAKRHLENILISIKAKNKIVTQNTNTTKKKNGVNRKMQQTPRGQLHLETIYGSQKQYVVKEEPVNAKFDEVKIFTVSRPAYREALLKRLRENDNDPKKAFAGKHSLAKNPIYLDELHTKQVPEKVKTVSLETVYTIRKDVSPELKIDKVIDARIRRRLEKRLSEFNGDAKKAFTNLDENPIWLNEEKGIAVRKVTVSGISNAEYLRNKCDKDGNLILDKDGRKQPVDFVNTGNNHHVAVYRDADGSLQENVVSFFEAVKRANMGLPVIDKEYRQNEGWQFLFTMKQNEYFVFPNETTGFDPKKIDLMNQENNHLISPNLFRVQKFSKLSYGNSVVRDYVFRHHLETAVKEAKELNGIAYKKIKSLPIFNDIVKVRINHIGQIVSVGEY

SEQ ID NO: 3368 - protein, 215 aa, unidentified
  REGION 1..215: note = Description of Unknown: Cas Enzyme sequence
VKKILGLDLGTNSIGWALVNEAENDEEKSSIIRLGVRVNPLTVDELTNFEKGKSITTNAERTLKRSMRRNLQRYKLRRENLIKILKESGFISDESILSESGNKTTFETCRLRASAAAEKISLEQFARVLLMINKKRGYKSSRKAANKDEDGVLIDGMEAAKKLYNENLTPGQLCLQLYRAAKNTFQISTVRIYRRSLIKFGQSKKNFILKFSPMN

SEQ ID NO: 3369 - protein, 1565 aa, unidentified
  REGION 1..1565: note = Description of Unknown: Cas Enzyme sequence
MILVAAVNILYINPKNKETYVKRILGLDLGTNSIGWGLIELCVGTEIGKKFLGTGCVLDSGIRIIPMGQDVLGKFDSGTSISKTADRTKYRSARRLRERYHLRRERLHRVLNTLRFLPEHYASQIDFEKHFGQFMDNKEPKLAYDSNGHFIFEKSFEEMLNDFRSHQPLLLVNKDGKRALVPHDWTIYYLRKKALTHKIEKEELAWIILNFNQKRGYYQLRGEEEVSNKLVEFCSLKIVDVVADEKPNRKGDVWYSLRLENGWIYKRSSKVPLFDWKDKVRDFIVTTDLNDDGSVKIDKDGYEKHSFRAPNDDDWTLLKKKTETDIGNSQKTVGTYIYDALLRNPSQKIRGKLVRTIERRFYKDELIAILNKQVKLQPELFTEDLYNDCIRELYRSNNAHQHILSMRDFVHLFVNDIIFYQRPLRSQKSSIGDCSLEYRYYKKNKIDADGNPIKYEYEKDVDGKDAKVKKYLKAIPKSNPYYQEFRVWQWLRNLKIYKRDDDIDVTEQFIKNTNDWANLFDFLMDQKEVNHVAINKYLLEQYYFSNIEKEMKELYPKLNPEKLKEKIDSALEKKIKPELAKYRWNYVFDDSKEKEEDKSKKYPCNETRTQIKTRLAKVKNVPDNFFTFEIEHKLWHIIYSVTDKVEFEKALKTCAKKHGLDVSSFVESFKSFPPFKSEYGSFSERAIRNLLPLMRLGRYWQEKDIADSVKNKAESIKQRLQEINHDENELEKVSDDYISKQVLKSFLNVTDFTQGLKLHQASYLVYGRHSESGSVEKWNSVNDIERYLGEFKQHSLRNPIVEQIITETLRVVRDIWKQYGNGVQNFFDEIHIELGREMKNTTEERKRLTNIVTENEDTNLRIKALIVELKENSDGKLLVENVRPYSPIQQETLKIYEEFAVSNIEEDDPEKEFIQKVSKTAQPSGPELQRYKLWLEQKYRSPYTGQTIPLGKLFTTEYEIEHVIPQSRYFDDSLNNKVICEAAVNRLKDRQLGFEFIKNHHGEKVECGQGWVVEIFSEEGYKDFVKKHYMRNNTKRNNLLLEDIPDRMINRQLNDTRYISRYISQLLSNIVRADSDDDVNSKNLVVGNGKITSTLKQDWGLNDVWNELILPRFERMNELTETDNFTSKNQQGHTIPIIPFELSKGFQKKRIDHRHHAMDALIVACMTREHVQYLNNENAKSQKYHIQKALARKLRIFETVVIPERKKDETGVWRIKGGEQNSKKVEVQKEFLKPWDNFTTDIKTALKKIVASFKQNLRIINKTTNMYEKFKNGKKVKTKQNKGINWAIRKPLHKDFVFGKVDLQQVKIPKGKIAIAIRRSLDTTFDSKKIESITDAGIQKILRKYLAVKNNDPQLAFSPEGIEEMNNNICVYNDGKYHKPIYKVRTFEIGSRFSLGSDGNKKNKYVETADGTNLFFAVYVDKNGNRNYETIPLRVVINRLKQGLSAVPETNEAGHSLLFHLSPNDLVYVPLGNKSEFKEPEPDRIYKLTDSSDAKAKFVPANVANVIFNYNNNTQKKMNINYSIQNEFGIGSPESKSQNAITGEQIKKVCLKLKVDRLGKIELVK

SEQ ID NO: 3370 - protein, 1658 aa, unidentified
  REGION 1..1658: note = Description of Unknown: Cas Enzyme sequence
MKKILGLDLGTNSIGWALVEIDHENKIVKILGIGSRILTMDAAEIAKFESGTKLESTAAKRTTQRSPRKLNERYLLRRDRLHCVLNLLNALPEHYRLSIEFENQKGKRSGKFKKDTEEKLAYFKDQNGKFQFLFEEAYLKMENEFRSKYPEINDKKTKLPYDWTLYYLRHKAVTDKNFELTKEQLAWITLSFNQKRGYEKVVGQDEKAQKEGELTDTFVGKVKNVKKLENEDAYEIILVDNNNETIQLFKYKEESNISITEIGDLKEVEIISKYDDEGSIDSNKTEYIINEVREFKIVDVRNTGQKRKENFVFEVELETGWIKEQQSKYLPKWKDTKRDFIIKTKYDENGIRIPKGADKGRNINIPKEEDWTLMKLKTETSLTSFNAKHNTKGIASFVYYNLLQNPNQKIKGDLITVIEREYYREELDVIYRNQEKFHPELKNINLYEQAIQLLYTNNNSHQKTIKELDFNHLIKEDILMYQRDLKSKKSLIANCVYEKENFERKDEKTSKIFKNSLKAIHKANPIYQEFRLWQFVKRLKIIKKSDTSGNVNVDVTSHLLSNEIKEELFDYLNDKEFATEKDILGFVNKKHKDLVVNADNYKWNFTSEKEPCNTTRYKFILLSKRVLGAKYKEFLTRENEYLLWHFFYSVKKKDEFNKGLRKVIIKLLEKSKFPQDYLNDLIKSFSSFGGYANDYGTYSEKAIKKLLPFLRLGKYWNEKEVETILSKANQDVKQKVLDKEEINGELKDFQGLWVSSACYLVYGRYSEVGEVQLWKSPTDIENYLKNEFKQHSLNNPVVEKVLVETLHIVKDIWNHYGKGVESYFDNIHIELGREMKKNNKQKEKDDKNNKENRKANERIVELIKELKRSNSSLQEKSPFQQEKLRILEDGLLSSIEFDKDTTEYQLTNGKITKKEIKEITSKEISKISRSDFERYKLWLDQRYQSPYTGQFIKLSDLFDRKKYEIEHIFPQERITLNAMYNKVICESEVNKDKRAATGYGYVANAKCKEIFCAAHNKKVKVLSITQYEKLVNDNFIGKKKEILLSKDIPSEFTNSQLNNSQYISKMAMKLLSNIVRKKEEDTYRSKSVLATNGTITTTLKRHWQLNDTWNEIISPRFKRLNELTNSNLFGDYREINGHQVFINTVPDGTNNNFDPKRIDHRHHALDALIIALTSENHVQYLNNISSQNENEEQKLNTRKGLKNQLTNSRKGANEEKEWYFLPPAQIKTTLGIIEYEYQFRETKSEVFKEIAQKALEASIASFKQKNKVIRQRWNKYLKPIDGKIELVKQEGLIETKNYNVRKRLHEDTYYGKVKLQCKMITIAIEKAINEQFDLVDKNLANRIESLKLNDGKSNSEIIEEIGKKHSKIKVYDKFVATRFGNNLDTFALIPSDKIIKAIESISATSIQRILINHLGNYKTLINDKIIYDTENAFSTDGIKDLNNNIVKLNNGKFHHPIFKVRTIDAMGTKFPVSEEGQKSTKYVVTAAGSNAFCGFYQKGKERKFYIPTLRESVQSLKDGFSPCPASHPDDSDFKLIFFLNPSDLVYVPTEEEREVPNLVDFTNLSKEQINRIYKFRDGSINEKGSVQINFMPSNWASLIFKASKEGEKISLVTNQELKGEVTLTSDKDKSQNTIDDGVQIRSFCWKLKVDRIGNISKA

SEQ ID NO: 3371 - protein, 1513 aa, unidentified
  REGION 1..1513: note = Description of Unknown: Cas Enzyme sequence
MKKILGLDLGTNSIGWMLIEQDFEAKIGKILGDGVRVIPMSQEVLDNFGGGTPSKSQTAVRTGFRGTRRLRERHLLRRERLHRVLNILGFLPKHYASQIDFEKRLGQFLDETEPKIAWKEIQNEQKNKNDFEFIFQKSFYEMVDDFKANEQNTKIPYDWTIYYLRKKALIKKIEKEELAWIILNFNQKRGYYQLRGEEEEENPNKLVEFHSLKIIDVVADEKPNTKGDTWYSLHLENGWIYRRSSKMSLFDWNGKVRDFIVTTDLNDDGTIKTDKDGYEKRSFRAPSEDDWTLLKKKTEANIEHSQKNVGTYIYETLLENPSQKIRGKLVRTIERKFYKEELIAILKKQIELQPELFTEDLYNDCIRELYRNNEAHQLALSKRNFEHLFVNDIIFYQRPLKSQKSSIGNCTLEYRKHKDKDGNEIKEYLKAIPKSNPLYQEFRLWQWLFNLKIYKRDDDTDVTEQFITNITDKEKLFDFLNNRKEIDQKALLKYFKLTEKTYRWNFVEDKNYPCNETGMQIRTRLAKVENVPADFLTSEIEQKLWHIIYSVTDKNEFEKGLKTFAVKHNLDGNSFVENFKKFPPFKSEYGSFSEKAIKKLLLLMRLGKYWNWELIDTKTRDRISKIITGEYDEAIKNQVRNKAIDLKSENDFQGLQLWLAQYIVYDTPPANKWNSVADLEKYLEEFKQHSLRNPIVEQVITETLRVVRDIWKEYGVFSEIHIELGREMKHTTEERKRLTNIVTENENTNLRIKALIMELKGYPDIKDVRPYSPIQQEKLKIYEEYAISNIEENDVEKEFIQKISKVAQPSKSELQRYKLWLEQKYCSPYTGQAIPLGKLFTEEYQVEHIIPQSRYFDDSFSNKVICEAAVNQLKDKQLGLEFIKNHHGEKIDCGSGKKIEISSEDAYRYFVKEHYAKNYAKRNKLLLEEIPEKMIERQMNDTRSISKLVSQLLSNIVREDKNDDGVNSKNLIAGNGKITTILKRDWGLNEVWNALILPRFKRMNELTGTEDFTSKNQEGHIIPSIPLELSKGFQKKRIDHRHHAMDALVIACATRDHINLLNNQSAKSENSRYDLQHKLRNTEKKTYFDKNENKQVTRDVFTEFKKPWDKFTDEARKELEKIVVSFKQNLRVVSKTTNKYESYKDENGNIRVGKNVKPEKGILKQKGANLAIRKSLHTPMPYGKKTYEFDILRIADFVGKRKFIIDDNIRNKVEVVFKKCNEKITDAQKLLRKSPIQDDDGNPIIVTAFKINTEKFRQRQPISELSNRGIGGIKTYDDAIKFINKVADFKLRIDLLNHLKNNKNDIDLAFSAEGIERFNINRKIPVYRLPIVESGSSRFRVGNTIGTRHKWVEADTGTNLFFAIYVDKDGNRSYETIQLNKIIDKLKQKLPAVPEVNENGCKLLFYLNPNDLVYVPKNDEIENKKIEIDRNRIYRFTDSSGSTANFVPANIAKVIFNYSKDKQKRIDYKIQNEIGLGSLRSKNENTITGEQQIKSVCLKLKVDRLGNVKLNGE

SEQ ID NO: 3372 - protein, 1417 aa, unidentified
  REGION 1..1417: note = Description of Unknown: Cas Enzyme sequence
MDKILGLDPGSNSLGTTVRDIREGDLQEQLIYYSVDTFESALESGGQSKAATRSSDKRKRRQYDTRRQRLWKTLDLLIKHHLCPLAQEELDAWRFYDKKRNYFRKYPVGSAAFSRWIKLDFDGDGKPDFETPFELRHQLATVPLDFTVEANRYMLGRAIYHIAQHRGFRSSKKGLTAPSDELDGEVILAEDITVQLAASEEKKKGKIDQYMKRMGLETVGSAYHFLLTNGEVDEPTGYHPIRIRASEYQVVRQQLKDEIRKIFDKQNLSSDQDLLTRLLSEKEGKATLFFNHPPRIAKGSIGKCTLETNKQRCLESHPEFEKFRAWQFINNIRVRDAFGKMTPLPLNLRERLYREELAGHVNDFSFKTLRKVIEQELQQEFFYDRDPKVRTISYADDFTVPACVVTKRLKELFGENWETFEQSMSKGRKGRNKNVPAHQIIYSAMDVWHQCLSIDSTEELEEYAQDTLGWTDEDRLKALKRLWSAVTTNRCMLSHKALKNINRFLTRGLMYSDAVLFAKVPDIVGEERWKAMENRIWEYAASGYSSLKDSIAKRATISSITNRLIADFKTQTEENRNKDKQLGFEKTLNEDDHRKVLEFIVQHFGKQTWNNLPIAEQHDIESAVCAEYEVFFQSPQHDYQKMPRLGNELAQILSERFFPEITADDFKKRLYHPSQIAVFQPIEIPGHGVRLGSPSLGNIKNPVYMRAMHIIRRKINALLDAGIIDVENTRVVIELPREMNYANQRKAYKDYQDREKEEHDIVRAILEKKYASISGEDVDKVRLMLHSNPHYIEQTPLPKCTRKEAEKQYRTWIGEGGICYYTGIPIHLEDLFPQEGSEPHVDIEHTIPRSILPDNTMMNQTLCFSHYNRFEKGNTLPALLPEFEKLILPRLQPIAERIERIKDVISVCKGRSKNAQEKQWKDYWIAQRHVWEMDLEYWQGKYDRFLTKEVTDGFRRSQLTDTAIIAKYAAHYLKSIFSRVDIQKGRVTAMFRQILGFQNKNEEKDRTNHYHHAIDSTVLTLIPVAEQRDRMIELFYKMDEAKDGQEYEALARQMDREIRNCHLARSAADMKCLAAGIEKTITESVLVSRYAKDRTLKNVRKRVKTGQKSKITDGKRIPLYSGGDSIRLDLNKDSTYGAILGNEGKIVLVKRESLLKVIEKGKIDDIVDSKVKSTVLHAIAKGAQEGLKPLEVAKQGIWMSGKRADKNGKPIQPIRHVRCKTSNVGFSKAVPVSEHLHHAPGAEHKFYKYAVSGGNPLAIIYERINRKGQVDRRVRFITAFELAQQASQIRSKGKKSIQSVDDIVEETGWRTTKIGNSEYLIWNILKPGYRFLLPKNADENLKGLTQQELLERLYVIKNFNGGKGTTCNFEFTHHASALAEPKPLSFTQLLTHKVLFEHIDFEIEANIMEREHLFKWK

SEQ ID NO: 3373 - protein, 1403 aa, unidentified
  REGION 1..1403: note = Description of Unknown: Cas Enzyme sequence
MKRILGLDLGTSSIGWAYVLEAQDDNEISKIEKLGVRVNPLTTDEQLNFEKGKPITTNAGRTLARSARRNLQRFKLRRENLIEVLKREKWIDDKSLLAENGNKSTFETYGLRAAAASKAIKLEELARVLLMINKKRGYKSSRKVNKEDDGQLVDGMEVAKKLYHENLTPGEFVYRLLKEGKKKLPDFYRSDLQRELDLIWDFQYKYYPDLLTQDLKEELRGKGLKVTSAIFWSKYKFNTAENKGTREEKKIQAYQWRKDGLTKQLTQEEVAYVIAEINGQLANSSGYLGAISDRSKELYFNKQTVGQFLFNQLQQNTHARLKNQVFYRQDYLDEFEKIWSVQCQFHQSLNEQLKEEIRDIIIFYQRKLKSQKGLISFCEFEQREIVINGKNKVVGLRVAPKSSPIFQEFKIWQQLNNVKLRNKLTKEVYNLAEEQKRSLFETLNLKGKLSAYQVLNLIEGKPKEWELNYTELEGNNTNFALYNAYLDILDIEGYDVRSELKIKLNKDEITLSDLDTPVSEIKDMIRRIFQHLGIDTAILDFDAQMQGDDFEKQLSYQLWHLLYSYEEDDSKTGMDRLYNQLSLKFGFSLDQAKIVGKIALQNDYGNLSTKAIRQIYPYIQDVEYSVACKQAGYNHSKSSLTKEQLANRVLKDHLDILPKNSLRNPVVEKILNQMVNVVNTLIDTENDKLIREGKNADFRFDEIRIELARELKKNAKEREELTKAINTSKVEHEKIIKILQTEDGIKNPTRNDIIRFKLYQELKNNGYKNLYTNEYIQRKDLFTNVYDIDHIIPQSRLFDDSFSNKVLVPRNINIEKGNQTAFDYVHAKLGEDGIEAYEARVERLFSLKEEGVSRSKYKKLLMRGSEIGEGFIERDLRDSQYIAKKAKAMLFEIAPSVISTSGSVTDRLREDWGLVSVMKELNLPKFKAVGLTEYLETKDGNRKEVIKDWSKRNDHRHHAMDALTVAFTKHSHIHYLNHLNARKNEKSEFFSTIKAIEIKETYVERDDLGNRKRLFKEPIPHFRSIAKEHLESVLVSHKAKNKVVTKNRNKIDGRKEAQEVLTPRGQLHKETIYGKILQYASKEEKISAKFDAATIAMVSNPRYRSTLLDRLIACGNDPKKAFTGKNSPSKSPIYFDQQKQLAVPEKVKLVWLEEDYTIRKEISPDLKIEKVIDQGVKRILEQRLLEYGGDTKKAFADLDNNPIWLNEEKGIAIKRVTISGVKNAEALHTKKDHLGQVQKDKDGKPMPVDFVSTGNNHHVAIYEDENGALQERIVSFYEAVARVNNGFPIIDKHYNQHLGWKFLFSMKQNEMFLFPSEEFDPKQINLLDRSNYKLISKNLFRVQKFGELSKSGFWFRHHLETSVDVNKSLRSISYFDFYSKDFMKNIVKVRINHLGEIIHIGEY

SEQ ID NO: 3374 - protein, 1395 aa, unidentified
  REGION 1..1395: note = Description of Unknown: Cas Enzyme sequence
MKRILGLDLGVGSIGWALVNEAENKDEKSSIIKIGVRVNPLTVDEQTNFEAGKTITTNANRTLKRTMRRNLQRFKLRRADLIKVLKEYHFIKDDTLLNETGNRTTFETYHFRAKAASEEISLEQFARVLLMINKKRGYKSNRKVNNSKEESGQLIDGMSIAKILYEDDITPGEYMLKSIRNNTKKDISFYRSDLQTELNRIWNFQQQFHPEILTENFKNQITGKSQSATSRLFGGIYQISTAENKGKEKVMQSYKWRVDGLTKELSKEILAYVISNVNGEISNSSGYLGAISDRSKRLIINKQTVGQYLMDELDKNANASLTNQVFYRQDYLDEFEKIWETQAQFHSELTPELKREIRDIIIFYQRNLRSQKGLVSFCEFESRKKELTIDGKKKMKIIGYKVCPKSSPVFQEFKIWQTLNNIKVLGKGSSKKSKKTTDDLPLFAGQTVESNERYLNLEEKKILFSELNIKKKMTKDEILKLLFTNYKELDLNFKEIEGNDTQAELYNAYQKIIETNGHEEHDFTKMPSSEIMELVSSVFNTLGIETKILHLDFSLNDVDFQKQPAYKLWHLLYSFIGDNSRTGNEKLIDKISDSFHMDPEYAKIIAGITFKPDYGNLSTKAIRKILPFMKNGEEYSVACEHAGYRHSKNSLTKDEIEKKTLKDHLDLLPRNSLRNPVVEKILNQMINVVNAIISTYGKPDEIRVELARELKKNAKERELMSKNINASKAEYEQYRELLHRDFGILNVSKNDILRYRLYQELKLNDYKTLYSDQYIPQEKLFSKEIDIEHIIPQAKLFDDSYSNKTLEYKSVNIEKADMTAIDFVSSKYGESGLKRYEQHVNFLFANQAINKTKKDKLLTIEDKIPKDFIERDLRDSQYIAIIAKEILEELVRFVVPTTGSITDRLREDWQLIDVMQELNWDKYDKLGLTEIIEDKDGRRIRRIKDWTKRNDHRHHAMDALTIAFTKRSIIQYLNNLNARSNKSSSIYGIEQNELYRDNHGKLRFVPPMPLDEFRNEAKCQLMNILVSIKAKNKVMTQNTNITKTKKGTIKKIQLTPRGQLHNETIYGQIKQYVTKLEKIGSAFDAEKIATVTLRSYQEALLNRLKEYDNDPKKAFTGKNSLDKKPIFLNESHTQKIPEKVKTVTLEPVYTIRKEIGPDLKVEKVVDIHIRQILRNRLEENGNDSHKAFSNLAENPIWLNKEKGIAIKRVKITGVSNAVALRDKRDQLGEPLLDNAGNKQPVDYVSTSNNHHVAIFKDANGDIQEHIISFYEATIRESLRLPIIDREYKNEEGWQFLFSMKQNEYFIFPNKETGFDPKDIDLLNPLNFAIISPNLYRVQKFTTKDYFFRHHLETTVEDKSELRGIAFKRINSLNALKDIVKVRVNHIGQIVFVGEY

SEQ ID NO: 3375 - protein, 1171 aa, unidentified
  REGION 1..1171: note = Description of Unknown: Cas Enzyme sequence
MKKILGLDLGVASIGWAMIERDDDNNGRIINTGVRVIPTSGDGDAFKNFQEGKPASFAAERTQKRGARRNLARWRLRRDQLLALLKKHNMYDEDLRHLPSPLAIWELRAKAAKEKISLEELGRVLLHLNQKRGFKSNRKSNTADESATEWKKQLNSLTTALHEKNQTIGQFIFSKLEANEELRLGKKKLSEQEAVKRLFNAKNMTFLRKDHQDEFERIWETQAKFHSSLDDQLKLEIGEYTVYYQRRLKSAKHLISKCRYEKHHRAISRSSPIFQYYRSLEKVVNLRATNAYGEDIPISNESRQILLNALDLKGPKIELDAKGNLTGSRIKKLLGGLGKEIDLNFDFIEGAKTKHSIYKALEKAEIDPSSWMHFDYKAKEIDQQRLYQLYHALYSIEDEMDLKRTLCERFDFDLHTADILMNVGLENDYGSLSSRAMRKLIPELEKFPENVRKAYEAVGYDMSDSETLEDRENRVLEDVLKHIPRNELRNPVVEKVLNQLISLVNEILKHPELGRPDEIRVELARELKSSAKGRKSAEERNRKNRKRNDEIRELLKSEFGIKKPSRNDLRRYKCWEEQQHYCLYSGETIPRNKLFVEAEYDLDHIIPRARMFNDSMQNVVLAKRSENEQKGNKTAEDYMCSKGKEAYEAYLVKVGKLYDRGSSKDPGGISKTKRDFLRMKQEEIPTDFIDRQLRESQYIVKEATSRLKAVCRNVTTTSGTITDLLKHQWGLDQLFQRMQVPKYRAWGMTYIEEEHEQLKGQERIKDWSKRKDHRHHALDAITIACTSQGMISQLNKLNVLFDGHHETLKNQSLRRFDQPWPNFINEVEEALEGIFVSFRNRKRLSTTRKNKIKVKGGIVEHKTINPRGALHKETVYGNRLLKEGERHKLSKKTQRTDLELIVDPRVKAYLVQHFDAHGQDATKAFGKLAKEPLLFEGKELKEVEMFTSAYTYKVALGPDFKKSDQIVDPVVRERVEAHLKRFGDNPKKAFSDLDNNPVWYVENEKPIRKVTIKQKANELEALRTKEDGSKKDFVFTRNNHHISIFQSPDGKYYDEVTSYWQAFELKKQGLPVFTELNEHGDQALLHLMINDMVLIDLPENEIDLETREGRKRFSDCLYRVQKLSKNNVMFRHHLETDINNPNAEWNCQNMGALAKRIVKIDLSILGLGKAI

SEQ ID NO: 3376 - protein, 398 aa, unidentified
  REGION 1..398: note = Description of Unknown: Cas Enzyme sequence
MGRILGLDLGTNSVGWAVVEGDINSKGQVTQYHSVFDSGVRIFPEGLEPDTIGQGEKEQSRNAKRREFRQKRRQFYRKRLRKIKLLEILIEKDMCPLTIDELDQWKRYHKNESSSKREFPSSKVFTEWLRLNPYELRARALKEDISLHELGRILYHFIQRRGFVSSRKEQGSDTGVLYKGKDDKVGISETQEKMDDKLLGEYLYSIIPAKGEPYKEYRDEDGKIIRARSRYTLRDMYIEELYHIWQRQAEHLNLNDQQVLHKKVRVLNGSLSSKRNLEKILSLEKKYAKENISIKSNVVTSVNELPLFNFLAGEIWMEDGAIKHKNTNESVLFWQRPLRSQKHLLAKCRYEHYITYLDGKRIETGKSPCYQSHPEFELFRAYQLINNIEYGRKEKQNT

SEQ ID NO: 3377 - protein, 1103 aa, unidentified
  REGION 1..1103: note = Description of Unknown: Cas Enzyme sequence
VLDLINSRKSNFKFKEIPKKLKLTSERFNYDDDFSIPCNKTIANLKPLFDKELWEEHYHDIWHCFHFYDDNEKLFEKLKKDYSCKCESPELIKKIHLEADYGSLSLKAIRNINPFLAKGYSLSLAVVLGGVKNVFGKEKWLLFSKEHTLIENTIKHFMKEKNAEGELIEKIKAFLFSGSKEIDFGFEQDDKRFKKLYHPSVDLKSNIGELKDKLPPIPNLRNPLVQRALSEMRHVVNALIKEYGRMDIIKVEMGRDLKNNSKLRQEMTFIIRDNQKKNDAAREKLSEFGLAHTRQNIRKYLLYKEIEEHMSPVTCPYTGKTIRINDVLGTGNLFQIEHINPYSVSLDDSFGNITLCESNFNREKGEKTPYEFYKSNPDPLLWGGAKSWDDIERRAFALLPYNKAKRFTSKKQLDHEEFISRQLNDTRYISKEAKNLLMEICDNVQILPGRLTADLRRLWGLNNVLQAAENLTDADLDIEVHDRYKIPHWAIVRDDGSFVSVHKKQNDKPYVSRGYCIFPGQINKEIFTSSSSHDIAAPGEADGKYWCKATVNSTPGFYQYFNDKAISSPRTIVVKGSVRNEKFIYEKIGANIDASGKPNGKYWATFDVLKINFIDKERPKPKKGQLAIWGKIKDGYFSSYNYSCPTKHEDADIWAVLDLDISDISLTRVLADKPVLSSNQILLSGSTDKDGSWVSDENPDQAYATDLPRGKYWAVFDSYMDDIDFFPIENEEPKANKNEKVIEGSIWIDKQGEVRFDPKKNREDQRHHAIDALTIACTERSFLQKLSTYNAQLDERKRGERKERPEFDAPWENFRADVKKSAEAILVSYFKDNRAYMRGKKFISKNGKKHLVQISAVRGQLHKETVFGKRTPPDGRTAYHVRKSITSLASKTHVDKVVDRSIRKLIENYLQEEYGIDTSKKYTVPSNAFFKDGKYTIKLPNKNGEDVPVTKVRMREEIGNARKLKNNINQYVNPRSNHHVMIYKDKNDELKENIVSFWDVTQRLKRNESAYQLPEDGKEIITSMEINDMFLLGLPDNVNINDTHSISKYLYRVQKLSSNFYTFRHHLASTLNNSQEEARIHSMKAWESLNPQKVYINLNGSIK

SEQ ID NO: 3378 - protein, 991 aa, unidentified
  REGION 1..991: note = Description of Unknown: Cas Enzyme sequence
MSSYTLGLDIGSNSIGWALVDLGEKPSIVDMGVRVFPEGVDRDTKGLEKSKNATRREARGARRTHQRRNLRKGQLLSTLQVSGFLPKDDSELRSLFHTNPYQLRKKGLDEKLEPYEFGRVLYHLSQRRGFKSNRKSGKGKEDGVIIKGANALQTEMDSKGCHTIGEYFAGLNADEQRIRGRYTFRSMYEQEFSLLWTKQGEYYPDVLTVGLQKKIRDEIIFFQRPLKWDPETIGDCELEPGEKRCPRGDWYARRFRLLQDVNNLIVQNPDGSEDKLSGDQRKILLDELGQKEKLPFDKIRQKLGLMETQKFNAEYKIGRSGKTVESLKGDNFSWSMRSKNIFGPKKWDAIDEQEKMKLNKWLVEFEEDQLREKLRSEYGFNDEQIKALLKIVLPQGYMSFSRKAIIKLLEFMDQGAITSEAIAVAYRGGQTTGGKEDNLDELPMPEDLRNPIVNKALFEVRKVINAIIREYGKPKKIKIEMARDVQGSRRQREELHWKQEENKRRNEDARKRVIEDIGIRNPTREDIIKYNLWQECDKRCPYTGRQISQEGLFGANPEFQIEHILPYDRSLDDSFINKTLCEVHENIHVKKNQTPFEAYSHDPERYEQIKQNIKVLPWPKRQKFLEQEINLDTHINRELNDTRYICREVVGYLKQLGVNVRGTKGKITAELRHQWGLDGIFEELRTMRDDDHRRHAVDAVVVGVTENEHLRRLARSKYSVTGVSFEAPWDGFREQVREKVKHINVSHRACRKVSGKLHEETNYGPTKEKDRYVFRKKLEDLTLAMLKDIVDDVVREIVRKRLEEKGVDLAGKDKKPPREVWKDLYMKTTKSEKKVRIKKVRVYNVAKNVKGMKDRSGQVYRYVEPGSNHHIEIFEYTDAKGKVKRDGEVITMFDAVQKSQTREPVVNRYFGQSKKFIFSLAMNEMFMMDTKSGSKELYRVQKISGNKQIFFRHHTFAGELQKHKGISKCPNSLQGYKVTIDPIGRVWPAND

SEQ ID NO: 3379 - protein, 991 aa, unidentified
  REGION 1..991: note = Description of Unknown: Cas Enzyme sequence
MASYTLGLDIGSNSVGWALLDLGEKPGIVDMGVRVFPEGVDRDTKGLEKSKNATRREARGARRTHQRRNLRKGQLLRTLQVSGFLPKDDSELRSLFHTNPYQLRKKGLGEKLEPYEFGRVLYHLSQRRGFKSNRKSGKAKEDGVIIKGANGLQTEIDNKKCRTIGEYFAGLDPDEQRIRGRYTFRSMYGKEFDFLWTKQAEFYPDILAEDLQKKIRDEIIFYQRPMRWDPGRIGDCDLEAGEKRCPRGDWYSRRFRLLQDVNNLRIQNPDGSEDKLSDKERKIILDGLECEEKLSFDEIRNKLGLMETQKFNAEYRIGPKGKSIESIKGNVFAAKMSGRNIFGAKRWNAMDEQEKIKLNEWLVELEEDQLREKLRSEYGFDDKQIEAILKISLPRGYMSFSRKAIQKLLPAMERGMLTHEAIKEIYGDRRIGPDEGVVQKLGMPPELRNPIVQKALFEVHKVINAIVREYGKPARIKIEMARDVQGSGRQREELHWKILDNEKRNEDARKRLIEDIGIRNPTREDIIKYNLWQECDKRCPYTGRQVSQEALFGPNPEFQVEHILPYDRSLDDSYMNRTLCEVHENIHVKRNQTPFEAYSNDPTKYEQIKQNIKVLPWPKRQKFLQQEINLDTHINRELNDTRYICREVVGYLKRLGVHVRGTRGKITAELRHQWGLDGIFEELQTMRDDDHRRHAVDAVVVAVTENEHLRRLARSKYSAIGERFDVPWPDFRNEVREKVKHINVSHRVCRKVSGKLHEETNYGATSKEGLYVFRKELKALTLAMVKNIVDDVARDIVKRRLQEKGIEPTRSKREIPADVWKDPLYMRTTKSDKKVLIKKVRVYNVAGNVIPMKDRSGHPYRYVEPGSNHHVEVFEYTDKNGRIKRESKVVSMFDAVQRSQKGEPVVCKDYGGGRKFVCSLAINDIVMMKNKAGEMDLYRVQKMDANKMVRFRHHTASTIDRKETYIDKTAHLFEGHKVTVDPLGRIWPDND

SEQ ID NO: 3380 - protein, 1028 aa, unidentified
  REGION 1..1028: note = Description of Unknown: Cas Enzyme sequence
MRYILGLDLGPSSIGWAAVRTDEKGDFCGLATIRDGNNTIPAIGVRIFPVGVDNINQGQREEPKNKKRREARSVRRMLRRRRARKLKLFSLLKANGLMPSNDAQRQEEQDKDPYELRAKAFGGKVSLYELGRIALHIAKRRGFQSNRRQVEKGKEASLVKDAIERLAHEIGNRTLGQFWAAKRTENPLESIRNRRSNYHWIAQRQEYRNELDAIWQTQAKYYPNILTNQLREQIFEIIFRQIDFELSNRKKRKVIGTCTLIAGKPRLSMSSRKAQEYRLLQKVNDLIIYQKDKEIEFDRQKLYDELMVSKERDFKQIRKLLGLSEDDRINLEYKKSKKLIGNQIDGTLAGNKFFGKKAWLFLSEQQKEDVWKTLQNYLSNSNITLDQLAEKLKNQYGLEIQDIKALEKLTEPKGNINFCEEAIDKLLPYMREGADLYEAIQKANFVRAWTQQKFLPLPTRDNGINIPNPIVMTALFQLRKIVNALIKELGKPEKVVVEFARELKASRELREEIIEEQDENQTERERCAQRIREYHHWEKDAEVSATDILKYRLWEQQNGYCAYSWPYRNITIGQLLSRDTEIDHILPYSMSLDNSMNNKVVCFANENQAKGQNTPIDWLGEDSERFKKMIEAIERGILHFEKAKKQRFFVHNEEIAEKYTPERLLQDTSYIAREVRSYLKRLYTASEAEKAVKTTKGGITAELRNIWALNAILREGELGPKKRDDLRHHAIDAAVIAVTSPGMIKKITDKLKNNWPRRPSRTVVDEPWNGFGLELAKAAEKVNVSHRVLRKIKGALHKETNYWKETNGPHAGEYITRKELNGKFTSDWADKICDETVKKLVQERLAQNENDPKKAFKEPLYLPNEKGKQIAIRKVRVWQISTNMIQLRPNIWVEPGSNHHVEILEVKDKKGNTKKDGMLVTTFEAYKRKLSGQPIVQKYERDNKKFIMSLSQNEMILLNLDNGSEILHRTQKMSQSKGNISMIFRPHTYGGKLSDYDRPPIIQRRSPTTLVGRKVVVDPLGRVRWAND

SEQ ID NO: 3381 - protein, 1060 aa, unidentified
  REGION 1..1060: note = Description of Unknown: Cas Enzyme sequence
MKPYTLGLDLGPSSIGWAGVKINENGDFCGLAYIKDGNNMLPAIGVRIFPAGVDNINQGQREEPKNKKRREARSVRRMLRRRRARKLKLLSVLIANGLMPANSEDRQQEQDKDPYELRAKAINEKVSLYELGRIFLHIAKRRGFQSNRRQEEKDKEAGLVKEAINRLTHEISNKTLGQFWAEKRKESKKAFEKGEKPFDSIRNRKGGYHWIAQRQQYQNELTLIWQTQSKFYPNVLTNQLREQIFEIIFRQIDFELSNRKKRKVIGTCTLIARKPRMSMSSRKAQEYRLLQKVNDLRIYRKGREIKFDRQKLYEELMVSKERNFKQIRKLLDLSEDDRINLEHKKSKKMIGNQIDGMLAGNKFFGKKAWLSLSEQQKESVWKIFQNYLCNSNIKTEQIVEKVENEHGLEIRDINALEKLIEPKGHINFCEEAVNKLLPYMREGSDLYEAIEKANFVKVWTQQKFMPIPSRKNGINITNPIVTTILFQLRKVVNALIRELGKPEKIVVEFARELKASKDLREEIIKVQAENQDQWEQCAERVREYYCLDKGTEVSTTDKLKYRLWEQQNGFCPYLLRKIGIEELLSTKTEIDHILPYSMSLDNSMNNKVVCFSSENQAKGQNTPIDWLGEDNERFRKIIEALERGTLDFDKAKKERFFVHNEEIAQKYTPDRLLKDTSYIAREVRSYLKRLYQANEVEKCVKTTKGGITAELRNIWGLNAILREGELGPKNRNDLRHHAIDAAVIAVTEPGMIKKITDKLQKNWPRRPSRTVVDEPWDGFGLELAKAAEKINVSHRVLRKVKGALHKETNYWKETNGPHAGKYITRKELNGKFTDSWAEKICDETIKKLVKERLAQNENDPRKAFKESLYLPNEKRKQIPIRKVRVSQSSKTMIKLKPHIWVEPGSNHHVEIFRVKDEGRYKGKLVRKIWTTWDVEKRMKDCRFINKEGKTPNLIITRENPYLDNFKKVEFIMSLSAVETVEMLNRQGKKALSRVIKMSGERDSMTNIDILFWEIQVGKVEGKINKRTPNVYRITTLQDFDELKMKKVTVDPLGRVRWAND

SEQ ID NO: 3382 - protein, 974 aa, unidentified
  REGION 1..974: note = Description of Unknown: Cas Enzyme sequence
LVETEDRERIVAMGVRVFPEGVDRDTKGMEKSKNATRREARGARRMHQRRADRKRRLVRTLREAGLLPEGNEELTVLLQKNNPYELRKRGLDENLGLHAFGRVLYHLSQRRGFRSNRKSGKDREDGVVIKEAGALQADMDAKGCRTLGEYFAGLDPEQQRIRERYTFRSMYVAEFDLLWEKQAAYHPERLNEDLRRKIRDEILFFQRPLRPTDELIGPCELEPQERRCPRADWYARRFRLLQDVNNLIIHNPDGTETKLSPAQRSILLGELTQKEKLTFDNIRKRLGLLETQTFNAEYKAGPSGQKVEALRGDSFAAAMRSKNVFGPKTWDAMEELQKIRLNDMFIRLEDDELAKTLGTQYNLNAAQVQQAMKASLPRGYMSFSRKAILRLLPFMESGSFTNEALDLAGYNRQDASDCETMAYLPLPAQVRNPIVQKALVEVRKVVNALVREHGKPARIKIEMAREVHGSRQQREELHWRMLEDRRRNELVRERLREDVGISNPSRDDVIKYKLWEECGRTCPYTGKQISQNALFGPNPQFQVEHILPYDRSLDDSYMNLTLCEAHHNIHVKRNQTPFEAYGSTPETYEQILQRSRCLPWPKRRRFLQREISLDSQISRELNDTRFICRQTVAYLRQLGIDVRGTRGKVTAELRHQWGLDGVFSELGVRRDTDHRRHAVDALVVALTDNEQLRRLAASKYRVDRERFPLPWIAFRDDTQAMVKQINVSHRASRKVSGALHKETNYGRTDVDRRYVFRKRLEDLSLPMVDDIVDEVVRGLVRRRLEEHGIVANAKNRTLPKEIWKEPLYMKTTQSDKRVPIKKVRVYTVAEQMIPVNDRSGRPYRYVEPGSNHHMEIFEYIAGPRKGTRDAKVVSTYEAVRRSRAGELVVQRDHGPDTRFVCSLAINDMVLMADKAGRTGLYRVQKMSAAKQIYFRHHTASTIEGEETLIRKQATCWEGRKVAVDPLGRVWPAND

SEQ ID NO: 3383 - protein, 1161 aa, unidentified
  REGION 1..1161: note = Description of Unknown: Cas Enzyme sequence
MKILGLDIGTNSVGSAWVDTEQHTVKMGVSVFPAGVEERDDKRGAPKNQVRRAYRSQRRNIARRAQRKHQMRTWLRNAGCIPADEITSREWFQLNPWLLRAEGLHRPLSAFEFGRILLHMAQRRGAYGVDVEEDDQDAGKMKEAIDHTRQTMRERNVRTFGELMATLYRERRNAVGQKGMEARLPIRNRTNAAKEPVYEFCADRDLIREELLALWNRQRSFDGDLARQLTDERLRRLDENQGDETWRTKGILFGQRHTYWNTGVLGRCDLEPTDLGCPRIDMHAQEFLVIETVNNIRIIPPGQTRRPLNPDERRAAVDALRRQKTASPATVRKALGIHKGPAKSQYALSLDADPKRGLNTDWFYREVVWHAIGEAAWTNMTDHQKESVNRAILKLDPKQAGHHARFERGCHDWWGLDDEKTQRLIAVWESRPNPNIRLQLSRRAIQNLLPYMRDEGATVNEARKRFAEDADNGATPEQRERYGFAGTRPSGAIRRFQRKHPDLLPPAPQALSNPVVRKAIHEVRRHVQAYLRRFGRPDRVVIELAREAKLPAKVRNDQLAANRTREKKRNEIVAQFGLIGLTRTQQDKAVKRVLLCQEQGQQCAYCGNGNNTITEKAAAGGLEVELDHVIPESRGGGSGLNNLVLCHTRCNRGKTNRTPKEWLSKDEFAKLEQRLGHLKKSNPVKWDNLHKDVSDITGFADSQLIDTAYASRQVADWLREALYGEALSGTRHVFTTKGRYTPWLRRDWGLYAPGGSKNRGDHREHALDALVVALSGPERLQQLARAVEAMELSKAERAGVPDREPLPAPWVDKETFRAQVMEEWARIVTSHRPQRRRIAGQFHKDQPFGVIVGSARHFTKRIFAVELTASHLRVPKGWDDLQKHLESAPNKGARRAVRSKMLALNDVKPGKSGIVRDRWLREELRQSLRENGLDPDHFTEKQIKEVVATKGLFLHSGVPVRRIRLLRALSKPVKMERRRFNGATRRMEEDIDPRSTEDPRFASRRLRIYDPQNNHHVEIRENAKGTWVVDKKQGVVTTFDAARRVRPPKSAGRSPQPAVHREDTAEGRFVMSLSIGEMVEMRHPKTRTLDCFVVFKIDSTGTIHFTPHWDAGRSRKTDEAPAREDIALSAAQLQKLGEFDDRPPVKVWIGPLGDRKILVHD

SEQ ID NO: 3384 - protein, 993 aa, unidentified
  REGION 1..993: note = Description of Unknown: Cas Enzyme sequence
MTDYTLGLDIGSKSIGWTLVEHGDCDRIAAMGVRVFPEGVDRDTQGMEKSKNATRREARSARRTRQRRIDRKRRLVRTLRSIGLLPQGRDELVSLFQSDPYELRKRGLDERLDPYAFGRALYHLAQRRGFKSNRKSGKAREDGPVIKGAAALQKEMTAQGCRTLGEYFDVLSVQEQRVREHYTFRSMYLEEFDLLWAAQARYYPQILTEDLRRRVRDEIMFFQRPLKPTDNLIGDCELEPGQKRCPRGDWYALRFRILQDVNNLIVQNANGTERRLTPDERRALLDELHRKAEVAFSDIRKMFGLLETQRFNLEQDGKKTKLKGNPFTSGMRSKKAFGPKRWDEMPESEKVMLSEWLADLEDDELAARLKAQCGLDDAQAEAVLKVSLPQGYMSFSRAAIAKLIPVMEEGKLTSEAKEQVYGDRPPADAIHATDKLGLPPDIRNPIVQKALYEVRKVVNGIIREYGKPRRIKIEMARDVQGSRQQREELHWRQLDNEKRNSEVRKRITEDIGILDPTRDDVIKYKLWEECNWICPYTGTPIDKTDLFGPCPTFQVEHILPYDRSLDDSYMNLTLCEAHENIHVKKSQTPYETYSHDPQRFEQILERVNKSKMPYAKRRRFWQQEVDLDTQIQRELNDTRYICAEVVRYLRQLGISVQGTRGKITAELRHQWGLDGIFSELGVRRDDDHRRHAVDALIVAVTNNEHLRTLAASKYGQTGARFQTPWPIFRNEARDFVNGINVSHRVCRKVSGPLHEETNYGPTGLKDESGQDIYVYRKRLEDLTAPMVAKIVDPVVRDIVTQRLAENGIHPGAADRKIPKEVWKDPLYMRQTASTKRIQIKKVRIRDVKNNVILLKDRSGQPYRAVESGSNHHIEIFEYTQGPDKGKRDARVVSTYEAVRRSREDQPVVCREHGANTRFICSLAINDMVLLTGKTGELALYRVQKMSAAKQIYFRHHAAARIDREDTLVRRQATLFSGSKVTVDPLGRISVAND

SEQ ID NO: 3385 - protein, 1158 aa, unidentified
  REGION 1..1158: note = Description of Unknown: Cas Enzyme sequence
MKILGLDVGTNSVGSAWVDTEAHTIKMGVSVFPAGVEEGDQKRGAPKNQARRSYRSQRRSVSRRARRKRQMRAWLLENGWMPTDPDARKQWLELNPWLLRAEGLERELTVFEFGRVLLHMAQRRGAYGFDVEEEEEDAGKIKEAMDHTRAEMSRYNARTFGEFMTRIYQERRREVGRRKRQIRMPIRNRTTAAKEPNYEFCADRDLIEEEFICLWQAQQSFHGELAKQLNDKHRQDLDDPSGNQTWRCRGILFGQRKTYWNMGVLGRCDLEPTDLRCPRLDMHAQQFLVLETVNNITIIPPGEPRRRLNGAERHRVIQFLRKQKTATPATVRRALGIHKGPNKTHYALSLDADPKRALNTDWFYREIIENAIGQSHWEKMPSHQKEAINRAILKLDPKVEHERARMEAGCRDWWNLDKDRARRFVAAWEHRPSASTRLQLSRRAILNLLPYMQDEGLTVNEARKRFAEEPSSSARPDQRERYGFTGKRPSKTVRRFQEKHPDLLPPAPGTLSNPVVRKAIHEVRRHLQAYLRMFGPPDRVIIELARDARLPAKVRNEQLAANRARETKRKQIIEDFGLAGLPKAQRTKAVKRVLLCREQKEQCAYCGNGNNTITEKTAAEGNGVELDHIIPQSRGGANGLNNLVLCHSACNRGKTNKTPQEWLSHEQFGKLEQRFRHLKKANPVKWDNLHKDVSEIQGFGESQLTDTAYATRQVADWLREVLYAGEVSGKRCVLSTKGRYTPWLRRDWGLYSDRSPSAAGSKNRGDHREHALDALVVALSGPERLQELAHAVEAAELAKAEGMALPKREPLPPPWGDSDTFRSQIMQEFEQLVVAHRPAQRKITGSFHNDTMYGPVVDKENRLTGYATIKKFAVELTPNHLRVPQGWDELRQRLDRAPSATARKAIRKKMLALEDVKPTKSGVVRDRWFREELRQYLREQRLDPDHFTPRQMKELVLTEGIFLKSGVPVRRITLLRAPSVVKIKRRRWNEYTAEMEYDSRPQAIRLYEPQNNHHIEIRENAKGKWIVGKDGVVTTYEAAQRVRPSKSSGQTPQAAVNRADTSEGRFVMSLSIGETVHMRHPATRTLDYYVVFKIDSTKTIHFTSHWDAGRSKQTDQTAPREDIALSAAQLQRLGESPDQPPRKVWVGPLGEVKTLVRD

SEQ ID NO: 3386 - protein, 1497 aa, unidentified
  REGION 1..1497: note = Description of Unknown: Cas Enzyme sequence
MAKTFSLDLGTASIGYTIRNTDNGSELIEQLDNFGSIIFKKGVGNSQTGEFSYAAERTKHRSSRRLYQVRRYRIWETLRVLIEYGFCPLSMEHLDKWRKYDKEKGLKRQYPIDALEFEQWVRLDFDGDDKPDYSSPYQLRSELATTQLDFTKEINKYKLGRALYHIAQRRGFKSSKGETLKEQEDVIKDISNPIELDITTLKKSEGIRSKDLMTYMSEHNMKTVGCALAKLENEGVRVRASIYQAVRSQYKEEVKYIFGFQNGLDINSDFFHKIYSDRKDGSIFYKRPLRSQKGLVGKCTLEPIKPRCPISHPEFEKFRAFSFINNIQYRSYTNDEWKDLTVEQKIKLYDERFLLTRSNFKFEEIRQWLEKEIGKPLSKEQKACDSTINYSDKTNVAGCPVTGRLKNLLGDDWRNFEYITSEKRKDKNGKEHTIVYSMEDIWHICFSFDDEELVTEFAKTKLNYNDKQIKSFVNLWIAIPQGYSLLSLKAIRNINQFLEPKAENELYKGFIYTESALLGKIPEILGEDIWKENEKDILRSISSLINENREEKRILNIVNNLISAYKSLEHEEQFAYKNNEYQLDELDLKDIEMYTRDSFGENSWEKETQENKNKILEQVADKYQQFFSTSRRDYFHLPKSGETLKTYLSNNFQTLHCDNNFVNPQNEDLPCRCDACKKLNKLYHPSMVEFYKPAKTDKDVGLKLLESPVIGAFKNPMAMRTLHQLRKLVNHFINEGIIDEETRIVVETARDLNDANMRWAIDKYQREREIENKEIAKAIKELRGEERNDDDIDKARLLIDQNPDYLFDKVRYDAEKEEEDSGNKKKKKFIGKTKDFQYKKDITKYKLWLEQGMECLYTGKIINISNLFDENATDFEHTIPRSQTFDNSLANLTICDYYYNRHIKKNRIPTQLENYDKEVVINGQSYSAIKPRLEKWEQKVEQLKNNVEFWRYKSKQAQTKENKDDAIRQKNVWQMELDYWRDKLSRFTMTEVTSGFKHSQLNDTRLITKYAYHYLKSVFNKVEVQKGSVTADFRKMLGVQSVEEKKSRDKHSHHAIDAAVLSLIPVAAKRDKMLELFYKIQEENKLNRNTDVLEQELQKEIRTCQIKNVSNLAQYIEENILINHIAKDQTLTPAKRKARKRGKVIGIKDENGKYLLDDKGEKIPKYWIKGDCIRGQLHGDTFYGAITQGKKDENGCLLRDENGKIISDEQIFYVVRRELKFKKNDQDKGFKTLDELKISIVDKSLFEIIEKQCEGKTFKDACEEGFWMIDKKGNRVNRIRHIRCYTSIKNPLSIKKQTYLSDKEYKQTYYSENAENTLYALYWDGKNKEKGFECRNLFDVALILKTNNPKTVNDFFEPNKQIGRGRNKIDIPLYAILKPETKVIFFGKDKEELKELSNNELSKRIYKMNRIFSSEDGRIQFYHHLDARDDKKLLADFPEKTIWFDGKPTGKRQKNGFAKFSPDFVAPRLLLAPSNFNFIIEGKDFEMNLDGTMTFKY

SEQ ID NO: 3387 - protein, 1511 aa, unidentified
  REGION 1..1511: note = Description of Unknown: Cas Enzyme sequence
MKKHILGLDLGTNSIGWALVAVDENNKPYNIEGMGSRIIPMSQDILDIFSGGKPLETQTAARTRYRGTRRLRERQLLRRERLHRVLNVLGFLPEHYVSQIDFDRHFGRFFTELEPKLAWKENANGKLEFIFQSSFEEMIAEFKNTQPHLFENGRLIPYDWTIYYLRKKALSQKIKKEELAWILLNFNQKRGYYQLRGDEDKENPNKLVEFHSLKVVDVIPDESTNGKGETWYSFHLENGWIYRRSSKTPLFDWKDKVRDFIVTTDLNDDGTIKTDKEGNARRSFRAPAENDWTLLKKKTEADIDKSKKTVGTYIYDTLLENPAQKIKGKFIPAIERKFYKEELRQILQKQQEFHPELQDENLYNEAVRELYRNNESYRFALSKRDFVHLFLEDIIFYQRPLRSKKSSIGNCSLEFRKYRDKEDVEHVEYLKATPKSNPYYQELRLWQWLYNLTIYRRYDDENVTQEFLNSMEDYENLFDFLDNRKEISQDTLIKFLLEQKGFKGKMLANEASKYRWNFVDDKGKVYPCNETKALIASRLSKVENLPDGFLNRETEQQLWHIIYSVTDKGEYEKALKSFAERHGLDVTSFVENFKKFPPFKSEYGSYSEKAIKKLLPLMRVGKYWDWEKIDESTKKRIDKIITGEYDENIKERVREKAIHLTEEKHFQGLQLWLASYIVYGRHSEPGIAGKWNSVNDLDNYLHEFKQHSLRNPIVEQIVTEALRVIRDIWSHYGNGMKDFFSEIHIELGREMKLPAEDREKLTNQVLENENTNLRIKALLAEMLHYPEVENVRPYSPMQQEALKIFEDGVLSSNIEIDDDILKISKTAQPSSTELRRYKLWLEQKYRSPYTGQVIPLNRLFTADYEIEHIIPQSRYFDDSFNNKVICESAVNKLKDNQTGFEFIKNHHSEIVEVGFGRTVKIFEEEEYQKFVKEHYVKNRSKRNKLLMDDIPEKMIERQMNDTRYISRFISSVLSNIVRSETNDDGINSKNIVPLNGKITSRLKQDWGLNDIWNDLILPRFERMNELTGSKNFTAYNERYQKYLPTVPLEFSKNFQKKRIDHRHHAMDALVIACATRDHVNFLNNQHALDKRKTKEEKDKTRYDLRNKLCFKNKGDDGGNYNWQFFKPWDNFTVDARNELEKIVVSFKQNLRVINKSVNYYQRFIDGKKVIDKQTQGDNWAIRKPLHKETVSGLVKLRKTKAVSLNVALDNYPVIVDRSLRKHIITLVSQNYDKKKLVSFFKERENKWNGIDITKVDIYYWENDNVASRVSLDTSFNEKRILETITDTGIQMILLNHLENYKGKLDDQGKEIAPESLAFTPEGIEDMNKNIVSLNNGKFHQPIFKVRTYEPKGNKFNVGYIGNKKTKYVEAAKGTNLFFAIYADDEGNRSYETIPLNIVIERLKQGQKEVPERNENGHNLLYSLSPNDLVYVPEDGENPVIFDLKNLCKEQINKIYRIVSFTGARLYAIPINVSNSIVNKVEFTQLNKIELIREKSICLKLRVDRLGNIKFA

SEQ ID NO: 3388 - protein, 1200 aa, unidentified
  REGION 1..1200: note = Description of Unknown: Cas Enzyme sequence
MKLLGIDIGSNSVGSAWVDTDKKLIEMGVSVFPAGVEESETKRGAPKNQARRSQRQQRRSIERRAKLKMRLRKYLLEKNWIPTEKEKLQEWESSHKFNPWLLRKKALHAELDPYEFGRILLHFAQRRGAWWFDEEPEETENDKKKKKDPAETPGTVEYTKAVMKKKGAETFGELIAIEYENRKTVTANNKMRSNRVRNRANAFGEKVSEFVADRHMILAEFLKIWEAQKSFGGKLAKQLTDEVKKEIYNPQKTNTWRCQGVLFSQRKAYWDLGTLGRCDLEPTDEKCPKADMYAQEFLVLTSVNNIRITPPAEPIRKLNDEERSKVVKAVRKQQTASEGTIRKALGIDKGANKTLYTLNTDGDKFTVNGNWFYSQIVFGVFVEDEWSAFDLNMKESVNRAILKYDPNEEDDENKARTGCKKWWDLTDEQTENFISAWEKRPKKDQRVNLSRRAIKNLLPYLRDGWSVTEARNMYAEDASNRADDLTRKRYSTKEVVVNKQIRYFQQKHPGILPPVSDGISNPVVRKSIHEVRRHLMEYTRKYGRPDRVIIELARKARQSEKVIAKKMQKNKAVDSLKKEIIETHNLDAPGITSTQREAAVQRVRLCRQQRKMCAYSGVTITDKTAADGSGLEIDHIVPRGKGGDNSFSNLVLCFSTANQGKGNRTPIDWLSEDKFGNVEKIFKHLHPQKSEKGGRFITKDNVDMIDEAKWKNLHRRTPKEGFTEEQLHSTAYAATQTTDWINKVLYGSEDRVKRYVFASNGEYTGILRRDWGLFFDENGERSEKGVKLRGDHRHHAVDAVVIAMTTQFLPKIKESFIDFEKQEENKNIKPQWKTIEQPWEGFSEQLEEKYKNLKVSHRAYNRRIAGHLHKDTIYGPAIIYDRHKKDDEKKGIKKGDVRIDKDGNPVLKKGMYIKSIAAIGIKQNHLRMPDGWDKLKEEYKNAATKPQRKAIRKRMLALENVPPAKSGIIRDIELRDKIRDWLKEHNFEDMGQAKAYIKENGLIINGTPIRKVRVLWKLNEVIEINRKGFDYKNSPQEKLRKSLRSYQTQNNHHIEVRENEKGKWIGEVITNFDAAKRVRVKQPKQKPQGWTPPPAVNREDTKKGRFVMSLSRGEVVHMRHPETQKAGYFVVFKIDPSKSIHFTPHTDANPASSKKKGIKLREDIPLVPDALRQSIIFNENGVPEKVKISPLGDVKLLVRD

SEQ ID NO: 3389 - protein, 999 aa, unidentified
  REGION 1..999: note = Description of Unknown: Cas Enzyme sequence
MTAYTLGLDIGSKSIGWALLDEKENKIINLGVRVFPEGVDRDTKGLEKSKNATRREARTARRNHQRRNLRKEQLLRTLQAEKLLPLGNSGLKSLFHTNPYKLRKKALDEKLDPYEFGRILYHLSQRRGFKSNRKTGKTKEDGFIIKGANALQKEMDDKNARTIGEYFAGLNPDEKRIRGQYTFRSMYEKEFDLLWTKQTEFYPDILTEDLQKKVRDEIIFYQRPMKWNPETIGNCELESGEKRCPRGDWYARRFRLLQDVNNLIIQNSDGSERNLNDEQMKGKREKLLSELSKKKDITFDKIRKLLGLIKTQKFNAEYKIGRSGKHVKSLKGDTFTAGMRSKNVFGVKRWDAMDEHEKMNLNKWLIELEDDQLREKLRAKYGFTDNQIEAALKISVPQGYMSFSKKAIVSLLEFMEQGALTSEAIAQAYPNRKATSEENKGLDRLRPPESLRNPIVNKAMFELRKVVNAIVREYGKPAKIKIEMARDVQGSKRQREELHWKIFENEKRNEEARKRLREDIGIRNPRRDDVIKYNLWVECGKRCPYTGRQISQAALFGPNPEFQIEHILPYDRSLDDSYMNKTLCAVRENIHIKRDQTPYETYGHHPERYEQIKQNIKHLPWPKRRKFLQKEIDLDQSITRELNDTRYICKEVVRYLKKLGVYVRGTKGKITGELRHQWGLDGVFDELETKRNDDHRRHAVDAVIVGVTENEHLRKLARSKYSVTGARFEPPWPDFREGIREKVKQINVSHRMQRKVSGKLHEETNYGMTGKKDEKGQEYFVYRKKIEDLTVPMIEKIVDPVVRDIVKQRLTKKGIDLSKRGKIPKEVWKEPLYMKTTISDNKITIKKIRVQEVFNNMIVMNDIQGRPYRAVAPGSNHHVEIWEYTEGPKKGKRDAEVVSMFEVVNRSRRGEEVVNREHGVAMRFVCSLAINDMVMLSNNYGEMDLFRVQKMNVNKQVYFRHHTASQIDDDTTVIRKQANLFDGYKVTVDPLGRVWPAND

SEQ ID NO: 3390 - protein, 1038 aa, unidentified
  REGION 1..1038: note = Description of Unknown: Cas Enzyme sequence
MATILGLDLGSNSIGWALLEEVDGKPSRIIDLGSRIFTKAVEEKTPTPKNVKRRNARLARRVIQRRARRKQRMLNYLISLKLLPELLKNHTQPEKILNTLGSPYDLRAKALDEPLEPFELGRVFLHLVQRRGFLSNRKTLLSDMMDDPDVLSVLDEMDEQSDDTEKASEETAFKKDISQLRQKIGAVSCRTLGEYLATLKHGDYKRNRNRSGGHLRTDRQMYRDELEMIWEAQKKYHDTLTDEVKEQVDNIIFYQRPLKLKEDRVGKCSLEPKNKRARIARLEYQRFRYLQDINNLQYFDRIDEKWIALSDEQKEKLKILFENKSIITFPAMRRELKLDKSAEFNLEDANKKLKGNITACEVRSVLPQWDDMGADNQLTLLEDLLSFQKKSALKKRLVGHWGFDVKTAVNLCLLEFEPGHGSLSLKAIRKILPHLELGQIYSDARVNAGYGYEQEQGATVDKLGLPPEVPNPIVSKGLYELRRVINALIAEYGKPDKIRIEMARDLEMNTKRYKDFTARQRKNTKLNDEATEKYQQAGKEYPHLHLSKYPSHADKLKYRLWKDQQEMCAYDISGRKISLAELFSADIEIDHILPYSQSLDDSYMNKVICRTKENRRKGQRTPVDAFSGEQWEQIVQRISRWDRSLKSKKNRFFLKAADVQKRDFISTQLNDTRYISKVALDYLKTLGADINVTKGIMTGWLRHQWGLNSLIGQDKKNKDRVDHRHHTIDAVVTACIDRFFYKDLVKMAKGLEKEKSQFTPKDIHTDTPWQNLRNDLQTALENIIVSHTPHRKITGGLHEETGVGFIEGKGTVYRVDLSPEFKLTQVKKIVDAEVREIITDHLAKYDNKPKNAFADGVIVYHKDGKTPIKRVRIVQSKTTRKKLESSKFGVRNKQGKVFRWMAYGNMHHVEIIQHKKTKAYKGVFVTALEAHRRAMTGSKSAMKRGVLFEPIIKKEHDEQYDFMMALHINDLVSVETNDGAKFYRVQKLESDSSRMTLRLHNAATIKNDDEEIRLSISSLMQQKMKLFQLNAIGRKIND

SEQ ID NO: 3391 - protein, 1026 aa, unidentified
  REGION 1..1026: note = Description of Unknown: Cas Enzyme sequence
MAQVLGLDLGTNSIGWALLESSDKKGNDFEALVACGARIFQEGVDRSTTGAELSKNAQRRTARGARKLHKRRNQRRNQLKKILIKHSFLPPESSEVWHKIMQISPYSLRSNLLEVDQARVEESGKQLLWEFGRALYHINQRRGFKSNRKSGVSDGKVATALSELQQQIDEGNFQTLGQYLYSLEPREQRIRCRYTKRSMYEEEFEALWSHLASFYSKQLTHELKQEIYHTIFFQRPLKVQKHLVGICEFEKREVLNDKGEKVWAGKKRSPKGTWYAQQFRMLSEVNNLKVIDGNDEWELSQDLDLRDKLVDALGRSKSKNFSAIKKLLFGGNDQPYEHIRFNLEEGGRDKLQGNEVEASLRAIFKKKYDDLSIEQRDKIVHDLLFIEDTNVLYKQFEPLAKMLDLSDEELNKLCKVNLVDSYGHLSEKAIKKLLPFLEQGLKYSDTVEAAGYLRKDQQDDTMIPQLGEPPQLRNPIVQKGLYEVRKVVNAIVREYGKPDFIRVEMARDLKQSSKQRKEVGFQNAKNRRRNEEIKKRLQDEYGIAKPSRDDVIKYRLWEECNHTCPYTNQTISAAMLFSSEVEIEHILPYRRTLDDSYINKTLCMSAENKVKSNQTPYEAYHGDNERYQIMLARVRKFKPPFGYKKFNKFRQKEIDLDSFIERQLNDTRYISREVCSYLEPLVGKYHVQSGRGQMTAKLRHLWGLNSILHDSGEKTREDHRHHAVDAIVTALSTPKALKAVSAVSKYGRVDKLSIEQFPIPWENFRSDAEEKTQSIIVSHRVMRKIRGALHEETAYGSLKFTDEKNQKMYAVRKVISALSHKEITQIADDKIKGAISSYILQKGFDPKVKEDVSKALKDADNNPPTMKSGQVIKKVRLHKPFSKMRVLNNKQGKPYRAMQEGSNHHIVIYEYQDKKGRIKRGGIVVSMFDAAQRARNSEPVIQRKLEKGQRFVMSLSINELVQVPKGEGGFNIYRVQKMNSATQITLRHHRAANINDNAARLLVMPNTFKGTKVALDPLGQVYPAND

SEQ ID NO: 3392 - protein, 1044 aa, unidentified
  REGION 1..1044: note = Description of Unknown: Cas Enzyme sequence
MTKILGLDLGSNSIGWALLEEVDGKPSRIIDLGSRIFTKAVEEKTPTPKNVKRRNARLARRVIQRRARRKQRMLNYLVSLELLPEALKGHAQPEKILNTLGNPYDLRAKALDEPLEPFELGRVFLHLVQRRGFLSNRKTLLSDMIDDPDVLSVLNELDEESNQGDTTEKAKEETAFKKDISQLRQKIDSVSCRTLGEYLATLKHGDYKRNRNRSGGHLRTDRQMYRDELEMIWEEQKKHHDTLTDEVKEQVDNIIFYQRPLKLKEDRVGKCSLEPKSKRARVARLEYQRFRYLQDINNLQYFDRFDDAWVALSGEQKEKLKVLFENKPSITFPAMRRELKLDKSAEFNLEDANKKLKGNITACEIRVVLPQWDGMSADDQLALLEDLLSFQKKSALKKRLMGHWGFDVKTAVNLCLLEFEPGHGSLSLKAIRKMLPYLEQGEIYSDARVSAGYGYEQEQGGTVDKLGLPPEIPNPIVSKGLYELRRVINALIAEYGKPDKIRIEMARDLEMNTKRYKDFTARQRKNTKVNEEASEKYQQAGKEYPHLHLSKYPSHADKLKYRLWKDQQEMCAYDISGRKISLAELFSADIEIDHILPYSQSLDDSYMNKVICRTKENRRKGQRTPVDAFSGEQWEQIVQRISRWDRSVKSKKNRFFMKAADVQQRDFISTQLNDTRYISKVALDYLKTLGADINVTKGIMTGWLRHQWGLNSLIGQDKKNKDRVDHRHHTIDAVVTACIDRSFYTALVRMAKDLEKEKQGFTPKDIHIDPPWQNLRNDLHTALENMIVSHTPHRKITGGLHEETGVGFIEGVGTVYRANLSPDFKLPQVKKIVDSEVRELIGKHLLAYGNDPKKAFAEGVVVYHKDGKTPIKRVRIVQSKTTRKKLESTKFGVKNKQGKVFRWMAYGNMHHVEIIQHKETKAYKGVFVTALEAYRRAMTGSKSAIKRGVLFEPIIKTEHSEQYDFVMALHINDLVSVDKEESSICYRVQKLDSSNKRVHLRLHTASTIANDSETFPDRELTIPALMVKNMKLHTVNAIGKLLND

SEQ ID NO: 3393 - protein, 1025 aa, unidentified
  REGION 1..1025: note = Description of Unknown: Cas Enzyme sequence
MTKILGLDLGTNSIGWALLEASDQRGNDFTGIIKSGVRIFQEGVDRTATGAELSKNATRRTARGARKLHKRRNQRREALKKLLIEHALLPTNEQKWQKVMAVNPYKARATLLNTQQKHVNNADKSILFALGRALYHINQRRGFKSNRKSGESDGKVATALVELEQKIHEGGFETLGQYLYSLDPREQRIRGRYTKRSMYEYEFEVLWNHLAPFYPDKLTNALKDKIYYTIFYQRPLKNQKFLVGLCEFEKKKTINKQGEEVWTGKKRSPKGTWYAQQFRLLSEVNNLKVIDGNDEWQLAEDLDLRDKLIANLQKKKTMNFSAIRKLLFNDGNNPWEHIRFNLEEGGRDKLQGNEVEASLRTILKKKHDDLSVEQRDSLVHDLLFIEDESVLLRHCQQLGKALDLSDEQIEKLSKIKLQDGYGHLSEKAMKKLLPYLEQGLKYSDAVEAAGYLRKDQQDDTMIPQLGEPPQLRNPIVQKALYEVRKVVNAIVREYGKPDFIRVEMARDLKQSSKQRKEVSFQNAKNRRRNEEIKKRLQDEYGIHNPSRDDIIKFRLWEECHHQCPYTGKTISAAMLFSSEVEIEHILPYSRTLDDSYINKTLCMSEENKIKGNQTPYEAYHGDNERYQTMLARVRKFAPPFGYKKWNKFRQKEIDLDSFIERQLNDTRYISREVSKYLQQLVGKYGVQSGRGQMTATLRKLWGLNGILHESGEKTREDHRHHAVDAVVTALSTPKALKAVSAASKYGRLDKLSQEQFPMPWDGFRHDIEQSIQSIIVSHRVMRKIRGALHEETAYGALKFTDEKGQKMYAVRKPVTALSHKEITQIADDKIRGAITSYILQKGFDPKVKSDVEKALKEVDKEPPTMQSGQPIKRVRLHKPFSKMRMLKNKKGEPYRAMQEGSNHHIVIYEYQDKRGKTKRGGHVVSMFEAAQRARRGEPIIQRKLEDGQKFIMSLSINELVQVPKGEDEFDVYRVQQISLDTKMMLRLDKAASLGNNDERLIKMPNTLKGQKIVIDPLGKIYPAND

SEQ ID NO: 3394 - protein, 1448 aa, unidentified
  REGION 1..1448: note = Description of Unknown: Cas Enzyme sequence
IPMDQGVLGEVERGNKVSQTAERTKFRGVRRLRERHLLRRERLHRVLHLLGFLPPHYDAQIDFMKRFGKFMGDSEPKLAYNNEGFIFLESFNEMVEDFKKHQPQLFYIKSNGEESKIPYDWTIYYLRKKALYEKISKEELAWIILNFNQKRGYYQLRGEEEEKSTKNVEFYSLEITDVIADTPNNKGEIWYSIHLENGWVYRRASKISLEDWKGKVRDFIVTTELNEDGSIKLDKEGKEKRSFRAPSEDDWNLIKKKTEQNIVFSGKTVGEYIYDHLLQNPNQKIKGKLVRTIERKFYKEELKAILEKQVALQPELFTEELFVDCVRELYKNNEIHQNSLSSKDFVHLFLNDIIFYQRPLRSQKSNISSCSLEYRFCIDEETKQRRKTYLKVISKSNPYYQEFRVLQWLSNLKIYRKEDDKDVTSEFISSIENKETLYEFLMSEKEVSNKSVLEFLLMKSLKETYPFAKETELKKELKKEITKYRWNYVYEEENDNKKYPMNETGYEIRKRLKEVKNIPDNFLTKDIEYQLWHIIYSVTDKYEYEKALVKFAQKHNLDAESFVEHFKKIKPYPSDYGAFSEKAIKKLLPLMRFGKYWNYSNISEPVQARISDIINGVDNESIKTIVREKAEKFQLSQEADFQGLPLWMAQYIVYGIHSEAVDIQRWTSPSDLEEYLKGFKQHSLRNPIVEQVVTETLRVVKDIWEYYGKGEENFFGEIHIELGRELKKTAEERNRMTREINENEETNLKVKKKLQELFEDKSAENVRPYSPIQQEKYRLWLEQEKESPYTGQPIPLSKLFTDEYQIEHVIPQSRFFDDSLSNKVICEAAVNAEKGALLGLEFIKKHGGEILDIGLNKKVTILNEKEYKELVNKYFANNRAKKAKMLMEEIPEKMVERQLNDTRYISKFISQILSNIVRSPQEDNGVNSKNIIPCTGKITAALKQDWGLNDVWNDLILPRFERMNNLTQIELFTTYSEKYQKKIPTVPLEHAKGFQKKRIDHRHHALDALVVACATRSHINYMNNKHALDKHKAKEEKQNTRIDLRTVLCEKKYNDNAEDKYNWTFKKPWNTFTQDVRSALEMVVVSFKQNLRVINKATNYYEKWVEERGKMVKKKVKQEGINWAIRKPLHDDLPYGEIKYQTNYLKISENISKRKFIIDEFIRNQVERIYVENHSKNNLTQKYLKEYPVIDEKGKEVVSTDFRIEVIKYRKRKPISILSDRNSRTGITTIEKMLQAINKIADNVLKKELLLHLEQNNNDIDKAFAVEGIERFNSERKTPVYRLPFIEDGEKKIKLGSKGKYVEAAKGTNLFFGIYQGKGKRSYATIPLAEVIERQKQVLTSVPEFNEKGEKLLFSLSPNDLVYVPMEGEDVESINFTNLSKEQRERVYKTVSFTGSQCFFVRQDVATSIVNKMEYSSLNKMEKGIDGIMIKETCIKLKIDRLGNISKA

SEQ ID NO: 3395 - protein, 1445 aa, unidentified
  REGION 1..1445: note = Description of Unknown: Cas Enzyme sequence
MTKTILGLDLGTNSIGWALVQQDFENKQGEILGMGSRIIPMSQDILGEFGRGNSISQTAERTGYRGVRRLRERHLLRRERLHRTLNILGFLPKHYANEIDFTKRFGKFINHAEPKLPYKNGDFLFKKSFLEMLEDFKSNQPEFLKDKNGNNCLVPYDWTIYYLRKKALSQKIEKEELAWLILNFNQKRGYYQLRGEDFAEEKDKLFVKLKVDKVVDSGEKIKGNILHDVYFDNGWKYDRQIVKTEDWVGKTKEFIVTESCLKNGDIKRTYKAVDSEKDWIAIKSKTEQDIDNSNKTVGTYIYENLLLNPKQKIKGKLVRTIERKFYKEELNQILRKQQEFHSELQNEELLQDCVRELYKHNEQHQQMLESKDFVHLFLNDIIFYQRPLRSQKSSISNCTLEKRISKEGVVFSIKVISKSNPYYQEFRLLQWLQNLEIYRNEDDTKVTTEFITSVEDKEALFDFLNSKKEVEQKHVIDFLLKQKSNKNKLPKGEAEKYRWNYVQDKKYPMNETRYLIQSKLDKVEDVPNDFLSFENEMALWHIIYSVNDKIEYEKALAKFALKHQLDEASFVESFKKFPPFKSDYGSFSEKAIKKLLPLMRFGNQWNYDAIDNISKERIYKIITGEYDEKIKNRVREKAEQFNLTTENNFQNLPLWLAQYVAYGRHSEAEITGKWNSVSDLENYLKEFKQHSLRNPIVEQVITETLRVVKDIWQEYGKGAQDFFSEIHIELGREMKNTADERKRLTNVVTENENTNLRIKALLAELALDATVENVRPYSPMQQDILKIYEEGVLNAEENIEEDILKISKTAQPSSSDLKRYKLWLEQRYRSPYTGQMIPLNKLFSHEYEIEHIIPQSLFFDDSLSNKIICESAVNKLKDNRIGLAFIKAYHGEVVPLGNGKTVKILEVQDYEDFVKQNYSKNRTKRNKLLMEDIPEKMIERQLNDTRYISKYISHLLSNIVRDVTPDSKDDGINSINVLPGNGKITTRLKQDWGLNDVWNELILPRFERMNELTNSTDFTSTNTNGKVIPTVPIELSKGFSKKRIDHRHHAMDALVIACATRDHVNLLNNESAKSETTAKSETKRYDLNRKLRVYEKVTYKDQKTGEQITREVPKDFLKPWTQFTIEAKNALENIVVSFKQNTRVINKATNYYESYKDENGNLRFDKNGKPKKDFVEQKGMNWAVRKPLHKETVSGQVHLDRVKVAKGKILSATRKSLDTTFNEKTIQSITDTGIQKILLNYLKAKGSPEVAFSPEGIEEMNKTISLYNEGKNHQPILKVRVFEQGSKFPLGETGNKTKKFVEAAKGTNLFFGIYEDKAGKRSYNTIPLNLVIERQKQGLSPVSEINDKGHRLLFHLSPNDLVVIPKDGDINSKDVYKVVSFTGGRLYVIPHFVSSVIVNKIEYTQLNKIELTKEKDLIKKIEFDRLGNLISKSSKLEELFYKRRM

SEQ ID NO: 3396 - protein, 1270 aa, unidentified
  REGION 1..1270: note = Description of Unknown: Cas Enzyme sequence
MAKNILGLDLGTNSIGWALIEVDAEKYKPLRILGMGSRIIPLGTDDKTQFERGQSITKNQDRTKARTQRKGYDRKQLKKSEDFKYSLKKELEKFGIYPDSVLMNLPMLDLWKLRSDAASEPISVEQLGRIFYMLNQKRGYKSARSEANADKKDTDYVAEVKGRYALLKEENKTIGQHFYNKLSTSFSNNEYYRIKEQVFPREAYLEEFDTIVNIQKKSHDFLTEETINRLRNEIIYYQRKLKSQKGLVSVCEFEGFEKEIENTEKSNNKIVFVGPKVAPKTSPLFQLCKIWEVVNNITLKVKNPEGSKYKWSDYSPTLEQKEKIANYLSINSILSYAELLKILELRKDNVFANKQVQKGIQGNITYAEINSILDDESLLQFGISIEESNNEALLVDKKTGEILEEKKKLIVSKDFEKEPLYQLWHTIYSIKDLDECREALIKRFNLEEGIADKLSRIDFNKQAFGNKSAKAMRKILPYLMEGFGYDKACSLAGYNHSNSLTKDEQESREVKEKLELLPKNSLRQPVVEKIINQMINVVNDIIDEYGKPNEIRLELARELKQSKDERDQADKANSNNKKQNDLIAQRLSAMGIAATKKYIQKYKFIFPAKDKKWKEADVVNQCIYCGEHFNLSEALTGDNFDVDHIVPKALLFDDSQTNKVLVHRHCNSKKLDKTAYDYIAKKGEAELDRYIQRVDDWFSRGILSYGKMQRLKVSFEEYQERKKLKKETEADKKLWENFIDRQLRESQYIAKKSRQILEQICNKVTVTEGTVTAKLRKIWGWDDVLMNLQMSKYKSLGQTEMIEWTSEHGKRLHKKEQIINWTKRDDHRHHAVDALVIACTKQGYIQRINTLNASEVRNEMLKEVEEAKIQYNEKLTLLEKYFNTEKPFTTSEVEKEADKILISFKAGKKVATISKFKAKGKNKEQGVIVPRGALHEQSVYGKIKVEEPDKPLKYLFENPSTIKDEKVKRKVIDRLLKFENDIKKALSSLKKEPIYLDQKQEVALEKAICYKDATVMKYDLLSLNAKQVNDIVDKKVKEIVKDRLAQFGNKEKEAFKEVLWYNEEKQIPIKTVRLFARPDANGLQPIKKDENGKNIGFVVQGNNHHIAIYTDKNGKQVQHSCTFWHAVERKKNSIPVLIKNSSLIWDNLNNENLPQEFLNLLPENGLDLNFSMQQNDMFILGLSDDEFNDAIRNNDKSTLSKHLYLVWSISNNDYWFRHHLETKNTELKNIDGAKESKRYYRFKSVGSVLRENPKKIKINHLGNISHLGEY

SEQ ID NO: 3397 - protein, 1040 aa, unidentified
  REGION 1..1040: note = Description of Unknown: Cas Enzyme sequence
MSYVLGLDLGPNSIGWACIDNNNKRAIDMGVRIFQEGVNRAPTGKESSKNEVRRLKRQSRRQYERARQRRENLVSVLKRNAMYPDTPEGEKDFFSWNPYELRRRALDDKLSLLETGRVLFHINQRRGFKSSRKRQGDAKEDSTLYVETGELEAKIKAAGCRTLGEYLAGLNPMEQRIRDNYTLRKWYEDEFDAIWTVQGGHYAELTDTLKDEIRNRIIFYQRPLKSVARFIGNCSLEPVRTVKYIDKKGKERTILKGEKRCRKDSFEFQRYRIFEQINRLKYIGEDGVERLFFKRKDDKGKFVEFDEETRNLRDRLIAELEKSAECKYDKARKLLKLPEGTRFNLEGEGEAKLIGDRTGAELAKVFDRKKWSSMTAEQKEKVYQVYIFASDEEWLLRYAKGKEKEQWGLDDKRAEKILKINLESGYAAYSKKAILKLLLHLEAGFALSDAIEMAGYGKGKKSEYGENPLKDLRNPLVAQTLYELLRFLPKLEKVHGRPDEIRVELARELKVSSEKRGKMTKDNFKRRAENERVSGKLIEYEIQPNHDAVQRYKLWEECKGICPYTGRSISVDALFKTNEFQVEHILPYSRSLDDSFMNKTLCHTGENKIKGNHTPYEEYGSTAAKWDEILMRVKHFPYSKRERFTMKELPDDFISRQLNDTAYISREAKSLLESKDIKGMDYKVSVSMGRATAQLRYLWGLNNVLGGGAEGVKNREDHRHHAIDAVVVALTDIKTLESLQWYYKHGKTPTERRFPAPWDNFRSDIEGLAGRILVSHRVNKRVRGQLHEETYYGSTGLKKDKKMSIYVVRKKLEDLTPDMLESIRDEEVRKIIIDALEANGISRKDKNGIKNYFKNNPVFMKCAKGLKIPINKVRTIKVAGNMIPLPGRDDDKTFVEPGNNHHAVFYRYIDKNGKPRYDAEVCTLFEAVRRLKKGEAVIKRRLCEGREFLVSLKINELVLISDDGLIDASRIFDDREAISRRLFRVQKISDKITLRLHRHALTDDVNVVESAIKKFAGEIGSGRALKVKIDRLGRLDRAND

SEQ ID NO: 3398 - protein, 1001 aa, unidentified
  REGION 1..1001: note = Description of Unknown: Cas Enzyme sequence
MSPHKTVLGLDLGVTSIGWALLQFQTDDSGYPTRDEEDSLTASIIDSGVRIFPATTEGTKSEPKNAKRRTARGQRRLIMRKAKRRNELRELLSSRHLLPPITSATSAEDFHGIGDPYDLRVRALDERLEPQEVGRAIYHLSKRRGFLSNRKSAKSKDDGVVYEGIAQVRSEMEAKGYRTLGEFLKTKDKKRKHYTLRAMAESEFELIWQKQREYHPGLLTDELKSKVHNIIFYQRPLKSQRGLIGKCTFESGKKRCDMARQEAQRLRYWQDINNLQLQDPTTLNWRPLTLEEKNALAEKLESTKELNYSALRKLLKIGEDVRINLAENDKKLYGNKTACAFRKALPKKWDEFNEEEQAQLTEEMFRIENEAALKRRLTNFWRFKEDEIEKLEKVWHQLEDGYSRLSLKAIRKVLPRMMEGLRYDQAVREVYGDHRKQFGSEEFQKLQLPPKDLRNPIVFKALCELRKVVNAIIRTHGRPDEIRIELARDLKLTKLQKDQAMKQANQNKRANEEAKEFFRQKFNLEDASGTDKLKYRLWKEAGERCPYTGNPIPPESLLDDGLVDIEHIIPYSRCFDDSYMNKTICDAKYNREIKRNRAPGEYLDPETEEYAQVMHRIGLLPFGKQRKFKLTTAELEKTDWAGRQLSDTRYICREARGYLRQLYPYNADESKYVQVIAGGATAALRHVWHVNAILSDGDVDAKNRWDHRHHAIDAIVVALCDRGLYQYISKLSGRNRELMKRSLSGFSEPWKGFLTDVETAMNSLVVSHAPTRRIRGQLLEDTAFGTTTTPGVYAVKKPLEGITANQVKNIADRKVKELVELRLSQFNGDSKKAFADPLYHSDGKTQIRNVRVLVTISPETMVGIKDSTGKVYKYYSIAGNHHVNIYENTDSGDRQAELVPRFYAAQRNWKPKDLGPEWRKLFSLCANDYVEFRGDDGQLRIYRIQKMSGGNRLEITLRALNDANTDTSIGICIRASSRAAFISIIRKLQVDPIGRLSKASD

SEQ ID NO: 3399 - protein, 1747 aa, unidentified
  REGION 1..1747: note = Description of Unknown: Cas Enzyme sequence
MNKTVLGLDLGTNSIGWALIEVDHENKTVKIIGLGSRILPMDAGEIKDFESNGKIKSTAAQRTEKRGPRRLNERYLLRRDRLHLVLDLLDALPTHYKLEIDFTNSKGEKSGHFKKNKEPKLAYLPKEEGKKAAFLFMNSYQEMLADIADENIENKKGKRIPYDWTLYYLRQKALSEKISLEELAWVLLNYNQKRGYEKTEVEDKNVKEGELIEELDLRVKEVFSKTDKGGKQYFEIHLDSNDNLIYKEYSDVQITFKNDLKEVTKISKVDEQGNVDDKKTEFKIIDIYELKIQDVKYEKDNDKHKYTLTYQNGWIEEKTPVKNFTFKYKNALHKSFDYIVETVYDYKGDIKTQQGKERKLREPDLSDASNDWTLLKKKTEKEASIFNIEKGYKNADGSAKSYISPQIYNVLKSDAKSGNRTKIIGGMFQVVDRDFYREELKQIIATQQKFHANLEDKKVFEQCVKTLYPKNNNHQESLLKNKNAIQHLLIEDVLLYQRPLKSKKSEIANCKYEIRYWKEVLDKKGNPIEETDIETGEIKAKKEPVYIKVVSVSHPYFQEFRIWDKLHNLKLMQLEKEVDGKSLTNQDVTKDYFKTEKEYQELFDELNNRKSLNQEQFLSYCKKKFKIDYNKKDSNYAWNFPEDEELKGNETRVSFATRFKRCGFTEYVDFLTQEKELELWHYLYSVSYKERTVNNNKSAATFFNHYFEGFEIDKIVKEKIVKDFVNFPVFTAKYCAYSEKALKKLLPLIRLSNNNMSDSWAIEPWYIKWKESLELRKNEILNKLHKIDFSSETPDYSAVILSTVDIQAGEIPFPKGLFNVFKSFEQPEDFTKLNLTQASYLVYGRHSELAQAKYWTCPKDIREQLHQELKQHSLNNPVAEKVLLEMMQVVADIWDYYGEGKERFFSKIHLEVGRELKKSAKEKESESRNMSGNRAQNKRIRQVLEEFLANNSYNANPKNSDHFERLKIAEDGAEHTKNNDRKFFDNKPYSKKDIEDILKKPHITKEDFEKYKLWIEQGYRSPYSGQMIKLTELFDGSKYNVDHIFPQASITNNSLSNKVVVEVALNKLKSDKTARAFIVSQNGQAYLGVHVCTEEEYINLVKTQFSGTKKMILLSKDIPKGFTSSQLNNTRHIARKAMELLSHIVREPGEIEFRSKNVLPVTGSVTTELKRAWKLDEVWRELVAPRFIRMNELTQSNLFGDWQISKSGEKYFDCNLDESICEKDESYDIKRIDHRHHALDALVVALCTEDHVNYINNINADAKADNYGKQKQIEKYRQTLKRKIKFTKRDDEKDENNWYYMLPGEIRLKGAENSRRVSVIQMSYQYKDFDSFGQDYKKMVMIALQDTFVTFKQNLRVINKTVNRYNNTSNKNKFEKQNTANGQKQNWAIRRSLGKDTFYGKQILEGQEKILIRKALDISFGSDKIKTIADSVGRTKSILFNFLKQFDTVELPFEEAVLYIDALLEKQEFDAIVEENDFGFKSMNDFIDYLRTNNQKYKKSDYSKLNVFIEKVLDRSFRIEKQFEGKIKEHPEIAFTPEAIEEMNKAENIKKLNDGKSHKPIQKVKISRGFGNQRTLSEDEYSVKSKQYVVNDAGSNLYLGVYEIVDKSRLEGNDKLKRRIFKGVNLIELIDFQKENGLTSPCEERLFENEIEYKLIFTLSPDDVVNLEYNDKSYYFVFNNYTESTVYFRPINHAKEIYKTEVDKRIDAKSNKIIGSQENKTEYFNETRIKDFCQKPQIDRLGNISKA

SEQ ID NO: 3400 - protein, 1447 aa, unidentified
  REGION 1..1447: note = Description of Unknown: Cas Enzyme sequence
MKRVLGLDLGTNSIGWALVNEAENNEEKSSIVQLGVRVNPLTVDEQQNFEKGKSITTNADRTLKRSMRRNLQRYKLRRENLIEILKEHHFISDETILSENGNRTTFETCRLRAKAATEEITLGQFARVLLMINKKRGYKSSRKAKSQDEGQLIDGMEIAKKMYHEHLTPGQFCLQLLKNGKKTLPDFYRSDLQSEFDKIFDKQFTFYPYYLSMELKEELRNKKRDAVWAICAKTFKDKGFELVGIKREGNTAEQKLENYLWRAKGLTEKLDLEQIVIVLQQINIQINSSSGYLGAISDRSKELFFNKQTVGEYQMAVLAENPNASLKNMVFYRQDYLDEFNTIWETQSKFHNELTDELKNEIRDIVIFYQRRLKSQKGLISFCEFESRQIEVEIDEKKKIKTVGSRVIPRSSPLFQEYKIWQILNNVEVFGKGKKSKKQKGSTLFNEIEDPLEYGGRRELYQEEKELLATELAVKKELKKSDILKLLFDNDKELDLNFKSIQGNLTQAALFEAYKKIIEESGHEIDVEKKPAEKIIKSIEDIFSAFGYKSDILYFNSDKELDKQPMYQLWHLLYSFEGDNSNTGNEKLINKITELCGFEKEYATILANVTFQDDYGSLSAKAIRKILPYLKVGNKYDVACEYAGYRHSKSSLTKEEIENKILKNRLEILPKNSLRNPVVEKILNQMINVVNGIIDTYGKPDEIRVELARELKKNAKEREKLTAEISKTTKLHEQYKELLTKSPFNLSYVSRNDIIRYKLYEELKDNGYKTLYSNTYISPGAVFSGDFDIEHIIPQSRLFDDSFSNKTLELRSINLEKGNQTAYDFIKEKYGETGNENSLDNYLNHIETLFKQGVISRAKYNKLKMQEKDIPDGFIDRDIRDTQYIAKYAKDMLSDLVKFVVSTTGSITDRLREDWQLVDVMKELNWEKYKSLGLTEEFTNEEGHKIRKIKDWTKRNDHRHHAMDALTVAFTKRSIIQYLNNLNARSDKSSSIYGIEQNELHRNDRNKLLFNPPFALNEFRAEAKKHLENTLISIKAKNKVVTQNINTTKKKGGTSKKIQQTPRGQLHNETIYGSQKQYVTKEETVNAKFDEPKILTVSKLAYRKALLKRLQENGNDPKKAFMGKNSLANNPVYLNELHTEQVPEKVKTVTFETVYTIRKEISPDLKIDKVIDTKIRHILEKRLNEFNDDAKKAFSNLDENPIWLNEKKGISIKRVTISGISNAEALHDKRDKDNNLILDKDGNKQPVDFVSTSNNHHVAVFNVPVLDKNGNHEEDEDGNKKYELQENVVSFYEAVARKNANVPIIDKEYKDKDGNKVEGSKFLFSMKQNEYFVFPKNETREKINEETGEITEEVVVIFNPKEIDLMNPDNYGQISPNLFRVQKFSKVIYGNSAVRDYVFRHHLETTVKDAKELKDISYKSIKSLPIFNDIVKVRVNHIGQIVSVGEY

SEQ ID NO: 3401 - protein, 1422 aa, unidentified
  REGION 1..1422: note = Description of Unknown: Cas Enzyme sequence
MNTILGLDIGTNSIGWALVQHDFGTAGKILGIGSRVVPMDADLLLNFEQGNSISRTAARRQARGARRLRNRYKQRRQRLVAVLQHLGWLPQDFSLGHQLPVSPERLREMQDYFGTARVPADWVVYFLREKGLAEKLGLAELARVLYHMNQRRGFKSNRKAGNDGIAPEATEGEESEAGGPRREKRVAIVKVASVRDTGEMAKRKKIIELTLDKEIAPGLSQGTIQRDTLPEWAGQEMELEIRIIRSKAGARVEFALPDKTKWQELKEALNKNIEEEGVHPGQYFLHKLRNDHTYRIREQIIDRKRYEDEMRAIWAQQTAHHPELSSTEALPALADLLYKHNEEKRRELLANDLLYLIACDIIYFQRPLKSQKDSIGECRYEKKNVVVTMERGGKKEERQPGVKVAPASSPAFQEFRIWKTIHQLKAIKLKEHVGEQWLADVDVTEDHLTAEAKEKLFRLFDSKEEISGGEILKTLGLSPSGFKLNYESDTKFKGAETKQAFRKAFKRSGYTAEGKALLDDPKAFEQLWHLVYSVEDEDAIRKSAMKKLKLPEAVATAVSKMPPFALKYAAFSAKALGKMLPLMRVGSYWKEEDIHPDAFARIHRLLNAEVDADLDDIMRDRIEKHRAAWGLDSVAAHQGLPDWLAAYLVYGRHSERPAGAVCNSALDLRGIEPKSLRNPIVEQIANETMQVVKDVWTRWDFWSLREDQRPEIRVEMARDLKKTAAEREKINDANKRNREDKERIKAILRELRYGNPDSLSDVEKLRLLEENGNYRGRVMQEKFFKKPTEPTAAEVQTYRLWMEQACVSPYTGKPIMLSKLFDRREYDVDHIFPQSRFYDDSMANKVIVETWANADKGSRTAMQYIQHGTQKQGRTLLSPQDYIAHVERTFFRKKRSNLLAAEIPKGFIQRQLNDTRHISRRVNELLYQFTPKVAASSGQITDELKHQWGLGKAMKESLKPRFERLEKIVGEPLIEYRRNGDGNTDLILKGYEKRIDHRHHAVDALVVACTLQEHVQYINTLEAQKAGEEPKVKYAKLLKGDKAREFKMPWPAFRPEALAALDGIIVSHKNRHRTLVRGKNRYTKYVVDEAGNWTKATVQQEKGPLLSVRKPLHKETIAGTVQFREYRKGSMDEALRSPKHIADPKVKRLLRALMDEFGPNPKKIKAAVKARALTDSNDKSIDKVTLWAMEPYALNRVALDASFTKDKIAKIAEYKTDKERGLKHLLLAHLEKWNGDSKAAFTGEGLEDLAKSAGKPIEKVSIYEPIGGKFEIRPGQLVEAAKGTNLFFVIYTDVESGARTYRTLGLQEVIAAKAQGLPIVPPEEGTRHFTLSPSDLVYVPEKDEDTKAINWSDTAGISGKVYKMVSCTGTQCMFVPHSVSKAVVDKKEFGSGNKEERAWDGQMIKQVCIKLKHDRLGNISPA

SEQ ID NO: 3402 - protein, 1467 aa, unidentified
  REGION 1..1467: note = Description of Unknown: Cas Enzyme sequence
MKYIKYILGLDIGSNSIGWALIQLFIEEKQGKIIATGSRIIPMDQGLLGDFEKGNAVSQTAERTFYRSARKLRARHLLRRERLHRVLHILGFLPSHYDKQIDFSKRYGKFIDNTEPKIAYNEGKFLFMDSFQEMLADFKSHQPDLFYTKKNGEESKIPYDWTIYYLRKKALSQKISKEELAWIILNFNQKRGYYQLRGEEEAENPNKEVAYYSLMVTDVTAEAPNKKGEIWYSIQLENGWVYRRTSKIPLDDWKGKVRDFIVTTELEEDGSVKRDKDGKEKRSFRAPSEDDWNLLKKKTEQDINTSRKTVGCYIYDHILQNPNEKIKGKLVRTIERKYYKEELKAILEKQIALQPELFTDQLFTDCIRELYSKNEAQQRNLAARDFVHLLVEDIIFYQRPLRSQKSTLANCSLESRSYIDKDSHTRKEAPLKVCPKSNPYYQEFRVLQWLQNLKIYEIDTDQEVTHEFIKTLEDKQQLFDFLMNQKEIDCEELLKYFLNQTYPNAKEKALKSELKKWKDTYRWNYVYDIGEKSSKKYPMNETRYELKRHLEKVANLPDDFLSSEVEYLLWHLIYSVSDKVAYEKGLKKFAQKHHLDKDSFVESFKKFKPYPSEYGSFSEKAIRKLLPLMRFGAYWDFNHIDKNTQKRIEDLITGVENEEIRTILREKAKKYQLEKETDFQDLPLWLAQYIVYNRHAEASSLEKWTSVNDLDTYLNEFKQHSLRNPIVEQVVTETLRVVRDIWQQYGQGQADFFDEIHIELGRELKKTAKEREELSKQNQKNEDTNLRIKALLAELGEDNTIENVRPYSLMQQELLKIYEEGVFSSSMEIEEEIEKIHKKASPSKTELQRYKLWLEQKYKSPYTGQIISLKRLFTEDYEIEHIIPQSRYYDDSLSNKVICESAVNKLKGNQLGLEFIKNHYGEKVHAAGKEVSILTEEQYKEFVKNHYANNSGKMKKLLLEDIPEKMVARQMNDTRYISKYISEILSRIVRSDERDEGVNSKNVILCTGKITSALKQDWGVNDVWNDLILPRFERMNALTQSTLFTTYNEKYQKYLPTVPMEYSNGFQKKRIDHRHHAMDAIIIACATREHINYINNQHASEKGKSKQEKQKSRIDLRTILCEKKYNDNAEENYSWIFKKPWAHFTQEVRTALEGIVVSFKQNLRVINKATNYYERWVEENGRYIKKMVKQEGTNWAIRKPLHEETISGKIYLDREEITKNDILTATRKTVDSSFDEKRIKKITDTGIQKILLNYLKYKGSPEIAFSPEGLEELNKNLSIYNDGKSHKPIYKVRIYEKGSGRFALGEKGRKYKKYVQGAPNLYFGIYQGANKRSFATIPLNEVIERQKQGRSSVPEYNEKGDPLLFSLSPNDLVYVPVKGENIENIDFQNFSKEQKERIYNVNDFSSTCYFTPNRIAKAIFPKEVDLQRKGDKLSGSYDTKTASLEGIQIKEVCIKLKVDRLGNISKA

SEQ ID NO: 3403 - protein, 1457 aa, unidentified
  REGION 1..1457: note = Description of Unknown: Cas Enzyme sequence
MKRILGLDLGSNSIGWGLIEQDFGQREGKIIAAGSRIIPMDQGLLGDFEKGNTVSQTAERTFYRSARKLRARHLLRRERLHRVLHILGFLPTHYDKQIDFSKRYGKFIGDIEPKIAYNDGKFLFMDSFQEMLSDFRSHQPDLFYTKRNGEESKIPYDWTIYYLRKKALSQKISKEELAWIILNFNQKRGYYQLRGEEEVENPNKEVTYYSLMVTEVTAEAPNKKGEIWYSIQLENGWVYRRTSKIPLDNWRGKSRDFIVTTELEEDGSVKRDKEGKEKRSFRAPDENDWNLLKKKTEQDINTSQKTVGTYIYDHLLQNPNEKIKGKLVRTIERKYYKEELKAILEKQVALQPELFTDQLFADCIRELYSKNEAQQRNLAARDFVHLFVEDIIFYQRPLRSQKSTIANCSLESRSYIDKDSHTRKEVSLKVCPKSNPYYQEFRVLQWLQNLKIYEIESDREVTHELIKTLEDKQQLFDFLMAQKEIDCEELLKYFLSLTYPNAKEKALKSELKKWKDTYRWNYVYDIGEKSSKKYPMNETRYDLKRYLERVANLPDDFLSSEVEYMLWHLIYSVTDKVAYEKGLKKFAQKHHLDEDSFVESFKKFKPYPSEYGSFSEKAIRKLLPLMRFGSYLDFNHIDKNTQKRIEDLITGVENEEIRTILREKAEKYQLEKETDFQNLPLWLAQYIAYNRHAEASSLEKWTSVNDLETYLNEFKQHSLRNPIVEQVITETLRVVRDIWQQYGQGKADFFDEIHIELGRELKKTAKEREELSKQNQKNEDTNLRIKALLAELGEDSTIENVRPYSLMQQELLKLYEEGVFSSSMEIEDDIEKIHKKATPNKAELQRYKLWLEQKYKSPYTGQIISLKRLFTEDYEIEHIIPQSRYYDDSLSNKVICESAVNKLKGNQLGLEFIKNHYGEKVHAAGKEVSIFTEEQYKEFVKNHYANNSGKMKKLLLENIPEKMVARQMNDTRYISKYISEILSKIVRADERDEGVNSKNVILCTGKITTALKQDWGINDVWNDLILPRFERMNDLTQTSLFTSYNEKYQKYLPTVPMEYSNGFQKKRIDHRHHAMDAIIIACATREHINYINNQHALEKGKNKEEKQKSRIDLRTILCEKKYNDNAEENYNWVFKKPWDTFTQEVQVALEGIVVSFKQNLRVINKATNYYEHWVEESGKLIKKMVKQEGTNWAIRKPLHKETVSGKITLEREKVSKGKILTATRKAIDSTFTEKVIQGITDTGIQKILLNYLKFKKSPEIAFSPEGLEELNKNITLYNDGKPHKPIYKVRIFEQGSKFPLGEVGNKSQKYVEAAKGTNLYFGVYQGKDKRSFATIPLNEVIERQKQGLSSVPEYNEKGDPLLFSLSPNDLVYVPIVGEIIEDIDFQNLSKEQKERIYKTVSFTGYQCFFIRETVAIPIVNKIEYSPLNKMERSITGIMIKEVCIKLKVNRLGNISKA

SEQ ID NO: 3404 - protein, 1431 aa, unidentified
  REGION 1..1431: note = Description of Unknown: Cas Enzyme sequence
MKRILGLDLGSNSIGWGLIEQDFGQREGKIIAAGSRIIPMDQGLLGDFEKGNTVSQTAERTFYRSVRKLRQRHLLRRERLHRVLHILGFLPTHYDKQIDFSKRYGKFIGDIEPKIAYNDGKFLFMDSFQEMLSDFKSHQPDLFYTKRNGEESKIPYDWTIYYLRKKALSQKISKEELAWIILNFNQKRGYYQLRGEEEVENPNKEVTYYSLMVTEVTAEAPNKKGEIWYSIQLENGWVYRRTSKIPLDNWRGKSHDFIVTTELEEDGSVKRDKEGKEKRSFRAPDENDWNLLKKKTEQDINTSQKTVGTYIYDHLLQNPNEKIKGKLVRTIERKYYKEELKAILEKQIALQPELFTDQLFADCIRELYSKNEAQQRNLAARDFVHLLAEDIIFYQRPLRSQKSTIANCSLESRSYIDKDSHTRKEAPLKVCPKSNPYYQEFRVLQWLQNLKIYEIDTDQEVTHEFIKTLEDKQQLFDFLMAQKEIDCEELLKYFLSLTYPNAKEKALKSELKKWKDTYRWNYVYDIGEKSSKKYPMNETRYDLKRYLERVANLPDDFLSSEVEYMLWHLIYSVTDKVAYEKGLKKFAQKHHLDEDSFVESFKKFKPYPSEYGSFSEKAIRKLLPLMRFGSYWDFNHIDKNTQKRIEDLITGVENEEIRTILREKAEKYQLEKETDFQNLPLWLAQYIAYNRHAEASSLEKWTSVNDLETYLNEFKQHSLRNPIVEQVVMETLRVVRDIWQQYGQGQASFFDEIHIELGRELKKTAKEREKLSKQNQKNEDINLSIKEKLKELKKYNTRAYSITHQEKYKLWLEQKHISPYTGQIISPENLFTDNYEIEHIIPQSRFFDDSLSNKVVCESIVNKAPYKDRQLGLEFIKNQGGRIVKELSKENKTIKIFTEKQYRTFIKEHYSNNPAKTKKLLLEEISEKMVARQMNDTRYISKFISEILSKIVRSDKQDEGVHSKNVILCTGKITSILRQDWGLNDVWDNLILPRFERMNNLLQKEKFTIYSIEKQKKIPVVPINDQFKSFQKKRIDHRHHALDAIIIACVTGEHINYINNQHALEKGKDKKEKQKEHDKLREKLCIKKYNKGSEENYSWIFKKPWNTFTQEVRAVLEGIVVSFKQNLRVINKATNYYERWVEENGKYIKKMVKQEGTNWAIRKPLHEETISGKIYLDREKITKNDILTATRKTVDSSFNEERIKKITDTGIQKILLNYLEYKGSPEIAFSPEGLEELNKNLSIYNDGKPHKPIYKVRIYEKGSGRFALGEKGRKYKKYVQGAPNLYFGIYQGANKRSFVTIPLNEVIERQKQGRPSIPEYNEKGDPLLFSLSPNDLVYVPIKGEIIEDIDFQNLSNEQKERIYNVNDFSSTCYFTPNRIAKAIFPKEVDLQRKGDKLSGSYDTKTASLEGIQIKEVCIKLKVDRLGNLSKA

SEQ ID NO: 3405 - protein, 1470 aa, unidentified
  REGION 1..1470: note = Description of Unknown: Cas Enzyme sequence
MKYIKYILGLDIGSNSIGWALIQLFIEEKQGKIIATGSRIIPMDQGILGNFEKGNTVSQTAERTFYRSARKLRARHLLRRERLHRVLHILGFLPTHYDKQIDFSKRYGKFVDNTEPKIAYNERKFLFMDSFQEMLADFKIHQPDLFYTKKNGEESKIPYDWTIYYLRKKALSRKISKEELAWIILNFNQKRGYYQLREEEENKENDFEIISSKIIFVIKKDKDKKYNKYWYDIILENGLVYQAAFYNDFVYNWINQDREFIIERISLKNGTEKVKLSYLPTFDEIDKMDKKEQDKYYKKIKIKTENSIGNKTVGCYIYDHILQNPNEKIKGKLVRTIERKYYKEELKAILEKQVALQPELFTDQLFADCIRELYSKNEAQQRNLAARDFVHLFVEDIIFYQRSLRRQKSTLANCSLESRSYIDKDSHTRKEAPLKVCPKSNPYYQEFRVLQWLQNLKIYKIDTNQEVTHEFIKTLEDKQQLFDFLMNQKEIDCEELLKYFLNQTYPNAKEKALKSELKKWKDTYRWNYVYDIGEKSSKKYPMNETRYELKRHLEKVANLPDDFLSSEVEYLLWHLIYSVKDKVAYEKGLKTFAQKHHLDKDSFVESFKKFKPYPSEYGSFSEKAIRKLLPLMRFGAYWDFNHIDKNTQKRIEDLISGVENEEIRTILREKAEKYQLEKETDFQDLPLWLAQYIVYNRHAEASSLEKWTSVNDLETYLNEFKQHSLRNPIVEQVVTETLRVVRDIWQQYGQGQADFFDEIHIELGRELKKTAKEREELSKQNQKNEDTNLRIKALLTELGEDSTIENVRPYSPLQQELLKIYEEGVFSSSMEIEDDIEKIHKKATPSKTELQRYKLWLEQKYKSPYTGQIISLKRLFTEDYEIEHIIPQSRYYDDSLSNKVICESAVNKLKGNQLGLEFIKNHYGEKVHAAGKEVSILTEEQYKEFVKNHYANNSGKMKKLLLEDIPEKMVARQMNDTRYISKYISEILSRIVRSSERDEGVNSKNVILCTGKITSALKQDWGVNDVWNDIILPRFERMNALTQSTLFTTYNEKFQKYLPTVPMEYSNGFQKKRIDHRHHAMDAIIIACATREHINYINNQHALEKGKSKQEKQKSRIDLRTILCEKKYNDNAEENYSWIFKKPWDTFTQEVQAALEGIVVSFKQNLRVINKATNYYERWVEENGRYIKKMVKQEGTNWAIRKPLHEETISGKIYLDREKITKNDILTATRKTVDSSFDEKRIKKITDTGIQKILLNYLKYKGSPEIAFSPEGLEELNKNLSIYNDGKPHKPIYKVRIYEKGSGRFALGEKGRKYKKYVQGAPNLYFGIYQGANKRSFATIPLNEVIERQKQGRSSVPEYNEKGDPLLFSLSPNDLVYVPIKGENIENIDFQNFSKEQKERIYNVNDFSSTCYFTPNRIAKAIFPKEVDLQRKGDKLSGSYDTKTASLEGIQIKEVCIKLKVDRLGNLSKA

SEQ ID NO: 3406 - protein, 1478 aa, unidentified
  REGION 1..1478: note = Description of Unknown: Cas Enzyme sequence
MFSQRNNPYCELLSNLKQRYIKSFVFPNLYFKKILTKFGIDCKDLAMKYILGLDLGSNSIGWALIEQDFDNKQGKILGLGSRIIPMDQGILGEFERGNKVSQTAKRTEFRGIRRLRERHLLRRERLHRVLHLLGFLPAHYDAQIDFTKRFGKFIGDSEPKLAYNNEGFIFLESFNEMVEDFKKYQSQLFYIKSNGEESKIPYDWTIYYLRKKALQEKISKEELAWIILNFNQKRGYYQLRGEEEEKSTKNVEFYSLEITDVIADTPNNKGEIWYSIHLENGWVYRRASKISLEDWKGKVRDFIVTTELNEDGSIKLDKEGKEKRSFRAPNEDDWNLLKKKTEQNITLSGKTVGEYIYDHLLQNPNQKIKGKLVRTIERKFYKEELKAILEKQVALQPELFTEELFVDCVRELYKNNEIRQNSLSSKDFVHLFLNDIIFYQRPLRSQKSNISSCSLEYRFCIDKETKQRRKTYLKVISKSNPYYQEFRVLQWLSNLKIYRKEDDKDVTSEFISSIEDKETLYEFLMSEKEVSNKSILEFLLMKSLREMYPFAKETELKKELKKEIIKYRWNYVYEEENDSKKYPMNETGYEIRKRLKEVKNIPDNFLTRDIEYQIWHIIYSVTDKYEFEKALMKFAQKHNLDAESFVENFKKIKPYPSDYGAFSEKAIKKLLPLMRFGKYWNYSNISEPVQVRISDIINGVDNENIKTIVREKAEKFQLNQEIDFQGLPLWLAQYVVYGIHSEAADIQRWTSPSDLEEYLKGFKQHSLRNPIVEQVVTETLRVVKNIWEYYGKGEENFFDEIHIELGRELKKTAEERNTMTKEINKNEETNLKVKKELQRLFENKSVENVRPYSPIQQEKYRLWLEQEERSPYTGQPIPLSKLFTDEYQIEHVIPQSRFFDDSLSNKVICEAAVNAEKGAQLGLEFIKKHGGEIIEIGLNKKVTILNEKEYKELVNKHFANNRGKKAKLLMEEIPEKMVERQLNDTRYISKFISQILSNIVRSPQEDEGVNSKNIIPCTGKITAALKQDWGLNDVWNDLILPRFERMNNLTQTELFTTYSEKYQKKIPTVPLEHAKGFQKKRIDHRHHAMDALVVTCATRSHINYMNNQHALDKHKTKEEKQNARIDLRTVLCEKKYNDNAEDNYNWTFKKPWNTFTQDVRSALEMIVVSFKQNLRVINKATNYYEKWVEEKGKKVKKKVKQEGINWAIRKPLHEQTVSGKITLERVKIGKGEILTADRKFIDSSFDTKKISKITDTGIQKILLNYLAYKGSSELAFSPEGLEELNKNIYLYNDGKPHKPIYKVRSYEKGSGRFVLGERGAKSKKYVQGAPNLYFGIYQGKEKRSYATIPLDEVIERQKQGLTSVPELNEKGEKLLFSLSPNDLVYVPMESENIENIDFTNLSKEQRERLYNVNDFSSTCYFVPNRIAKAIYPKEVDMQRKGDELSGSYDTKTASIEGVQIKESCIKLKIDRLGNISKA

SEQ ID NO: 3407 - protein, 1514 aa, unidentified
  REGION 1..1514: note = Description of Unknown: Cas Enzyme sequence
MSFLYLFKKILTKFDIDCKDLAMKYILGLDLGSNSIGWALIEQDFDNKQGKILGLGSRIIPMDQGILGEFERGNKVSQTAERTGFRGVRRLRERYLLRRERLHRVLHLLGFLPPHYDAQIDFTKRFGKFIGDSEPKLAYNNEGFIFLESFNEMVEDFKKHQPQLFYIKSNGEESKIPYDWTIYYLRKKALQEKISKEELAWIILNFNQKRGYYQLRGEEEEKSTKNVEFYSLKITDVIADTPNNKGEIWYSIHLENGWVYRRASKISLEDWKGKVRDFIVTTELNEDGSIKLDKEGKEKRSFRAPSEDDWNLLKKKTEQNITLSGKTVGEYIYDHLLQNPNQKIKGKLVRTIERKFYKEELKAILEKQVALQPELFTEELFVDCVRELYKNNEIHQNSLSSKDFVHLFLNDIIFYQRPLRSQKSNISSCSLEYRFCIDKETKQRRKTYLKVISKSNPYYQEFRVLQWLSNLKIYRKEDDKDVTSEFISSIEDKETLYEFLMSEKEVSNKSVLEFLLMKSLRETYPFAKETELKKELKKEITKYRWNYVYEEGNDSKKYPMNETGYEIKKRLKEVKNIPDNFLTKDIEYQLWHIIYSVTDKYEYEKALMKFAQKHNLDAESFVENFKRIKPYPSDYGAFSEKAIKKLLPLMRFGKYWNYSNISEPVQARISDIVNGVDNESIKTIVREKAEKFQLSQEADFQGLPLWLAQYVVYGIHSEAADIQRWTSPSDLEEYLKGFKQHSLRNPIVEQVVTETLRVVKDIWEYYGKGEQNFFKEIHIELGRELKKTAEERNRMTREINENEETNLKVKKKLQELFEDKSAENVRPYSPIQQEKYKLWQEQKERSPYTGQPIPLSKLFTDDYQIEHVIPQSRFFDDSLSNKVICEAAVNAQKGAQLGLEFIKKHGGEIIEIGLNKKATVLNEKEYKELVNELFANNRGKKAKLLMEEIPEKMVERQLNDTRYISKFISQILSNIVRSPQEDEGVNSKNIIPCTGKITAALKQDWGLNDVWNDLILPRFERMNNLTQTELFTTYSEKYQKKIPTVPLEHAKGFQKKRIDHRHHALDALVVACATRSHINYMNNQHALDKHKAKEEKQNARIDLRTVLCDKKYNDNAEDNYNWTFKKPWNTFTQDVRSALEMVVVSFKQNLRVINKATNYYEKWREEKGKMVKKKVKQEGINWAIRKPLHDDLPYGEIKYQTNYLKISENISKRKFIIDEFIRNQVERIYVENHSKNNLTKKYLKEYPVIDEKGKEVVSTDFRIEVIKYRKRKPISILSDRNSRTGITTIEKMLQTINKIADNVLKKELLLYLEQNNNDIDKAFAVEGIERFNSERKTPVYRLPFIEDGEKKIKLGSKGKYVEAAKGTNLFFGIYQGKEKRSYATIPLDEVIERQKQGLTSVPEFNEKGEKLLFSLSPNDLVYVPIEGEDTESIDFTNLSKEQRERVYKTVSFTGSECFFIKSSISSLIKNYDAKTKIGELGSLNKLEITIPDHIRIKEFCIKLKIDRLGNISKV

SEQ ID NO: 3408 - protein, 1432 aa, unidentified
  REGION 1..1432: note = Description of Unknown: Cas Enzyme sequence
MKYILGLDLGSNSIGWALIEQDFDNKQGKILGLGSRIIPMDQGILGEFERGNKVSQTAERTGFRGVRRLRERHLLRRERLHRVLHLLGFLPPHYDAQIDFTKRFGKFMGDSEPKLAYNNEGFIFLESFNEMVEDFKKHQPQLFYIKSNGEESKIPYDWTIYYLRKKALQEKISKEELAWIILNFNQKRGYYQLRGEEEEKSTKNVEFYSLEITDVKADTPNNKGEIWYSIHLENGWVYRRASKISLEDWKGKVRDFIVTTELNEDGSIKLDKEGKEKRSFRAPNEDDWNLLKKKTEQNITLSGKTVGEYIYDHLLQNPNQKIKGKLVRTIERKFYKEELKAILEKQVALQPELFTEELFVDCVRELYKNNEIHQNSLSSKDFVHLFLNDIIFYQRPLRSQKSNISSCSLEYRFCIDKETKQRRKTYLKVISKSNPYYQEFRVLQWLSNLKIYRKEDDKDVTSEFISSIEDKETLYEFLMSEKEVSNKSVLEFLLMKSLREIYPFAKETELKKELKKEITKYRWNYVYEEENDNKKYPMNETGYEIKKRLKEVKNIPDNFLTKDIEYQLWHIIYSVTDKYEFEKALMKFAQKHNLDAESFVENFKRIKPYPSDYGAFSEKAIKKLLPLMRFGKYWNYSDISEPVQARISDIINGVDNESIKTIVREKAEKFQLSQEADFQGLPLWMAQYIVYGIHSEAVDIQRWTSPSDLEEYLKGFKQHSLRNPIVEQVVTETLRVVKDIWEYYGKGEENFFGEIHIELGRELKKTAEERNRMTREINENEETNLKVKKELQQIFENKSAENVRPYSPIQQEKYKLWLEQKERSPYTGQPIPLSKLFTDEYQIEHVIPQSRFFDDSLSNKVICEAAVNAEKGAQLGLEFIKRHGGEILDIGLNKKVTVLNEKEYKELVNELFANNRGKKAKLLMEEIPEKMVERQLNDTRYISKFISQILSNIVRSPQEDDGVNSKNIIPCTGKITAALKQDWGLNDVWNDLILPRFERMNNLTQTELFTTYSEKYQKKIPTVPLEHAKGFQKKRIDHRHHALDALVVACATRSHINYMNNQHALDKHKAKEERQNARIDLRTVLCEKKYNDNAEDKYNWTFKKPWNTFTQDVRSALEMVVVSFKQNLRVINKATNYYEKWVEEKGKKVKKKVKQEGINWAIRKPLHKETISGKITLERVKVGKGKILTATRKSIDPSFTEKTIASITDTGIQKILLNYLAYKGSPELAFSPEGIEEMNKNIAKYNDGKTHQPIYKVRIFEEGSKFPLGEIGTKSQKYVEAAKGTNLFFGIYQGKEKRSYATIPLDEVIERQKQGLTSVPEFNEKGEKLLFSLSPNDLVYVPVEGEDTESIDFTNLSKEQRERVYKTVSFTGNQCFFVKQTIASLIKSYDPQTKIGELESKNKLEVTICSRIKIKESCIKLKIDRLGNISKA

SEQ ID NO: 3409 - protein, 1431 aa, unidentified
  REGION 1..1431: note = Description of Unknown: Cas Enzyme sequence
MKHILGLDLGSNSIGWALIEQDFDNKQGKILGLGSRIIPMDQGILGEFERGNKVSQTAERTKFRGIRRLRERHLLRRERLHRVLHLLGFLPAHYDAQIDFTKRFGKFIGDSEPKLAYNNEGFIFLESFNEMVEDFKKHQPQLFYIKSNGKESKIPYDWTIYYLRKKALYEKISKEELAWIILNFNQKRGYYQLRGEEEEKSTKNVEFYSLEITDVIADTPNNKGEIWYSIHLENGWVYRRASKISLEDWKGKVRDFIVTTELNEDGSVKLDKEGKEKRSFRAPNEDDWNLIKKKMEQNIVFSGKTVGEYIYDHLLQNPNQKIKGKLVRTIERKFYKEELKAILEKQVALQPELFTEELFVDCVRELYKNNEIHQNSLFSKDFVHLFLNDIIFYQRPLRSQKSNISSCSLEYRFCIDKETKQRRKTYLKVISKSNPYYQEFRVLQWLSNLKIYRKEDDKDVTSEFISSIENKEILYEFLMSEKEVSNKSVLEFLLMKSLRDIYPFAKETELKKELKKEITKYRWNYVYEEENDNKKYPMNETGYEIKKRLKEVKNIPDNFLTKDIEYQLWHIIYSVTDKYEYEKALMKFAQKHNLDTESFVENFKKIKPYPSDYGAFSEKAIKKLLPLMRFGKYWNYSDISEPVQARISDIINGVDNESIKTIVREKAEKYQLNQEDDFQGLPLWLAQYVVYGIHSEAADIQRWTSSSDLEEYLKGFKQYSLRNPIVEQVVTETLRVVKDIWEYYGKGEQNFFDEIHIELGRELKKTAEERNRMTREINENEETNLKVKKELQRLFENKSVENVRPYSPIQQEKYRLWMEQEKESPYTGQPIPLSKLFTDNYQIEHVIPQSRFFDDSLSNKVICEAAVNAQKGAQLGLEFIKKHGGEIIEIGLNKKVTILNEKEYKELVNELFANNRGKKAKLLMEEIPEKMIERQLNDTRYISKFISQILSNIVRSPQEDNGVNSKNIIPCTGKITAALKQDWGLNDVWNDLILPRFARMNNLTQTELFTTYSEKYQKKIPTVPLEHAKGFQKKRIDHRHHAMDALVVACATRSHINYMNNKHALGKHKAKEEKQNARIDLRTVLCEKKYNDNAEDNYNWTFKKPWNTFTQDVRSALEMVVVSFKQNLRVINKATNYYEKWVEERGKMVKKKVKQEGINWAIRKPLHEQTVAGKITLERVKIGKGEILTADRKFIDSSFDTKKISKITDTGIQKILLNYLAYKGSSELAFSPEGLEELNKNIYLYNDGKPHKPIYKVRSYEKGSGRFVLGERGAKSKKYVQGAPNLYFGIYQGKEKRSYATIPLDEVIERQKQGLTSDPEFNEKGEKLLFSLSPNDLVYVPMEGEDAESIDYANLSKEQRERVYKTVSFTGSECFFIKSSISSLIKNYDAKTKIGELGSLNKLEITIPDHIRIKEFCIKLKIDRLGNISKA

SEQ ID NO: 3410 - protein, 1421 aa, unidentified
  REGION 1..1421: note = Description of Unknown: Cas Enzyme sequence
MKHILGLDLGSNSIGWALIEQDFDNKQGKILGLGSRIIPMDQGILGEFERGNKVSQTAERTKFRGIRRLRERHLLRRERLHRVLHLLGFLPAHYDAQIDFTKRFGKFIGDSEPKLAYNNEGFIFLESFNEMVEDFKKHKPQLFYIKSNGEESKIPYDWTIYYLRKKALQEKISKEELAWIILNFNQKRGYYQLRGEEEEKSTKNVEFYSLEITDVIADMPNNKGEIWYSIHLENGWVYRRASKISLEDWKGKVRDFIVTTELNEDGSVKLDKEGKEKRSFRAPNEDDWNLLKKKTEQNITLSEKTVGEYIYDHLLQNPNQKIKGKLVRTIERKFYKEELKAILEKQVTLQPELFTEELFVDCVRELYKNNEIHQNSLSSKDFVHLFLNDIIFYQRPLRSQKSNISNCSLEYRFCIDKETKQRRKTYLKVISKSNPYYQEFRVLQWLSNLKIYRKEDDKDVTSEFISSIEDKETLYEFLMSEKEVSNKSVLEFLLMKSLREIYPFAKETELKKELKKEITKYRWNYVYEEENDNKKYPMNETGYEIRKRLKEVKNIPDNFLTKDIEYQLWHIIYSVTDKYEYEKALVKFAQKHNLDAESFVENFKKIKPYPSDYGAFSEKAIKKLLPLMRFGKYWNYSDISEPVQARISDIINGVDNESIKTIVREKAEKFQLSQEADFQGLPLWMAQYIVYGIHSEAADIQRWTSPSDLEEYLKGFKQHSLRNPIVEQVVTETLRVVKDIWEYYGKGEENFFKEIHIELGRELKKTAEERNRMTREINANEETNLKVKKELQELFENKSAENVRPYSPIQQEKYRLWLEQKEKSPYTGQPIPLSKLFTDEYQIEHVIPQSRFFDDSLSNKVICESAVNAEKGALLGLEFIKEHRGKIVDIGLNKEVRILNEKEYKELVNELFANNRGKKAKLLMEEIPEKMVERQLNDTRYISKFISQILSNIVRSPQEDNGVNSKNIIPCTGKITAALKQDWGLNDAWNDLILPRFERMNNLTQTELFTTYSEKYQKKIPTIPLEHAKGFQKKRIDHRHHALDALVVACATRSHINYMNNQNALDKHKAKEEKQNARIDLRKDLCEKKYNDNAEDKYNWTFKKPWNTFTQDVRSALEMVVVSFKQNLRVINKATNYYEKWVEERGKMVKKKVKQEGINWAIRKPLHKETVSGKITLERVKVGKGKILTATRKSIDSSFTEKTIASITDTGIQKILLNYLAYKGSPELAFSPEGIEEMNKNIAKYNDGKDHQPIYKVRVFEEGSKFSLGEIGTKSQKYVEAAKGTNLFFGIYQGKEKRSYATIPLDEVIERQKQRLTSVPELNEKGEKLLFSLSPNDLVYVPMEGEDTENIDFTNLSKEQRERVYKTVSFTKNRLYGIPNIVAVSIVNKMEYTQLNKIEFLKEKEFCIKLKIDRLGNISKP

SEQ ID NO: 3411 - protein, 1467 aa, unidentified
  REGION 1..1467: note = Description of Unknown: Cas Enzyme sequence
MFSQRNNPYCELLSNLKQRYIKSFVFPNLYFKKILTKFGIDCKDLEMKHILGLDLGSNSIGWALIEQDFDNKQGKILGLGSRIIPMDQGILGEFERGNKVSQTAERTGFRGVRRLRERHLLRRERLHRVLHLLGFLPAHYDAQIDFTKRFGKFIGNSEPKLAYNNEGFIFLESFNEMVEDFKKHQPQLFYIKSNGEESKIPYDWTIYYLRKKALQEKIRKEELAWIILNFNQKRGYYQLRGEEEEKSTKNVEFYSLEITDVIADTPNNKGEIWYSIHLENGWVYRRASKISLEDWKGKVRDFIVTTELNEDGSIKLDKEGKEKRSFRAPNEDDWNLLKKKTEQNIVFSGKTVGEYIYDHLLQNPNQKIKGKLVRTIERKFYKEELKAILEKQVALQPELFTEELFVDCVRELYKNNEIHQNSLSSKDFVHLFLNDIIFYQRPLRSQKSNISSCSLEYRFCIDEETKQRRKTYLKVISKSNPYYQEFRVLQWLSNLKIYRKEDDKDVTSEFISSIEDKETLYEFLMSEKEVSNKSVLEFLLMKLLRETYPFAKETELKKELKKEITKYRWNYVYEEENDSKKYPMNETGYEIKKRLKEVKNIPDNFLTKDIEYQLWHIIYSVTDKYEFEKALMKFAQKHNLDAESFVENFKRIKPYPSDYGAFSEKAIKKLLPLMRFGKYWNYSNISEPVQARISDIINGVDNESIKTIVREKAEKFQLNQEDDFQGLPLWLAQYIVYGIHSEAADIQRWTSPSDLEEYLKGFKQHSLRNPIVEQVVTETLRVVKDIWEYYGKGEQNFFKEIHIELGRELKKTAEERNRMTREINANEETNLKVKKELQQIFENKSAENVRPYSPIQQEKYKLWLEQKERSPYTGQPIPLSKLFTDEYQIEHVIPQSRFFDDSLSNKVICEAAVNAQKGAQLGLEFIKKHGGEIIEIGLNKKVTILNEKEYKELVNKHFANNRAKKAKMLMEEIPEKMVERQLNDTRYISKFISQILSNIVRSPQEDNGVNSKNIIPCTGKITAALKQDWGLNDVWNDLILPRFERMNNLTQTELFTTYSEKYQKKIPTVPLEHAKGFQKKRIDHRHHALDALVVACATRSHINYMNNQHALDKHKAKEEKQNARIDLRTALCEKKYNDNAEDKYNWTFKKPWNTFTQDVRSALEMVVVSFKQNLRVINKATNYYEKWVEGGGKMVKKKVKQEGINWAIRKPLHKETISGKITLERVKVGKGKILTATRKSIDPSFTEKTIASVTDTGIQKILLNYLAYKGSPELAFSPEGIEEMNKNITQYNDGKDHQPIYKVRIFEEGSKFPLGEIGTKSQKYVETAKGTNLFFGVYQGKEKRSYATIPLDEVIERQKQGLTSVPEHNEKGEKLLFSLSPNDLVYVPVEGEDTENIDFTNLSKEQREMIYKIVNFSKKRLYGVPNIVAVPIIDKMEYTQYNKIEFLKEKETCIKLKIDRLGNISKV

SEQ ID NO: 3412 - protein, 1002 aa, unidentified
  REGION 1..1002: note = Description of Unknown: Cas Enzyme sequence
MSDILGLDLGTNSIGWFCVNAKNKKVIDMGIRVFPEGVNRNNKGKEISKNAKRREARQSRKQYDRKRQRKDKLIQILKQHEMFPQRKEDEANFFKINPYDIRKRGLYEKLTKFEFGRTLYHINQRMGFKSSRKSQKEKDGVVKEDTTKLQQQIKDSGCLTIGEYLAGLKPMEQRIRDRYTLRQMYEEEFELLWERQKKYYPELTEDIKEQLKDKTIFYQRPLKSVARFIGNCTLEPSKKRCRKDSFEFQRYRILEQVNRLRFIDENGVEHSFSRKPDEEFDNDIKEKRDILIGELEQKEELKFDAVRKLLKFYSNTFINLERSEKRLIGNRTEKEYSKVFGKDWFDFPQEKKDKIYQVITQSDNPDWLKEYAQKNWGLNQEKAEKLAVKIDFEEGYASLSKKAINKLLPYLKDGLSLSDAKEKAGYGNKENYRNVKEILDNLRNPIVAHTLYEMMRLMRNIERVYGKPDLIKVELARELKLPAKRRDEIRLENLKRKAENKEVRRKLEGMGIKPTGDALVTYKLWEECKEICPYTGDSIPLNAVFGDSPTFQIEHIIPYQHSLDDSYMNKTLCRIDENKNKGNRTPYEAYNRTQQYDEILKRIKVLPYAKQRRFTQKEISNDFISRQLNDTAYISKVSRELLQSLGYKAQITKGQATASLRYLWGLNNLLQKNPQGQNLKNREDHRHHTIDAAVVAMTDTDTLQRLSSYNKYDRSPSKKGFPIPWEKFREDIELFIKKMLISYRVEKRMRGALHEETYYGQIALTDNKGVPFYAVRKRLEDLTPAMIDKIADPVVKDIIKNHLRSIGINSDEGNFKIPSDAFKDKTIYMRAKKGAKIPIKKVRIHQPFKNMILLSGKTGVEPGNNHHVVLYHYKDKDGNIKQDGEICTLFEAVRRLKNGEPVIKRNLGNGKKFLFSLAINEMVLLDVDEDEIDWRNPDYCKLSHHLYRVQKISNQITFRHHLTAVLENNTGEEIGRVLKYPSSFSGIKIKIDRLGKIYKAYD

SEQ ID NO: 3413 - protein, 959 aa, unidentified
  REGION 1..959: note = Description of Unknown: Cas Enzyme sequence
MRRTHQRRNRRLETLKSILQKSGLSPVDGEAFSKLLLEDPYRLRATGLEEKLPIHGFGRAIYHLAQRRGFKSNRKSGRKTEDGEIQQAIGILNKDMEKTGCRTLGEYLHLMRVEDPGKRVRGHYTHRDMYEKELSTLWDSQARYFPAVLSESLRNDIYNAIFFQRPFDIRVRWGKDLKRLPPGANARRAPELGKCEYEKGEERSPRAAWHAQRFRLLQDINNLSIVNTITGEETGLDADMRQKLIEALGRKEKTTFDQMRKLLGLEEIARFNLEEGKRTKLKGNSTEWNLRQAFGKEYDCLPDETRDEIINILINEENEENLKRRAVEEWGLDEKGAGRLAKTTLEGGYLHISIKALKKLLPHLEEGKDYMAAVEAAGYLRRDQRAVKASGSLSVKDMPGLTNPLVKTALYQVRKVVNAIVAGYGAPSKIRVEMVRDLKNSRERRFEIIKEQRENERRNENAKERLRADFGMADLTGEDILRYKLWEECGRQCPYTGRAIPQDALFSADIEIEHIIPYTRSLDNSFMNKTLSYTGENRLKLDKTPYEFYGHDERKWDEILKRVSRLAEKKRNRFYMKEVPDNFISRQLNDTTYIATEVRSLLEKVAGKNNVQIAKGQATATLRRHWGLNTVLGGSGEKTREDHRHHAVDAVVIALASPGMLKSLSRAYSGKKNARFRDFPPPWYGFRNDVKKKIDSVIVSFRVKRKVSGRLHEETNYGILKRKDNKGQPLYSIRKALSALTKNEINLIADERVREIVREHLKKHGADPDNGSEKEAAWKKAFAPENPPCLPNKNGPPIPIKRVRLHKPATGMKHLKRHPSDEKPYRAVEPGSNHHIVIFEHTDGKKKGNWDGEVVTMFESAQRIKDNKPVINRDLGDGRRFVMSLSINEMVRVGAEDKALFYRVQKINAENKQITLRLHSAATIDKNDDRRLVVPNALSKISARKVVIGPLGHVMEAHD

SEQ ID NO: 3414 - protein, 1488 aa, unidentified
  REGION 1..1488: note = Description of Unknown: Cas Enzyme sequence
MRNILGLDLGANSVGWALVDKDAQKILGMGSRIIPMSQDILGNFGKGNSISQTAEKTGFRGTRRLRERHLLRRERLHRVLHILSFLPEHYEKYIDFEKRLGQFVNETEPKLAYNNCDFIFKKSFEEMVADFKRQNPSLFYIKPNGKETKIPYDWTIYYLRKKALTQKIEKEELAWIILNFNQKRGYYQLRGEEEEENPNKLEEFHSLKIVGVEADEKPNSKGDTWYSLQLENGWIYRRSSRNPLFDWKDKVRNFIVTTDLNDDGTVKIDKEGNERRSFRAPGEDDWTLLKKKTEAEIEHSQRTVGTYIYENLLSNPNQKIRGKLVRTIERKYYKEELIAILKKQIELQPELFSEDMYNDCVRELYRNNEAHQFILSKKGFDHLFVNDIIFYQRPLRSQKSSISNCTLEFRKYKDKDGNEIKEYLKAIPKSHPLYQEFRLWQWLFNLKIYRKDDDADVTSQFVVNTTDIENLFDFVNNRKEIDQKALLKYFKLTEKTHRWNFVEDKTYPCNETGTQIRTRLAKVECLPADFLTTGIEQNLWHIIYSVTDKKEYEQALSSFAKKYKINEVSFVENFKKFPPFKSEYGTYSEKAIKKLLPLLRLGKYWNLDTIDTKTKGRIDKILTGEYDAEIKDLVREKAISLTCENDFQGLQLWLAQYVVYDRHSEASDIIHWKMPQDIDGYLKEFKQHSLRNPIVEQVITETLRVVRDIWKKYGDISEIHIELGREMKKTAKERERLTSQITENENTNLRIKKLLMELKENSDGRLNVDNVRPYSPVQQEILKIYEDGVINSDIEVPDDILKISKAAQPTSSELQRYKLWLEQKYRSPYTGQFIPLGKLFTTEYEIEHIIPQSRYFDDSFSNKVICEAAVNRLKGNQLGLEFIKEHHGEKVPLGLGQVVKIFSVEDYQNFVKEYYANNRSKRTKLLLEDIPESFIDRQMNDTRYISKMVKGLLSNVVREEGEQEATSKNVVACSGNITAILKRDWGLDAVWNSLIISRFERMNILTNSTGFTAWNEQYQKFLPSIPLELSKGFQKKRIDHRHHAMDALVIACATKDHVNLLNNQSAKSDLKRYDLQRKLRLFEQVSYFDKKAGKQVEREIPKEFTKPWDSFTTDVRNELEKIVVSFKQNLRVINKTTNKYRAYEGGKKVLKPQTKGDSWAIRKPLHKDTVFAKVALQKIKKLKLSEALKNVDGIVDKEFRNEIRRVSATFGMFDPDKINKYFKDRKYLFGKRDISKVEVYYFETENAAVRKSLDTSFTEKVIKESVTDSGIRKILLNYLAAKDNKPELAFSPEGVEEMNQNMAAFNDGKPHQPIRKVRMYETIGNKFQVGYVGNKKAKYVEAAKGTNLFFAIYADNKGSRSYETIALNVVVERLKQGLNAVPEKNEKGHELLFHLSPNDLVYVPTEEELISAIKYRIEDVKVERIYKMVSCTGSECHFIPQNVANSIVNKVEFSPLNKMGRSLSGEMIKDVCVKINTDRLGNIKPLLP

SEQ ID NO: 3415 - protein, 1507 aa, unidentified
  REGION 1..1507: note = Description of Unknown: Cas Enzyme sequence
MKNILGLDLGTNSIGWALIDRDANKILGMGSRIIPMGQDVLGNFDKGNSVSQTAERTRFRGTRRLRERHLLRRERLHRTLHILGFLPEHYEKHIDFEKRLGQFVNGTEPKLVYNDNNFIFKKSFEEMVADFKQQNPSLFYIKPNGKETKIPYDWTIYYLRKKALTQKIEREELAWIILNFNQKRGYYQLRGEEEEDNSNKLVEFHSLKIIEVEADEKPNSKGDTWYSLHLENGWIYRRSSRIPLFDWKDKIRDFIVTTDLNDDGTVKIDKEGYERRSFRAPGEDDWALLKKKTEAEIEHSRKTVGTYIYENLLLNPSQKIRGKLIRTIERKFYKEELIAILKKQIELQPKLFSEDLYNDCVRKLYCNNEAHQLNLSKRDFVHLFVNDIIFYQRPLRSQKSSISNCVLEYKIHKINKKDEKGNPIQKVFEKDANGNDIEIKEYLKAIPKSHPLYQEFRLWQWMFNLKIYRKDNDADITSQFIVNVEDKGNLFNFLNGRKEIDQKALLKYFKLTEKGYRWNFVEDKTYPCNETGTQIRTRLAKVENVPADFLTSETGQNLWHIIYSVTDKKEYEQALSSFAKKHNLDETSFVENFKKFPPFKSEYGTYSEKAIKKLLPLMRLGKYWDWSAIDTKTKGRIDKILTGEYDAKIKDRVREKAINLINENDFQGLQLWLVQYIVYDRHSEASDAIRWKTPQDIDDYLKEFKQHSLRNPIVEQVITETMRVVRDIWKKYGDIFEIHIELGRDMKRTADERKKLTNTITENENTNLRIKALLMELKENSDGKLNVDNIRPYSPIQQEILKIYEDGVVNSNIEIPDDILKISKTAQPTSSELQRYKLWLEQKYRSPYTGQFIPLGKLFTSEYEIEHIIPQSRYFDDSFSNKVICEAAVNRLKDRQLGLEFIKNHHGEKVVLGLGQVVEISSEEDYQVFVKEYYANNRSKRTKLLLEDIPESFIDRQMNDTRYISKTVKGVLSNVVREEGELEATSKNVVTCTGSVTTVLKRDWGLDAIWNSLIISRFERMNLLTNSTSFTAWNEQYQKFLPTVPLELSKGFQKKRTDHRHHAMDALAIACATRDHVNLLNNQSAKSETSRYDLQRKLRIFEQTSYFDKTAGKQVVRDIPKEFIKPWDSFTTDAQNELEKIVVSFKQNLRVINKTTNKYLAYENGKKVLKPQAKGDSWAIRKPLHKDTVFAKVSLQRKKKIKLSEALKNLDNIVDKGLRNEIRKIAAAYGKFDADKINKYFKDRKYLYGKTDISKVDIYYFETENAAVRKPLDTSFSEKFIKESITDSGIQKILINYLAMKGNKPELAFSPEGIEEMNQNIIAFNDGKRHQPVRKVRVYETIGNKFQVGYTGNKKAKYVEAAKGTNLFFAIYTDDKGNRSYETIALNIVVERLKQGLNAVPERNEKGHELLFHLSPNDLVYMPTEEELENNISKELINLNRIYKIVSFTGNRLYAIPYFVAKPIVDKIEFFQLNKVENDINTNLSIKQVCVKLNIDRLGNIKSLCHD

SEQ ID NO: 3416 - protein, 1373 aa, unidentified
  REGION 1..1373: note = Description of Unknown: Cas Enzyme sequence
MKRILGLDLGTTSIGWALVNEAENANEQSSIIKLGVRVNPLTVDELSNFEKGKSITTNADRTLKRSMRRNLQRYKLRRENLIEVLKKNDFINDKAILSENGNATTFETYGLRAKAATEEISLEQFSRVLLMINKKRGYKSSRKAKSQEDGTLIDGMEVAKKLYNENLTPGQLVFQLLQQGKKEPEFYRSDLQEEFDRIWTSQKQFYPEILTDSLYQEVKGKNKGQTWVILRDPFSIVGIKQNGKPIENKKERYFWRTESLTKKQDLEILAIVFQEINSSISGSSGYLGAISDRSKELYFNKLTVGQYLMAQLDEKPNISLKNQVFYRQDYLDEFNTLWDKQSEYHEGLTDELKKEIRDIIIFYQRRLKSQKGLISFCEFESKQIEVEIDGKKKKKTIGQRVCPRSSPLFQEFKIWQILNNIEVTGKDKKEKRELYQEEKEILAAELSIKEKLTKEETLKLLFKNPKDLDLNYKSIEGNRTQATLFKAYQQIIEQSGHEIELSKKTTKEILKSIGEIFSGLGINTEILYFDSNKPLDEQPMYKLWHLLYSFEGDKSNTGNENLVNKLMELYGSDKDSAKILANVTFVDDYSSLSAKAIRKILVHLKEGNKYDVACGHVGYRHSKSSLTKEEIAAKKYKDKLDVLPKNSLRNPVVEKILNQMINVINAIIDSYGKPDEIRIELARELKKNAGEREELTKAISRATKEHEDIKAILQKEFGINNVSRNDIIRYKLYKELKPNGYKTLYSNEYIPREKLYSKEFDIEHIIPQSRLFDDSFSNKTIELRKINIEKGNDTAYDFVKNKYGEGGLEDYLKRIDSLFKADSSKKTKLKKLKTTEGDIKEGFIERDIRDTQYIAKKAKAMLEDLAPRVVSTTGSITDRLRQDWQLVDVMKELNWEKYDKLGLTEIIEDKDGRKIRKIKDWTKRNDHRHHAMDALTIAFTKDMYIQYFNNINARDDKESNAYAIERKYFQKRKVLPPIPLDEFRNDAKKHLENALISIKSKTKVVTINTNVSKVKGGLNKKNQLTPRGQLHNETIYGSSKQYVVKEEKVNASFNEEQIAKVCKPTYRDALLKRLQENNNDSKKAFTGKNSLAKNPIYLDELQTKQVPEKVKTVSFETIYTIRKEVTPDLKVDKVIDAKARATLQKRLEEFNKDAKKAFSNLDENPIWLNKAKGISIKRVTISGVSNAESLHDKKDKEGNYILDNEGKRQPVDFVNTGNNHHVAIYRDADGNLQENVVSFFEAVARVNLGLPIIDKEYKKSEGYQFLFSMKQNEYFVFPNEKTGFNPNEIDLLDPENYSLISPNLYRMQTISKVTYGNNVIRDYKFRHHLETSVKDAKELKDSTYKQYKTLVFANIAVKVRINHIGKIVSVGEY

SEQ ID NO: 3417 - protein, 1352 aa, unidentified
  REGION 1..1352: note = Description of Unknown: Cas Enzyme sequence
MNKILGLDLGTHSIGWALRDTTAPGNQIIDKGVLTFEKGVGEGKSGEFPLVQKRTESRSKRRHYQAEKYRKWALLQTLIIHHMCPLTLAELDEWRKYTKGTPRKYPQSEKFIQWLRYDFDGDGLPDFERLGFSKYENHYLFRMLAASEKKEHQAIFKNDPTILGRVLYHMVQRRGFRGRDEEEAKTIMQGSKDSGTAGADAIASYLQEHGTLGAALYHLQKETGERIRKRYNLRSDYEQELKVICQRQHIDEDLYKTFWKAIIWQRPLRSQKGLVGICTFEPGKARCPVSHPLYEEYRTWIAITNLKIKFDGDIQQENILAEKVYPLFYNASRDFKLLSIAKVLRKFNGKITAKTGSDKDPDKEKYKLENTKLVSATLLHQFETILGVDWKEKFGWCEILHNQPKKCAYSIEDIWHVLFTFDDREKLKSFAREKLQLEEEAAEKFSKIKLTQGYTTFSLSAIKKILPYLQQGFLYNRAIYLANVHKVLGKQHITRDEANAIGASLEHIFHQSDTEKKMINVVNELINDQLNSGSNRFGMDPSYQLDDDDKKDISNKLEAVFGEQTWAGISDNEKREGYDFVARHYLAFLQKPIQYSKQPIFLKASRQHDRIFQNLQETYGAPEKNKKYLWHPSEQETYKSGKPINGTPQLGSPTPISRGFKNPMALKTLHKLKKLINFLLVTGKIDEDTRIVVEIARELNDANKRKAIEKWQRDREKENDEYKARIKEIADEYYPNLDVNNKRIIDKYRLWIEQGKTCLYTGEMINCKDLFDGSKYDFEHTVPASLSFDNELKNLTIANGIYNKQIKGNKLPSQLPNYAEDGLGYTAIKPRLKFMEEKVTGLQIMLEEWSNKTKFAPTKDIKDACIQRRHIIRFELEYWNYKLHTFTMMEYKAGWRNSQLKDTQVVTKYALPYLKTVFQKVEVEKGTVVADFRNIYGIYSRKSKKDRDKHSHHAIDAAVLTLIPPAAIRDKILFNYNKMKDQDPNASFHESVRNWSAFHPNHILSIENDVLINFQAQQRTLTPTYKNVRKRGRQQYVKEKDVNGKWRYKVDEKGQRIKLKAKGDSIRGQLHKESMYGMIQRNGEKWVVERCPISSFTSINDCRNIVDDAVRDIVQKELEARVASGESFDKAKFREISFPYGKAIIKKVRCRVAAGRGYLTPEKALEISRRDSPSRHSYKQMVYAQNEENTLCLYYEGMKDGKVERGFRIIGLYELAQLNISSIRDIGKEKYYQTMETVKGKNRIELPLAHILTVGMRVILVDKGMDELKELQPQDLYKRVYRVYKFNERPSVFIYLQSHMEARKNDELGNGESEVDFLKYQPRVALIASKFNCALEGKDFFIDLDGQIIYNF

SEQ ID NO: 3418 - protein, 1420 aa, unidentified
  REGION 1..1420: note = Description of Unknown: Cas Enzyme sequence
MKKILGLDLGTTSIGWAVINEAENEQEQAEIIRTGVRVVPLSVDEQTDFEKGNPLSTNAERTLKRGMRRNLDRYQDRRAHLLDLLKKGGLINEDTSLAETGKGSTHALWKLRADAADAEKAAHEKKGITLEQFARVLLTINKKRGYKSNRKAKDEDEGQAVDGMSVAKELYDNDLTCGQFGLRRLTEGKRHIPDFYRSDLQAELDRLWDKQREFHGELLSHELKEKIAGKNQKATWAILKEPWGLVGEKRTTKGFDKKLEDYQWRVDALSRKLDLEQLAVVMQQVNGAISSSSGLLGAISDRSKQLMIQDLTVGQFLYKQIQADPHSRVKGQAFYRQDYLDEFERIWEVQKEFHPQLTAELKHDVRDTVIFYQRRLKSQKGLLAVCEFEGRKEPVIDENGKPAMTKDGKPKLRNVGPKVCPKSSPLFQEFRIWQVLNNIELIYEGDLETDDGPSENGILRKGKAWCLGPAYKAQLFAELSWTDELSASDVLKSLKLRPKEWKMNFKTIEGNRTNQKYLDAFSAMLEVTGHDDVDLPKLTAANRLKTVETVLGELGVDTDILHFDATLPGKEFEQQPAYALWHLLYSYESDKKSRSGNERLIKQLCEKYGFNRECAELLCKVHFEEDHGSLSTKAIKKILPYLKEGLIYDQACMEARYNHSHSVTAPENEARELMDKLEILPKNSLRNPVVEKILNQMVHVVNKVIEVYGRPDEIRVELARELKKSAKERAEMTTAISTATNAHDAIRKEIAMLYPFNTGVRITRNDIIKYKLYEELKENGYKTLYTGTHVPLEKLFGKEFDIEHIIPQARLFDDSFSNKTLCVAEVNRKKSNATAMDFMEAEYGADSEEVAQYVERAERFFKKSNPSKYKKLMMKVSDIPDGFIERDLRNTQYIARMSMGMLRQVARNVMGTTGSVTDRLRQDWQVINVLQELNWAKYEKAGLTYTEQNKDGAAIRKIKDWTKRNDHRHHAMDAIAVAFTRPSHIQYLNHLNARRDEEHKKHVVIQAIENKETFIDAKGRRLFKPPIPIDQLREQVKQQLESTLVSFKAKNKVVTRNVNKSKKKIGHHKKIELTPRGQLHKETVYGKKQFYSTKLVKVGPSFDQATIAQVAKAGHRQALLLRLHAAGGDPKKAFGGKNALNKNPIWLDEHHKEQVPEKVKLVEMETQYTIRKNITPDLKLDKVIDGRTKRLLQERLNRYGGDAKKAFSNLEQDPIWVNGKNGAQLKSVTITGVSNAEALHIKHDLHGKPVLDADGNETPTSYVQTGNNHHVAIYRDAEGNLQEKVVSFFEAVARRLQDEHVIDREYKQEDGWTFLYTMKQNEMFVFPNETVGFDPSAIDLTDAANASRIAPHLFRVQKISTKNYVFNHHLETTAVDGELLKTKKELSTLTYRFIQSTAPLEGSIKVRMDHLGRIVHVGEY

SEQ ID NO: 3419 - protein, 1346 aa, unidentified
  REGION 1..1346: note = Description of Unknown: Cas Enzyme sequence
MNKILGLDLGTNSIGWAIRDTSVSGNQIVDKGVLTFEKGVGEGKSGEFPLVQKRTESRSKRRNYQAEKYRKWVLLQALIEHQMCPLSLAELDEWRKYKKGFPRKYPQSEAFTQWLRYDFDGDGQTDYERLGFDKHENHYLFRMLAASDKSEHLAIFAVNPMILGRVLYHMVQRRGFRGRDEEEAKTIMQGAKDGSTLGVQAIAAYLQEHKTLGAALYYLHKEKGEKIRRRYNLRSDYEQELKIVCERQGVDDNLYKQFWKAIIWQRPLRSQKGLVGVCTFESNKARCPVSHPFYEEFRIWREINDLKIVVPGRENQRQLIADKVYPLFYVAARDFKLKSISVALRKIDGKITSAKGHDKDPEREKFKLENTKLISAGLLYQLEALLGEDWKEKYGWQEALENRTKTCPYSIEDIWHILFTFDDRDKLRLFAKDKLQLSDESAEKFSKIRLTQGYAPLSLSAIKKILPYLRQGYQYSRAVYLANIHKVLGEHHISQGKANAIARSIDAIFNQSSDEKQLIAAVNGLISDQLNSDTRFGMDPSYQLDEDDRKDIDRKLEEVFGERSWGKKTEEEKEKGRKFVAQHYLAFLQKPIQYSKTSLFLRTVPIHDRIFTHLQETYDIPDDRKKLLWHPSEQETYDRARRINGLPQLGSPIPISRGFKNPMALKTLHKLKQLVNYLLRAGKIDEDTRIVIEIARELNDANKRKAIEKWQRDREKQNEEYRARIRELNDSHNLGLDIYSKSLIDKYRLWTEQRGQCLYTGEVINCKDLFDGTKYDFEHTIPASVSFDNELKNLTIANSKYNREVKSNLFPTQLPNYAGEHGGLKSISGNIRFIQDEVTRLESLYEEWLNKAKFASAKDIKDACIQRKHTIKMDLDYWRYKLHTFTLTEYKAGWRNSQLRDTQVVTKYALPYLKTVFEKVEVEKASVVASFRNIYKIIPRSENKDRSTHGHHAKDAAVLTLIPPAVIRDKILLRYNQAKDQQPNEVIHVPVRDWKNFDPAYILSIEDDLLINFRAQQRTLTPTYKNVRKRGRLQYVKEPGADGHPKYKLDEKGARIQLKAKGDSIRGQLHKESMFGVIEKDGEKWLVERYPITQFTSINDCRNIVDDAIRRIVQDELSKRVAAGESFDKAKYDPIFFPSGRVIKKVRCRVAAGRGYLTPEKAIGVSRRSHVSRHEYKRVTYAQNDENTLCLYYEDGSDRGFRIVGLFELAQLKAKSFSDLGSERYYQTLEVGKGKNKKELPLVHIITVGMKAIVWEENKEELKELPQQDLFRRVYRIFKFNERPSPYVYMQHHLEARPNDQLGNGDSEIDLNEYQPRLSLSGGNFRSALEGRDFTVSLDGRIEWKF

SEQ ID NO: 3420 - protein, 1482 aa, unidentified
  REGION 1..1482: note = Description of Unknown: Cas Enzyme sequence
MFSQRNNPYCELLSNLKQRYIKSFVFPNLYFKKILTKFGIDCKDLAMKYILGLDLGSNSIGWALIEQDFDNKQGKILGLGSRIIPMDQGILGEFERGNKVSQTAERTEFRGIRRLRERHLLRRERLHRVLHLLGFLPAHYDAQIDFTKRFGKFIGNSEPKLAYNNEGFIFLESFNEMVEDFKKHQPQLFYIKSNGEESKIPYDWTIYYLRKKALQEKISKEELAWIILNFNQKRGYYQLREEEGEKENDFEIISSKVLSVVKKEKDKKYNKYWYDITLENGLVYTAAFYNDFVYSWVDQEREFVAKRTLLKNGSEKVELSYLPTFDEIAKMNKQQQDKFYQKIKIKTENSIGNKPVGAYIYDHLLQNPNQKIKGKLVRTIERKFYKEELKAILEKQVALQPELFTEELFVDCVRELYKNNEIHQNSLSSKDFEHLFLNDIIFYQRPLRSQKSNISSCSLEYRFCIDKETKQRRKTYLKVISKSNPYYQEFRVLQWLSNLKIYRKEDDKDVTSEFISSIEDKETLYEFLMSEKEVSNKSVLEFLLMKSLRETYPFAKETELKKELKKEITKYRWNYVYEEGNDSKKYPMNETGYEIKKRLKEVKNIPDNFLTKDIEYQLWHIIYSVTDKYEYEKALMKFAQKHNLDTESFVENFKKIKPYPSDYGAFSEKAIKKLLPLMRFGKYWNYSDISEPVQARISDIINGVDNESIKTIVREKAEKFQLSQEADFQGLPLWLAQYIVYGIHSEAADIQRWTSPSDLEEYLKGFKQHSLRNPIVEQVVTETLRVVKDIWEYYGKGEQNFFDEIHIELGRELKKTAEERNRMTREINANEETNLKVKKDLQKLFENKSAENVRPYSPIQQEKYKLWQEQKERSPYTGQPIPLSKLFTDDYQIEHVIPQSRFFDDSLSNKVICEAAVNAQKGAQLGLEFIKKHGGEIIEIGLNKKATVLNEKEYKELVNELFANNRGKKAKLLMEEIPEKMVERQLNDTRYISKFISQILSNIVRSPQEDEGVNSKNIIPCTGKITAALKQDWGLNDVWNDLILPRFERMNNLTQTELFTTYSEKYQKKIPTVPLEHAKGFQKKRIDHRHHALDALVVACATRSHINYMNNQHALDKHKAKEEKQNARIDLRTVLCDKKYNDNAEDNYNWTFKKPWNTFTQDVRSALEMVVVSFKQNLRVINKATNYYEKWREEKGKMVKKKVKQEGINWAIRKPLHEQTVSGKITLERVKVGKGKILTATRKSIDSSFTEKTIASITDTGIQKILLNYLAYKGSSELAFSPEGLEELNKNIYLYNDGKPHKPIYKVRSYEKGSGRFVLGERGAKSKKYVQGAPNLYFGIYQGKEKRSYATIPLNEVIERQKQGLTSVPELNEKGEKLLFSLSPNDLVYVPMEGEDTENIDFTNLSKEQRERVYNVNDFSSTCYFTPNRIAKAIYPKEVDMQRKGDELSGSYDTKTASIEGVQIKESCIKLKIDRLGNISKA

SEQ ID NO: 3421 - protein, 1476 aa, unidentified
  REGION 1..1476: note = Description of Unknown: Cas Enzyme sequence
MKRILGLDLGTNSIGWALVENDFKNKTGKIDGLGSRIIPMTQDVLDTFSGGNPLETQTAMRTNYRGIRRLRERHLLRRERIHRVLNVLGFLPEHYATNIDFSKRLGQFIEGAEPKLAYNNREFIFKNSFSEMVEDFKKYQHQLFYKKSNGKESKIPYDWTIYFLRKKALSQKIAKEELAWIILNFNQKRGYYQLRGEEVEENKNKQFVELKVKDIVDSGKYVNGKKLYDVYFDNDWKYDKQIVKIEDWKNRNKAFMVTKTALKNGEIKRSFRVVDPEKDWIAIKAKTENDIIKSGKKIGEYIYDSLLKNCKQKIRGKLIATIERKFYKEELTTILKKQIKLQPELFSNELLNDCIRELYRSNKAHQLELSKRDFVHLFVEDIIFYQRPLKSQKWTIGNCPLEYRNYKDKENNTVKSFLKVIPKSNPLYQEFRVWQWMYNLKIYKREDDADVTAQFLKNTSDWEKLFEFLMQQKEVNHVDILNYFLTPILKEKYPGAKSRAFKQEIEKEIAKYRWNYVFDDSKEKENEKSKKYPCNPTGYEIRKHLAKVDDISSDFLSPRIEHHLWHIIYSVTDKQQFETALVKFADKYSLDKESFKENFKKFPPFKSEYGSFSEKAVKKLLPLMRLGKYWRWDVIDEETKDRITKIITGEYDEKIKNRVREKAINLSQESDFQGLQLWLAQYIVYNRHAESDISGKWSSVTDIDKYLEDFKQHSLRNPIVEQLVTETLRVVRDIWKHFGNGAEGFFDEIHVELGREMKNTAEDRKRMTSRISENESTNLRVKAMLVEMMSDSSVENVRPYSPMQQEIFKIYEDGILNSGIEIEDDILKISKKAEPTKAEIQRYKLWLEQKYHSPYTGEIIPLSKLFTEEYQIEHIIPKSRYFDDSFNNKVICESAVNQLKDKQLGFEFIKNHHGQKVECGKGKIVEIFSEDTYQKFVKEHYYKNKFKRQNLLLEEIPEKMIARQMNDTRYISKFVCSLLSNIVRSDEKDNGVNSKNLIPVNGKVTSRLKNDWGLNNVWNDLILPRFERLNKLTNSQDFTLWNEKHQKFLPTVPLELSKNFQKKRIDHRHHAMDALVVACATRDHVNLLNNQSAKSEKIRYDLQHKLRHTEKWFDRQGNERTKFTEFIKPWEAFTSDAKSQLENIIISFKQNIRVINKAVNKYWAYKDENGNSTEKKNLLRQKRVNWAIRKPLHKETVAGEVTLNRLSVPKGKLLTATRKSIDTTFNLKKIESITDLGIQNILKRYLVSMENNPELAFSPEGLEDLNKNIKIYNNGKNHQPIFKARIFELGSKFNLGDKGVNKEKFVEAAKGTNLFFAVYWNNVKKKRAFETIPLNEVIAHQKQEAHLPKDERTLIPIKAEMGRFLFCLSPGDLVYVPTEEETENYLKMNFNAFSKKQINRVYKMVSTTKKECHFVPAYNSKEIKKNENGTNSKNERIQNYFDDNCPFDSLGKPIMIKNTCWKLKIDRLGNIKSVVG

SEQ ID NO: 3422 - protein, 1503 aa, unidentified
  REGION 1..1503: note = Description of Unknown: Cas Enzyme sequence
MNKKIIGLDLGTNSIGWALVEKDTEQNDGKIIDAGSRIIPMPQDAISKYETGNLQSAASVRTDYRGMRRLYERAELRRSRLLRVLNILGFLPEHYREAIDFTNHLGQFKDHGEPLLPYKRNEEGKNEFIFKDAFHEMLEDMRTLHPELVANGKKIPYDWTIYYLRKKALSQSISKEELAWIILNFNTKRGYYQLRGKEEETATNDNQVYDVLEVSNVEETGPNNKKKGYNWYLIHFTNGKVQNRTWKEAPCHIGDKVECIITYQVKKDGSPKLDENGEQLYKITAPDPNDWTLRKKRTESIINNEHVTVGAYIYDHLMEHPEDKIRGKYVHTIERKYYKEELRIILDKQKEYIPELRDKDLLSQCISELYQNNEAHRKALNDQDFTRLFVDDIIFYQRPLKSKKSLIADCPLEFYPYRDKDGVWKHRPIKCTPRSNPLFQEFRLWQFIQNLRIFLREQKQENGKLKLDVDVTNQFLSTPEDYCDLFDWMKQKSDITQKQLLAYPAFHLGKKAKDYRWNYVDDDKHTYPLCSTHHDICQALKNVDGAPSLSTGQEENLWHILYSVDDRYELEKALCHFAEKCSLDSESFVNAFMTFKPFDNSYASYSEKAIKKMLPLMRTGRYWNVEGIDSHTLQRIEHLITGEADDNISNSVREKCQGLDQIEKYQFLPVWKVCYVVYNRHSEAIDTGRWSSPEDIDNYLKSELRQGSLRNPVVESVLTESLRVVRDVWKQYGKPEEVHIEMGRDLKQNKAQRQKANSAMLANQQTNLRIRCMLQEFADPDFHIDNVRPQSPSQQELLKIYEQGVLDSTDNIPDDIQTIIDHIGDKNKGASRSDMLRYKLWLEQKYQSPYTGQPISLSRLFTSEYEIEHVIPQARYFDDSLNNKVICETEVNREKGSMLAYEFIKSKGGMIVKGTGGRQYKILDTVQYEEFVKSHYSSNKRKMRNLLLDDIPDSFISKQLNDTRYMARKALDIFSHLVREEYKDDSAVSKNVIACNGAITDRLKKDWGLNDVWNDIVAPRFERMNAITHSTDYGQWTNKKGKRYFQINIPLALSKGFSKKRIDHRHHAMDAIVIACTTRNIVNYLNNASGADTEARHDLRNAVCFKNKNVDGCGNYQWTIKKPWCTFTQDAHTTLDHTVVSFKQNKRIITQTSNRYWHYSNGKKVLDRQVKGDHRAIRKSLHKATVSGALYMPEKKKVKLKVALEDINAICNAKARKEIRHIINDTYHGHVDNATLLKYFKARDYLINGINFNTLEIRIVPAQPNYTASRVALDSTFTEKDIEKVTDTGIQSILKRHLEHYIDDKGKCDCAAAFSPEGIAEMNEHLTELNGGKPHKPIYKVRKKETIGLKFNVGVAGFKNKKFVKADEGTNLFYAVYTDNEGKRSFESIPLNMAIERKKNKMDVAPAMNAKGDKLLFVLSPGDLVYLPQEGEHVALPLDERRIYKMVSCTEARSYFVPYSSACMISDKVEYGPQNKMERSLDGIMVKTTCVKLKIDRLGHISI

SEQ ID NO: 3423 - protein, 1495 aa, unidentified
  REGION 1..1495: note = Description of Unknown: Cas Enzyme sequence
MSKILGLDLGTNSIGWALIDSKEQKIIKAGSRIIPMDAATMGDYEKGNLKSAASERTDFRGARRLYERAILRRERLLRVLHTIGFLPKSFEKQIDFTEHPGKFLNHGEPLLPYYKDEQGKNTFLFKDSFNEMLSDFKKHHPDLVSDGKLIPYDWTIYYLRKKALSQPITKEELAWIILNFNTKRGYYQLRGMEDTKETDKTKIEEYKVLEVASVENLGPNKKKDGYNWYLITYDNHATQRASSPTPPQKVGNLVEVVVTTTLDKDGNIKKDKDGFPMIKLRTPKEDDWTLMKKRTEKNLANSHQTVGSFIYEHILSTPNIKVRGKLIHTIERKYYKEELCQILEKQKEFIPELKDIELYKKCVHELYKNNEAHVESLMNEDFTNLFVNDIIFYQRPLKSKKSLIANCPFESYHYKDKNGNIQSHPIKCIPKSHPLYEEFRLWQFLSNLRIYKKNVEINGKIVTDYDVTSQFLQTPNDYCDLFEWLQNKKEIKQDQLLKYKSFGINKEVSNYRWNYVEDKTYPCCSTRFEINKRLQSLNLQDLDNNDYTHLWHILYSVDDPIMCQKALHKFAIKHGFQEEEFVNKFKQYSPDSKDYGAYSEKAIKRLLALMRTGRHWDEKNIDTKTLSRINNLIDGVVDDEISDRVREKLANKQHISDFQGLPLWAASYVIYNRHSEASETIKWQKPEDIDTYLQNNLKQHSLRNPVVEKIICETLRVVRDIWKNFGDIDEIHVEMGRELKQDAKSRNKDSQRIIENERTNLRIRALLQEFANPNYMIENVRPYSPSQIETLKIYENCILSDSSIERPDDIQKIMNDLGNAKTIHIKQSDVLRYKMWLEQNYKSPYTGQIIPLSKLFTPAYEIEHIIPQSRYFDDSLSNKVICESEVNKAKDRMLAYEFISQKGGSIIKGNFGQDFKILDKKQYEDFVQHHYANNRTKMKKLLLDDIPEGFIQRQLNDSRYMSKKMLSILSCLVREEGEQETTSKHVIPTNGAITDRLKKEWGINDIWNQLVTPRFERLNDKTGTQAYGQWINKDGKRFFQTNIPLDLSVGFSKKRIDHRHHAMDAIIIACTNRDIVNYLNNIAALSNKEKERYDLKHKLCIKAKTDSNGNYIWVFKKPWETFTQDVSGVLEGIIVSFKQNLRIITKMSNYYTHYVDGKKVIDKQTKGDSWAIRKSMHKATVSGLISLQKCKQVKLSVALEQWQNIADKDLRKEIANLIKLYHKFDKKLFIKYFKDRDYKLNGRDISNVRIYYYTGTSGKESITATRVAIDESFDTKKIESISDSGIQKIMLSHLKKYNDEKGKSHPEVAFSSEGIVAMNQNIKELNGGKEHKPIYKVRKTETLGMKFSIGEVGNKNHKYVEADKGTNLFFAIYVNEEGERSFESIPLNIAIERLKNHLKVAEEIKEDGRKLLFTLSPNDLVYLPDVEEGKNIYKMVSCTGNRVFFIPETWATPINNGYELGSLNKVEMSLEGINIKQECEKIEVDRLGRIVKTYK

SEQ ID NO: 3424 - protein, 1483 aa, unidentified
  REGION 1..1483: note = Description of Unknown: Cas Enzyme sequence
MSNILGLDLGTNSIGWAVIDNEQKTIVNAGSRIIPMDEATLGQYETGNLKSQASVRTDFRSIRRLYERAKLRRERLLRVLHVMGFLPEHFDNQIDFINHLGQFKSHSEPLLPYRKNADGRNEFIFNDSFREMVDEFNSIHSNDKFTGKRIPYDWTIYYLRHKALSMPIRREELAWIILQFNTKRGYYQLRGEEEETKTSKNETYEVLTVKNVEKLNADSKRRGIFWYEITYNNGISQRKSGPVAPRKIGDQVELIVTTTLDKNGNVAKDKEGNPKIKLRDPKPDDWTLMKKRTERAISDSGTTVGDYIYNYLMNHPEAKIRGKQVRTIERKYYKDELKKILDKQAELIPELKDSSLLEKCVLELYRNNEAHVASLQGKTFTDFIVDDIIFYQRPLKSKKSLIANCPFEEYCWIDKSTGEIHHEPIKVIPKSHPLYQEFRIRQFLQNLKVIRKEKEIDGKLKTDVDVTCDYLKDDNDWQKLYNYLSSIPSIDNKKFCKYLGLSDNDYRWNYVTNDKSYPCAETHCLININGDLNKSQETELWHIMYSVSDPIELRKALTTFADKNGLDEHDFIESHIHIKPFDSDFGAFSEKALKKILPLMRRGIDWHEEDLPCQARERIHDIINGNVDEKIRKQIVKSGLVLNTIADFNNLPLWFAEYLVYGQKDDITVWNTPDDIDKYLQSEFRQHSLRNPIVETVLSETLRVVRDIWKAYGKPDEIHIEMGRDLKQPKDKRARATQRILESERTNLRIRQLLQEFAEDSDVENVRPNSPSQMELFKIFENDVLNQYDRVADPDNIMDIVDSLANPTKHVSHNDIVRYKCWLEQRYQSPYTGDIIPLSRLFTTDYEIEHVIPQSRYFDDSLNNKVICESGINKLKGNRLGYEFIFKEHGHIVDGHKVFEKEAYEQFVKDHYSNNPRKARILLLEDIPDSFIQRQLNDSRYIARQTTSILSAAVRSIDDKGHVAANDRGSVSVNIIATNGSITDRLKKEWGITQIWNHIIAPRFIRLNEKTHSEQFGKWVEKNGERYFQINIPLEISSGFSKKRIDHRHHAMDAIVIACTTRSHINYLNNSTAAASRKDERHDLRNKLCFKDKTDSNGNYSWRFIKPWTTFTEDTKAALDSIIVSFKQNLRVINKTSNFYWHYENGKKVLKKQTKGDGWALRKSLHKATVSGAVRLQSQKTVRLKDALANWHLIVDKTIRAGIKHVIKDIYHGKIDQKTLLKYFKDRDYKLDGKDISKLNIWFTPAVPEATASRTKLNETFDKKNIEKITDSGIRKILLRHLENCGGNPKVAFSPDGIAMMNDNIKRLNNGKDHKPILSVRKYDAIGNKFRIGEYGSKSKGYVVADKGTNIFFAIYNSNKGVRTYESIPYNVEVERQKQGLPIAPEENSKGDKLLFVLSPGDLVYMPNENEHVDKNLDKGRIWKFVSTSLGRAQFVPERLAVPIADNMEYAKNKTEFDDYHRSIKAFCRKIIVDRLGRITKIE

SEQ ID NO: 3425 - protein, 1484 aa, unidentified
  REGION 1..1484: note = Description of Unknown: Cas Enzyme sequence
MTKILGLDLGTNSIGWAMLDDKENCFIKAGSRILPMDAKTLGEFENGNTISPANARTKLRGVRRLYERSKLRRERLLRTLNILGFLPQHFKDGIDFIAHPGQFIDNREVLLPFRSGIKANYEFIFQDSFNEMLNEFRSNKPMLFSDGKKVPYDWTIYYLRHKALSKPISKEELAWILLQFNTKRGYFQLRDEMVDEESEAPTKTEEYTIVKVTKVERLDPDKKHVGNYWYEITFDDKVTLRRTSTNPPMEIGQEMEAIITTQLDKNGEVKVDKNGKSRISLRLPSDTDWTLQKKRTEKCISESGDTVGTYIYKQLLADPNVKIKGKVVRVIERKYYKDEIEKILKKQKEFIPELSDINLLECCVRDLYNHNEAHVSHALKNDTIDFLINDVLFYQRPLKSKKSEISNCPFETYNFVDKTTGEIINRPIKCIPKSNPFFQEFRLWQFINNLRIVEKERNVNGVLRTDVDVTNEFLKSEKDITDLFEWLNGLEKIQQNQLIKHFVKKESGRYRWNYVEDKTYPCNETLYEITKRMKLVNSDIQLGDDQIMNLWHISYSVSDVLDLKKALSSFAKKNHIDVTRFVDVFMDIKPFDKAYGAYSEKAIKKLLPLMRIGKYWKEDAIDSKTHAKIESIVNGDTDIDLLEKCKVNNLHHFHSFRFLPLWLATLIVYGIKEQYGWEKPEDIDYYLKYTFKQNSLRNPIVQSVLSETLRVIRDIWKTYGKIDEIHIEMGRDLKANAQERKKQTENILRNEQINQRVRLLLQEFVNPEYRIDNIRPFSPSQQEILKIYETQALEQADSDDQDYLIIADNLGKNKHVSNSDIMRYRLWLEQKYRSPYTGQVIPLSKLFTPAYEIEHIIPQSRYFDDSLSNKVICESEVNKLKDSMLGYEFIQKHAGEIVTKTLGGNVKVFDVRQYEEFIKQNYSSQPAKKKKLLMDDIPDTFIQRQLNDSRYISRQAIEILSNVVRNENEKTLVSSKIIATNGRITDRLKKDWGINDIWNDIISPRFERLNSITKSQDFGQWVNNDGRRYFQINVPLSISKGFSKKRIDHRHHAMDAMIIACTTRNMVNYLNGTAALTKGDKQRYDLQHVVCDKVKVDDNGNYSWRVKKPWDSYTQDVHSQLQGIIVSFKQNLRVINKMTNFYWRYEDGKKVLTRQTVGDGWAIRKSLHKATFSGAVRLQDKKNVKFSEALKDWHQIADKQVRKAIKDVIALYKHYDINIINQYFKDRGYKIGDKDISKVELYVIPQEPTLSSTRKLLDDTFDEKTIQSITDSGIRSILQRYLTYKGGDPKIAFSPIGIAELNKNIKQYNNGHDHKPILRVKKSEAINCKFSVGSVGSKSSKFVEADKGTNLFFAIYSDDLGNRSYASVPLNEAVERLKNGLPVADAELEDGSKLLFVLSPLDLVYVPEENEYVSKITDKRKIYKMVSSTAKSVFFIPESIAHPIIDTVELGANNKAEKDWKGVPIKQVCYKIKVDRLGNAEIVK

SEQ ID NO: 3426 - protein, 1491 aa, unidentified
  REGION 1..1491: note = Description of Unknown: Cas Enzyme sequence
MGQILGLDLGTNSIGWAVVDNAAQKIIALGSRIIPMSADVLADYEKGTLETQMAKRRGFRGTRRLYERSKLRRERLHRVLRILGFLPVQYQQQIDFEKHPGKFKDNGVPLIAYRKDAYGKLQFAFISSFNEMIEDFAKHQPSLVADGKLIPHDWCLYYLRQKALTKPVSKEELAWIILNFNTKRGYYQRMEEESDNSKMEVYKRLKVVDVVDNGVNKRRKDQHDYVIEFEEGVKKTITSRYIPYGVGDELNLIVSYKLDKEGNRRTDVEPSTRIVNNEKDWTLLKTKTEADLEASSLTVGAYIYQHILNIPSDKIRGSFVRTIERKFYKDELVRILNKQAEFHEELRDSALYKKCVNELYHQNEAHRASLEGKSFTDLIVDDIMFYQRPLKSKKYLISDCPLESYTYIDKETGEIKPKSVKCITKSNPIFQEFRLWQFVRNLKIYAKQREVNGKLRLDYDCTSEFIKSEDDVASLFEWLNEKKEIDQTQFLKYPGFGIKKTELDNYRWNYVEDKKYPCNETRYLIMSRLKKVDKALTLTTDEFYKLWHILYSVDDRIQLDKALCSFARSIAADEDEFCSQFRSTPPFKAEYGSYSQKAIAKLLPLMRCGKFWDEAAIDASVKERIDSIVAVGIENQKIMERVNERSISLSRISDFRYMELWLALYVVYGDKADVREDRRWTTPDDIDCYLRFNLKQGTMRNPIVEQVVTETLRVVRDIWKAYGSIDEVHIELGREMKQTKDQRLKTLARITDNENTNIRIRALLQEFTDPSYGVKDVRPYSPMHQEKLKIYEEAVLDAVEADDEIKDILKGFRETDASKRPSHKQVERYKLWLEQHYCSPYTGQPIPMSRLFTEDYQIEHIIPKARYYDDSLSNKVICESEVNQLKSNMLGYEFIREKGGQIIGNGLKILNTTQYESFIKDNYSRNRAKMNNLLLEEVPESFINRQMNDSRYISREIMHILSNLVRNEKDDDEPVSKNVIPLNGKVTTVLKKDWGLNDVWNQIVYPRFERLNRITESYDYGEWRMVGGKKVFQTSVPLAISKGFQKKRIDHRHHAMDALTIALTTRNHINFLNNVYSGSEGIKNREALKRVLCDKQNGEWLFKKPWESFTQEAFTALSGIIVSFKQNLRVINKMNNHYQKYVDGRKQYVKQTAGDSWAIRKSLHKASVSAAVNLKLVKSTRLADALKNDWELICDKEIKKAIKELIKQYGGRFDAKVITKYFKDRDFKLNGKDISKVEVFYYSDEKEPLSARRELLDTSYDEKKIMSITDTGIQRILLNHLHKYDDEKGKAHPENAFSPEGIMEMNKNIQELNGGKPHKPIYSVRKTESKGMKFSVGSSINNLRKYVEADKGTNLYFAIYIDNDGLRSYESIPFNIVVERLKRRLPAAEEVKEDGRKLLFTLSPNDLVYVKEDDSKINENDNLDNGSVYKMISSSDRDCFFIPAFVASPIVKTIELGSNNKSERSWNGLQIKKVCCKLYVDRLGRVYKIIQ

SEQ ID NO: 3427 - protein, 1214 aa, unidentified
  REGION 1..1214: note = Description of Unknown: Cas Enzyme sequence
MKKILGLDIGVSSVGLAIVEDSAKGKKVLKMACRVVPEDPNFHGKFYSGNTASKNLARTEKRGIRRNNQRFKTRRNKLYALLRLHDMFPDKALFLLDAYQLYGLRAKAVEEKISLKQLGRILILLNQRRGFLSNRKSVSEEESSSAYKDRIAELENDRSGKTIGQQLYQELQEAKETQHILLRERTYLRASYVEEFDRIWNKQQQFYPELLSGGPGQSDNGGTLYDEICNKTIYWQNPLKSQKGLVSACPFEKHHKAVAKSSPYFEIFRIWQKVNDLNWKTESGEEQTPSEQQKEALFNALFYGTGLNKHYKLTITAIKKILGFSRNERVYLSHTELDGSRTYSMLKAALIRAGVDDAEQYLFFNLDQHDEKGGLFELWHLTYSLPDEQQVVSSLMRRFGFTEDQSQTIARSVGYTSDYGRLSTRAIRKLLPYLQKGLQYSEACDEVGYDHSGYKTKIEIQDRLLPVRQNSLRNPVVEQILNQMVNMVNIAIDQYGPFDEIRVELARELRNNAQSRKRISAHNAKDKKTNDSIRTCLKEEYGFKIVNNRDIKRYKLWQETKQQCLYCNNPITVNEFLQGQADIEHILPKSRSFSNAMNNYILAHRTCNKTKDQRTAYDFMASLGEERLHQYIEKVNALYKDGAGSISKVKFENLLCRGEDIPSDFVERMKKDSQYIAREAVKLLKTVCEATYTTTGQITDLLRKEWELEHLLREINLEKYKLAGQVEMKNYKNSRGETVPYTAIKNWSKRDDHRHHAVDALICALTDQKVIFRLNNLNKIYQYKRNELTGEELASFEKETGKHLDLKEFIDQGAYEFQCPIPNLRAQVKHHLENLLVSFKKSNSKVLTPNIDQNTGKKYWTPRGRLHEETVMGKVKRIAAKPAKLDDRFRQHEDIVDPAIKELVIHHLEQYDYNPRVAFTAKILRNYPLRYKGKVLKEVKVYEKVGTKRIALDENITHAQVKKLTDQRIRHLVERRIAEAGSIKQAFRNLDENPVWLNQEKGIKVKRITVFDENTVIQTSVKRDHFGKELLKDGRPVPTNNVATGGNHHALVYKNHKGDYTIKVISFWEAVGIGLANIEQTSKPYPVVDRSDHIEWGAFRFSMQINDLFVFDLKHRADSRNDDELDFLEVKNLDQISCKLFRIQKISVAKTGQTIIDFRHHLETRVDRKDANGKSIDEAPLKGITWNRISGKKDLGRITKIRLNHLGNIIKVGE

SEQ ID NO: 3428 - protein, 1460 aa, unidentified
  REGION 1..1460: note = Description of Unknown: Cas Enzyme sequence
MKRTLGIDVGTNSVGWALVNHNFDDRSGNIIDLGSRIIPMPADEIGDFNKGSLTSAASQRTMKRGVRRLFQRANKRRERLVRVMKIYGMIPPDWEPNQFASLSYEMHEGKSVFRFPESYKEMRKEFDLVHPELGIVPHGWTVYYLRKKALTTKISLAELAWVILQFNTKRGYHQLRNDEELDTKDNKFFLRDKVVQIDDLDDVVRGKRKMLIHLSEGLVGEYSDKEIPEWVGKSKEFIVTTKQTKDGEKVSLTAPKDTDWTLRKKRTESTLESYDSTLGAYIYELLLQDPMIKIRGSAVHTVDRHWYKEELTAILDTQVKYHPELLEVSQYESAIQELYKHNEAHKANLRKYDLRHLIIEDIIYYQRPLKSKKYLISNCPHESYKYMRDGNWISKPIKVAAKSHPVFQEYRIWALLHNLRIHEFEQRQHDGSIQLAVDVTGKYLGMPMKLKLYKVFSNFKEVSQAKVLSTLGLSKSEYGLNYNPEEKFIGHETRAAFLKPFAKSEYRATLSSLLEDQKSLLDLWHIFYSLDASADHISSAIDRRFPDLPDEVKIKLLTVSGFKKEYASYSLKALRKLTTLMRVRGDADQSEIPESASERISKIVSAEVDDDIPDHLRHYLAELTDSTDYHGLPQYVASYLVYGVHSESRDKRIYESYKEIDLQKLIPQHSLRNPVVEKVLRETMAIVKDVWKAYGKIDEIHVEMGREIKLPNDKRSKLISRQQEQRQANKRAKTMLRELKKENGNINPHSRGHIETFKIFEEGAAGLESNLDDDIKAIRRKGDPTPNEITRYKLWLEQRYRSPYTGQIIPLSQLFQSSYEIEHVIPRGLFYDDSFNNKVICESAINSLKGNRTAYDFISSDAGKTVSGHTVLEREPYENLVEEMYKKTNKRKYENLMRLDPPYGFAQRQLNNTRYIARKLLDLLDPVVREEGEIAARSRNILPMVGGVTSSLRNDWGLHDLWKRLLAPRFQRMNAITGTNDYYNFVDGRIDLSGYETELKRIDHRHHAIDALVIALTSRQHIAYLHSRKSENRRYDLEPKIIKKDKDRKYFISPWEKFVPEAEDHLRRMIVSFKYKHRIINKTVNRYQKYVKGSDGNYKKAWVMQENTDDHWALRQQHSKDTYYGKITVKEYKKVSINTALKSPKDIANPKLRARVLRELREYGDDLKQYKKHLKDFPLKMDDEGVKKVDVAVYNDYGTSVMTLNDSCTPKQLKKIVDPQLRNQLLQHLSDHGMDVKEAFSTNGLIKFNANKQVPVRSVRIMESFGLKVPLGQQGNKKEKHVKGADGTNLFMGVYWDHTAKRRRFESISLSVAVTHQISQASDTEREKYPFPLNSDLGEFLFYLSPGDLVYAPKQSEIANKELVDIENFVPDQVNRIYRVVSISPGLCYFRKHTDASELIKKEFGSQSKSERLRLVNQEKMEGKIAPMIKKIGWKLTVDRLGHVVDMVIGESDKFANWEE

SEQ ID NO: 3429 - protein, 1424 aa, unidentified
  REGION 1..1424: note = Description of Unknown: Cas Enzyme sequence
VNTENGKPESIIKAGSRIIPMDAGEMSDYESGKLQSSASVRTAFRGMRRLYERAALRRERLLRVLNVLGFLPQHYRDQIDFDEHTGKFKNHGEPLLPYRKNETGKSEFIFQQSFLEMLEDFMKNNPQVLEGGRLIPRDWTLYYCRKKALDREISRGELAWILLNANSKRGYYQLDEEKTEKSNAEKEYRRAKVVSVEKQDEDRKQKGYFFYKITYEGGLTQTRKCKMQPWRVGDYVDLVITTPLDNNGKPKKDEDGEIRKTLSSPKEDDWGLVMQKTQAGIDHGNGTVGEYIYNSLLENPSEKVKGGIVKTIERHYYKDELRKILEAQSRFIPELQDHGLYIKCVKELYHNNESHANELRHRNIIDFLINDVIYYQRPLKSKKSCVADCPYESYTYVDKETGEIKKRPLKVMPKSHPLFQEFRLWQFIRNLRVTENEKIVDERRFFGYDVTAKYIGTPEDVCRLYEKLSGYADISESKVLKALGLNAKMFKWNYGSKKEFPGLKTHHEFASRIAKLENARELTQKEEYKLWHILYSVSDRDELEKALKHFAEECEFNPQNFYEQFKAAPKMRGDYASYSERAVRRLLPLMRTGKYWDEKEIDAATLKRINAIIADGYNPCEDFPEFKRVGDFQNLQLSDACYVVYGRHSENADNSVWTSPEEIDEYLCGEFRKNSMRNPVVEKVVAETLKVVRDVWKTYGKPAEIHVEMARSLKDPNDKRKEATERMAENRRDTIDVREKLQELKDGHKADNVNPNSSIHILKYKLWKEQGGQSPYTGKSISIARLFTDEYQVDHIIPQKRYYDDSFTNKVVCESAVNLDKGARLAYGYILAEGGKEIDVTVNGKREKTAIFPKEQYEEWVKKHCVRENGIGRKGKNLMMTDVPASFNASQLNNTRYIARKTAEILSHIVREGSDPGARSKNIIMTNGSITDRLKKDWGLKQIWSELMQPRFERLNDKTQSNDYGEEITDSNGKRYFQTRVPEVLAEKFDIKRIDHRHHAMDAIVIACTSLSHINYMNNLSGGEKERYDLRRVLCEKDSRAFLKPWETFTQDSREALNSIIVSFRQNLRIVSRASNYYNHYVDGKKVTERQTKGEHFSIRKPLHKATYSGLVRLPETKMEKIENTIDNPEQIVDKSIRKGLKEVLAQYNGTADKKKIKKYFKDRDYKLNGVDVSKVKIRFVPEQARHSAHRTALGSITNKKQLDSITDSGIRKILLNHLENYGGNYEEAFSPEGISSLNDNIRQLNGGRDHKPVKCVRVSEKFSLKFSVGQNCSKIKTYVEAADNTNLFFAIYVDEEGKRAFETIPLNVVVERKRQHLSAVPEHNDKENKLLFSLSPGDLVYVPEEGEHIAMPLDYERIYKMQSTDSNKCFFVPQYVAARIADKIEYGPKNKSERDLNGNQIKKVCLKLEIDRLGNIIKITGND

SEQ ID NO: 3430 - protein, 1442 aa, unidentified
  REGION 1..1442: note = Description of Unknown: Cas Enzyme sequence
MKTVLGLDLGPGSIGWALVNTENGMPESIIKAGSRIIPMDAGEMSDYESGKLQSSASVRTAFRGMRRLYERAALRRERLLRVLNVLGFLPQHYRDQIDFDLHPGKFKDHGEPLLPYRKNEAGKSEFIFQPSFLEMLEDFRRNNPQVLEGGRLIPRDWTLYYCRKKALDREISREELAWILLNANSKRGYYQLDEENAEKSNAEKEYRRAKVVGVERLEEDRKQKGFYFYKITYEGGLTQTRKCKMQPWRVGDEVDLIITTPLDKNGKPKKDENGEIKKTIRSPKEDDWGLVMQKTQAGIDHGNGTVGEYIYNSLLENPSEKVKGGIVKTIERHYYKDELRKILEAQSRFIPELQDHGLYIKCVKELYHNNESHANELRHRNIIDFLINDVIYYQRPLKSKKSCVADCPYESYTYVDKETGEIKKRPLKVMPKSHPLFQEFRLWQFIRNLRVTENEKIVDERRFFGYDVTAKYIGTPEDVCRLYEKLSGYADISESKVLKALGLNAKMFKWNYGSKKEFPGLKTHHEFASRIAKLENARELTQKEEYKLWHILYSVSDRDELEKALKHFAEECEFNPQNFYEQFKAAPKMRGDYASYSERAVRRLLPLMRTGKYWDEKEIDAATLKRINAIIADGYNPCEDFPEFKRVGDFQNLQLSDACYVVYGRHSENADNSVWTSPEEIDEYLCGEFRKNSMRNPVVEKVVAETLKVVRDIWKTYGKPAEIHVEMARSLKDPNDKRKEATERMAANRKDTIGVREKLQELKDGHKADNVNPNSSIHILKYKLWEEQGGLSPYTGKRISIARLFTDEYQIDHIIPQKRYYDDSFTNKVVCESTVNLDKGARLAYEYILAEGGKEISVTVNGKHERTIIFPKEQYEEWVKKNYMKEGVVGRKGKNLMMTDVPASFNASQLNNTRYIARKTAEILSRIVRGENDQGARSKNIIMTNGSITDRLKKDWGLKQIWSKLMQPRFERLNDKTQSNDYGEEVTDSNGRRYFQTRVPEELAEKFDIKRIDHRHHAMDAIVIACTSLSHINYMNNLSGGEKERHDLRRVLCEKDSRAFLKPWETFTQDSREALNNIIVSFKQNLRIVSRASNYYRHYVDGKKVTERQTKGEHFSNRKPLHKLTYSGLVRLPYTKMEKIENTIDNPEQIVDKSIRKGLKEVLAQYNGSADKKKIKKYFKDRDYKLNGVYVAKVEVRIVPEQARHSARRTALGLIKNRKQLDSITDTGIKKILLNHLENYGGNYEEAFSPEGISSLNDNIRQLNGGRDHKPVKCVRVSEKFSLKFSVGQNCSKIKTYVEAADNTNLFFAIYVDEEGKRAFETIPLNVVVERKRQHLSAVPEHNDKENKLLFSLSPGDLVYVPEEGEHIAMPLDYERIYKMQSTDSNKCFFVPQYVAARIADKIEYGPKNKSERDLNGNQIKKVCLKLETDRLGNIIKITGND

SEQ ID NO: 3431 - protein, 1529 aa, unidentified
  REGION 1..1529: note = Description of Unknown: Cas Enzyme sequence
VHLSDFLCIFAAQIALKNIINENINSMAKILGLDMGTNSIGWAILDTDEKKFLKTGSRIIPMDAATMGDYEKGNLESAAKARTGFRGMRRLYERSKLRRQRLLRVLNILGFLPEHFRNHIDFDNRLGQFKDDSEPLIAHYRDNNGKMQFLYRDAFQEMLSDFRKHQPELIKDGKLIPEDWTIYYLRNKALTQPISGKELAWILLNFNAKRGYYQLKGEEEEDDVKPNKIEEYMTLKVDKVNQIEPNKKRQGYYWYEIIYENGCTQKATGPVPPRKAGDLVEVIVTTEIDENGNVKITKDGDKKIKLRAPKEDDWTLLKKRTEFEIGKSGCTVGSYIYQNILKTPETKIRGKLVRTIERKFYKDELYQILEKQKEYIPELQDTNIYKKCVRELYRNNEAHVESISSKDFTSLFVDDIIFYQRPLKSKKSLISDCPYEWRTYKNQETGEIEKEPIKCTPKSNPLYEEFRLWQLLSNLRIFKREIEVDGKLRTDYDITSTLLKSKEDVANLYDWLCDKKEITQNILLKYPGFALKKTSDYRWNYVEDKAYPCCNTTFEINKRLAKVEKSPILEKESIKQLWHIIYSINDPTETQKALGSFARKHNIDEESFISNFKKIAFEKEYGAYSEKAIRKLLTLMRMGHHWNEEAIDPQVMQRINNIIDGVADDSISTRAREKSLSLQSVNDFQGLPLWLACYAIYNRHSEANDITRWQTPEDIDYYLQNHFKQHSLRNPIVEQVLGETLRVVRDIWKKYGKIDEIHVEMGRDLKKDAKGRQKAHDKVMENERTNLRIRLLLQELASPDMNVEGVRPHSPSQQEILKIFEDGILSDPSRNSEIPDDIRTIINDLGSAGKAEHISHSDVLRYRLWLEQKYLSPYTGQPIPLSKLFTTDYQIEHVIPQSRYYDDSLSNKVICESEVNKEKDRMLGYEFITQKGGMIIKGNGGKDIKVFDKEQYEDFVKQHYSGNRTKMRNLLMDDIPEGFVQRQINDTRYMSRKIISVLSNLVRDEDEQEATSKHIIPTIGSITDRLKKEWGLNDVWNDIIAPRFQRLNELTNSNDYGEWVNKEGKRYFQINIPLEISAGFSKKRIDHRHHAMDAMVIACCTRDIVNYLNNSLATDNKKDLRYDLRNKLCTKYKTDNLGNYVWVFNKPWETFTQDVKYQLQNIIVSFKQNLRIINKMSNYYQHYVDGKKVIDKQTKGDGWAIRKSLHKATVSGAVSLQRKKTVKLSEALKDWKSIADKELRNEIKRLITLYNGFDAKTITKYFKDREYKLGKRDISKVETYYYTSGKEALSATRVSIDVSFDEKKIMSITDSGIQKIMLKHLHNYDDAAGKSHPEIAFSPEGIATMNDNLKTLNDGKEHKPIYKVRKTETLGAKFPVGESAAKKKKLVEADKGTNLFFAIYADKDNSRSYESIPLNVAVERLKNHLPVADYTKGESKLMFVLSPNDLVYIPDMSGEVPDVLDISRIYKMVSFTGNELYFVGANVANVIKQGFEFGSLNKIQTLNSINLKSVCVKIIVDRLGFITKIYKDI

SEQ ID NO: 3432 - protein, 1441 aa, unidentified
  REGION 1..1441: note = Description of Unknown: Cas Enzyme sequence
MKKILGLDLGTNSIGWALVDFDLTDKSGQINGLGSRIIPMSQDILGKFDSGQSHSQTAERTGYRGVRRLYQRDNLRRERLHRVLNILGFLPEHYRDEIDFVNRKGQFKKEVKLNYRQNSKGKHEFIFMDSFNEMVNEFQKAGKNIKIPFDWTLYYLRKKALTQKISSQELAWIILNFNQKRGYYQLRSDEAISDENKNEKFYALKVVDVKATDQKKGDEIWYQVILDKKDEDGTPWIYPRKSKEPLDAWIGKVREFIVTEKTAKDGSLKRSFRSPNENDWGLVKKKTEQEIEQSQKHIGEYIFDTLLHLPNQKVRGKLIKTIERKYYKKELKAILEKQLEFHPKLRDNALYQACVDELYPRNEAHQRNIKDRDFVYLFLEDIIFYQRPLKSKKSTIAGCPFESKKFFKTEINKETGQEENKWHEVPIKVISKSNPLFQEFRLWQWLKNLSIYENEKNINGKLNLNVNITDNLLKSEDDWVDLFDFLNARKEVEQKHILNYFVSKKLLDKKQLDNYRWNYPEDNKYPCNTTRSSFLSRLKKVQDIDPESFLSKDVEAQLWHIIYSVKDPVEYEKALATFAKAKSIHVDSFVESFKKYPTFKAEYGAFSEKAIKKLLPLMRTGKYWIPDNIHETTQKRIDKIITGEYDEKIRTRVREKAIHLNRPEDFKGLPIWLASYVVYDRHSEIGDIQHWKTPDDIDKYLQSFRQHSLNNPIVEQVVMETLRTVRDIWKQYGQGEEGFFDEIHVELGREMKNPQKVRQNMAKRNQENQNTNERIRALLQEFTENGANPHSPSHQEILKIYEEGVVGSKPMSDTIEKIRKNRTPSKSDIHKYKLWLEQEYISPYSGKPIPLSKLFTTAYEIEHIIPQSKYWDNSLGNKVICETELNKLKGNQTAYAFIKKYGGQIHDGIPILKLHEYEAHCQKYFKSNRSKLKNLLSEDIPEGFINRQMNDSRYISKLVMGLLSNIVREKDEQEATSKNLLPVVGRLTSKLRRDWGLEDKWNELVLPRFKRMNELTKSEDYTYKNSQGIEIPTVPDDLLNNFSKKRIDHRHHAMDALVIACCTRQHTQYLHSLNNEKLKFNLQPLLMVKNDNGHYTKYFQLPWKSFPVDAKHNLDKVVISFKQNLRVINKTNNKTWQWKKQKDGKYKKELVRQTKGDSWAIRKPMHKETVSGKIGFKAGKGKIATAVRTSLSEIKNFKHLEKITDSGIKKILKNHLKNYGDGKSKEAFDAAFSPEGIQDLNKNIKQLNDGKNHQPIYKVRQYEVGSKFPVSENPESPKNKKYVEAAKGTNLFFAIYWDDKKQKRTFETVPLNAVIAHQKLVANLPKSERTPIPVDAQKGKFLFALSPNDLVFVPTDEELENPSLVDFQKLSKEQISRIFKVVSSTGNRLYGIPNSIAKPIMNKFEFSSLNKLEFDLSKRSIKQYCWKLQINRLGKITNYMS

SEQ ID NO: 3433 - protein, 1246 aa, unidentified
  REGION 1..1246: note = Description of Unknown: Cas Enzyme sequence
MLNKKRGYKSNRKANDKEEGKLFDGMTIAKKLYEERLTPAEYSLRLFYQGKKFTPEYYRSDLIAEFEKIWNEQQKYYPEILTDEFKQQLEGKAKSNTSKLFLGKYGIYSADTKGLDRRLQPLKWRVEAMKQQVDKDVLAFVISDLKGQIANTSGLLGAISDRSKELYFSKQTIGQYLWASLQENPHISIKNQPFYRQDYLDEFEKIWETQATYHKELTSELKQEIRDIIIFYQRPLKSKKNLIAVCELEQRKVKVTVDGKEKEITIGPKVAPKSSPMFQEFRIWQNLNNILLLDHETNSKRPLYEEERNLLYEELSVKEKLSKTEALKVLGKKSKQWDLNYKELEGNRTQAVLYDCYNRIIVMSGHEECNFKKLKASDIRHYVKMIFKNLAFNTDILCFDSSLKGHELERQPMYQLWHLLYSYEGDNSRTGNDALLRKLETSFGFPKEYAAVLADVIFEDSYGNLSVKAMRNILPHLQAGKDYSQACEEAGYKHSRRSLTKEELNQKVYKEKLELLPKNSLHNPVVEKILNQMVNVINAVIEEYGKPDEIRIELARDLKIGAAERENMTRSINQGNAENKRIREILEKEFALSYISRNDIIKYKLYEELKPNGFKTLYSDTYIPKDKLFSKDFDIEHIIPKARLFDDSLSNKTIEACDINIAKIDMTALDFIGNKYGEQGVEVYKKKLGTLLQDGSISKAKYNRLLMKEADIPSGFIDRDLRDTQYIAKKAYEILSDLVRNVTPTTGSVTNRLREDWQLVDVMKELNFEKYQKLGLADVVEDRDGRKVKRIKDWTKRNDHRHHAMDALTIAFTKPSYIQYLNNLNACSDKSSSIYGIEVKELHRENNKLRFNAPLPINEFRAEAKRHLKSVLVSIKAKRKVMTQNVNIIKTKHGVIKKVQLTPRGELHNATYYGTKKRPVVRMVKVGAALDEAIINRVCSLAIRAALLKRLNAYNGDAKKAFTGRNSIDKNPIYLDVEQTKIVPPLVKTIEWGLYHPIRKRITPDLKIDKVIDKDIREKLKARLAEFNGDAQKAFSNLDENPIYMDEAKQITLKRVSIKGVLSAIPLHTLKDKAGKPIIGSDGRPVSGDYVQTSKTHHIAFYIDDKGNLQDNPVSFFKAAKRKSQRIPVIDKRYNCDKGWHFVFTMKQDEYFVFPNEATGFIPSEVDLLDEVNYDIISPNLYRVQKLSKTSGRDYWFRHHLETMLNNDLKLKNSTFKRIQSLKGLEGIVKVRINSIGKIAAVGEYD

SEQ ID NO: 3434 - protein, 1375 aa, unidentified
  REGION 1..1375: note = Description of Unknown: Cas Enzyme sequence
MKKILGLDLGTTSIGWALVNESENKDEQSSIVRLGVRVIPLTVDEKGNFEKGKAITTNADRQQVHAARINLQRYKLRRENLRDCLQKQGWIGSEPMCEDGKSSTFETYKLRAKAAVEEVSLHEFARVLFMLNKKRGYKSNRKANDKEDGKLFDGMTIAKKLYEERLTPAEYSLRLLYKGKKFTPEYYRSDLIEEFEKIWNEQQKYYPEILTDEFKQQLEGKAKSNTSKLFLGKYGIYSADTKGLDRRLQPLKWRVEAMKQQVDKDVLAFVISDLKGQIANTSGLLGAISDRSKELYFSKQTIGQYLWASLQENPHISIKNQPFYRQDYLGEFEKIWETQATFHKELTSELKQEIRDIIIFYQRPLKSKKNLIAVCELEQRKVKVTVDGKEKEITIGPKVAPKSSPMFQEFRIWQNLNNILLLDHETNSKRPLYEEERNLLYEELSVKEKLSKTEALKVLGKKSKQWDLNYKELEGNRTQAVLYDCYNRIIVMSGHEECNFKKLKASDIRHYVKMIFKNLAFNTDILCFDSSLKGHELERQPMYRLWHLLYSYEGDNSRTGNDALLRKLETAFGFPKEYAAVLADVVFEDSYGNLSVKAMRDILPHLQAGKDYSQACEEAGYKHSRRSLTKEELNQKVYKERLELLPKNSLHNPVVEKILNQMINVINAVIDEYGKPDEIRIELARELKSSADERESITRGINQGNAENKRIREILEKEFALSFISRNDIIKYKLYEELKPNGFKTLYSDTYIPKDKLFSKDFDIEHIIPKARLFDDSLSNKTLEARDVNIAKSNKTAFDFILERYGEQGVKAYKTKLLRLLEEGAISNKKYNNLLKTEADIPSGFIDRDLRNTQYIAKKAYEILSELVKIVTPTTGSVTNRLREDWQLVDVMKELNFEKYLKLGLADVIEDRDGRKVKRIKDWTKRNDHRHHAMDALTIAFTKPSYIQYLNNLNARSDKSGSIYGIEVKELHREEGKLRFNAPLPINEFRAEAKRHLKSILVSIKAKKKVMTQNVNKIKTKHGIIKKEQLTPRGELHNATYYGTKKRPLVRMVKVGAALDEATINRVCSPAIRAALLKRLNTYNGDAKKAFTGRNSIDKNPIYLDIEQTKLVPVLVKTIEWGMYHPIRKRITPDLKIDKVIDKGIREKLKARLAEFNGDAQKAFSNLDENPIYMDEAKQITLKRVSIEGVLSVIPLHTLKDKAGKPIIGSDGRPVFGDYVQTSNNHHIAFYKDDKGNLQDNPVSFFEAAERKSQGVPVIDRRYNCDKGWHFVFTMKQNEYFVFPNEATGFIPSEVDLLDEANYCIISPNLYRVQKLSKASGRDYWFRHHLETMLNDDLRLKNSTFKRINSLKGLKDIVKVRINSIGKIVAVGEYD

SEQ ID NO: 3435 - protein, 1402 aa, unidentified
  REGION 1..1402: note = Description of Unknown: Cas Enzyme sequence
MKKILGLDLGTNSIGWAVVQESETDEEASSIVQLGVRIVPLSIDETQYFEKQKGETLNAQRTVKRSMRRNLQRYKLRRADLINTLKREQWITAETLLSEQGPRTTFETYRLRARAAVEEVSLSELARILLMLNKKRGYKSNRKAKKADTDADGAFVSGLDIARALYDQGVTPAEYVLPRLQQGINFIPDFYRSDLQQEFQRIWDFQKKFYPEVLTNAIREEVTGKNRSQTWAILAKHWHTEVKDASGQTVLCPLQGIKRTTKGRDLKVENYVWRVQALKRPMPLEELAIVLQEVNGAISTANGYLGAISDRSKELYFRHQTVGQYLWNMIETQPGVSLKNRVFYRQDYLDEFETIWTCQQQYHTELTDALKRELRDTIIFYQRRLKSQKNRIAYCEFEQQQKTIEVDGKPKTIIIGSRAIPKSSPLFQEFKIWQVLNNLKVSRVEKSIAKGKRASTPALGDDLREGVERPLTLDEKRSLATELSIKDKLTKTEALKCLFGKSAGLDLNFKVIEGDRTGARLYQAFNTLIEYSGHTPFDPKAPATETLAQVEAIFQALGWNTSVLHFDSAQPLDNQPYYRLWHLLYSFESDSSATGDQALLHKIADLCGIDLAYASALSQVTFAEDYGSLSAKAIHKILPYMKEGTPYDVACLYAGYRHSASSLTREELDAKVLKDQLAPLRPNELRNPIVEKILNQMVHVVNAIIQAHGPLDEIRVELARDLKKSAQERQEATEGIAAATKVNDDVRKVLESEFHLEHVSRHDILLYRLYDELKANGYHTLYSNQYIPREKLFSGEITVEHIIPRARLFDDSFSNKTLEYKDENIEKGKRTALDFVREKYGEEGVKRYRDACERCLKKDSTKYRKLMMSQTEIPEDFIDRDLRNTQYIARKSREMLSDVCRRVVATTGSITDRLRDDWGLVDVLKELDWDKYHALGLTETYRTRDGHEVRKIQEWTKRNDQRHHAMDALTVAFTRDAFVQYFNNMNAGENEASAIYGIKQKYVREAHVLPPMPRAAFRAEAKRHLEEVLISYKQKNKAVTFRTLSTPDGALRHFCTPRGALHEETIYGRNQEYKTNEVKVNAAMDEPTIQTVCNRRYREALLARLHACQDDPKKAFTGRNALDKNPLWLDAEHTHSVPSAVKVAHLESYYTVRKAIGKDLKIESVVDVRVRQILQQRLDEYGGDATRAFADLEHNPIWLNRERGISMKRVTIHTTVKGCLPLHALKDKDGRYLLSDDGRRQQTDFVKPGANHHIALYRRPVIDKEGRKSYVVEEVVVSFFEAVARALNGDAIIDRNYMAHEGWQFLYSLQQNDYFIIPTETFSPADIDLLDPANLTVISPHLFRVQKLSSKYYNFRQHLDTTTDEAAQLRGITWQRITNLQTMEKLIKVHVDRLGHIVRVGE

SEQ ID NO: 3436 - protein, 1368 aa, unidentified
  REGION 1..1368: note = Description of Unknown: Cas Enzyme sequence
MKKVLGLDLGTTSIGWAYVEESEAKNESRIIATGVRVVPLTTDEKEDFTKGRPISVNADRTLKRGARRNNARFKLRRDLLLNYFYKNNFIKHEDIIPESGSESTHEILKLRSQGVEEQISLKDFCRVLLTLNKKRGYKSSRKANIQEEGEIVDGMEVAKILFQKKITPSEYSLQILKSGKKKLPDYYRSDLVGEFIEIWNYQSQYYEDILNDEFKEKILGRTSKATAYIFSTEKGINPIELKGKRDEKKLQTLELCVLAKTSKLELPELVFVFKSLNDKINKSSGYLGAISDRSKNLYFNGITVGQYLYNKIKINPHISLKNLVFYRQDYIDEFEKLWQNQSKYHSNLTDGHKKRIRDYIIYYQRNLKSQKHLLSNCEFEPQRKVIPKSSPLFQEFRIWQNINNLSVKNKVTQESLELIEFDQDVRNQLFEELNSTAKLTNKEVLKILMSEPNDYDLNFNEVQGNRTFDKLLRVIHEIITQEGNDLDIKKLAKQKGYKAISNEILGFAESLGIKTEIFDFDAGIIGNEFDKQSSMLFWHLLYAYIDDNSNTGITSLKKKLHERFGIPLEYTTLFCNIALEDNYGSLSSRAIRKILPHLKSGLKYDKACLEAGYKHSSYETKEEKDQKVLDKYLTLLPKNALRNPVVEKIINQMVNVVNAIIDDKQMGAPDEIRIEVGRELKANADQRKSSTSRIMEATKNHEKYKEILKKEFGLKYVNRNDIIKYKLYLELKPLGYKTLYTNRYISKEDLFSPNIDIEHIIPKSRFFDDSFSNKTLSFREINLEKGNQTALDYIRLRKDSNEGDLEDYRNRVNELYKNGISKTKKERLLTTGDKIPSDFLNRDLGNTQYISKKAMELLKKICRNVYPTTGKITNRLRSDWDLINVMKELNWEKYDKSGLTQVIEGKNGQRLNRIVDWSKRNDHRHHAMDAITVAFTKQSIVQYLNNLNARSDRSSVFYAIEKKELYVNNNNKLLFKPPMQNFRSEVKHHLKGVLISFKTKNKVTTNNINKIKIKGKNKFKTKTESTPRGQLHKETIYGKSKYYKTAEIPINSKLDKKTILTVANSKFRNALLKRLALYNNNPKKAFSGSNSIKINPIYIDEEKSILLPDKIKIVWLEDRFTIKKPIAPDLKLDKVIDPKIRIILKDRLAQFNGNKKDAFTNLEENPIWLNKKQGIQIKRVKISGVNNAEPLHHKKDHFGNDILDSRDNPIDTDYVQTGNNHHVAIYQDEKGKLQEEVVSFYEAVIRKNMGLPVIKRDHELGWNFLFTMKQNEMFIIPKDDFDPTQYDLKNPDNYALISPYLFRIQKISTKNYLFTHHLETEAINGDVLKNKKSLIGKTHYLYQSTKSLENLIKVRINHLGNIVQIGEY

SEQ ID NO: 3437 - protein, 1412 aa, unidentified
  REGION 1..1412: note = Description of Unknown: Cas Enzyme sequence
MKRILGLDTGTNSVGWAMIEQDIEAHEGKILGMGSRIIPMDQKEIGDFNKGNLESATAARTHYRGVRRLKDRQLKRRERLVRVLKCAGLIDKEWMPNHISSYAYELVDGKYHFKFKSAYQEMLGLFQAKNPKQKSVPHDWTVYYLRVKALTEKISTQELVWVILHFNTKRGYFQLRGDDALETDGQQSFVSSIVDEIEDLNDDVRGKKALKITLRDDIVGLYSTKEVPDWIGKQIEFIVTEKNVKGEVKVILSNPDPNDWTLRKKKTEQQIEGGNVTVAEYIFEKLLQDPSSKIRGKEVHTIDRKFYKEELNKILDQQIEHHKEFSDKIILEDAVNELYKHNVGHRENLLKRDLQHLLVNDIMYYQRPLKTKKHLISNCKYEFYYIKAKDGSISKKPVKAAAKSHPLYQEYRIWSLIHNLRVIEKEQKDNSGILRQDVDITSEVLDSSKKLALFHAFNSSAELSEKQILKAIGLNSTHYRFNYEEGAKLKGNETRAAFLKAAKKKNVIKEMETLLDAPEMLNRLWHSVYSLGDYSEQFKSAIENEKLAIPIDLIPSILDVSTFKKEYGSYSVKALKKIVPLMRVDSMWAVKNVHKNILQRIDKIVDAEYDDNISDRVREQLAHIKSVDDCNSMPEYMAVYLAYGRHSETIDLARYTSPNDIDVSKLIPNHSLRNPTAEKIIRETLQVVKAVWEKFGRPDEIHVEMARELKSSGVERKRITDRRNQNYASNQRAKAMLRELQQDQSNINPHSKGHIEIFKIYEEGAVVNQKDIDKDIQAIRRKGDPTKTELTRYKLWLEQKYLSPYTGNPIPLSKLFTPAYEIEHVIPRSVYYDDSFNNKVICERVANSEKDNATAYKFICDRGGETLSDGSTILTKDQYEEQIRRMYAINRSKYKNLMSYDPPEGFTQRQLNNTRYINKKLLSLLNPIVKEEHEQEATSKHLISMAGGITNDLKNDWGLHDVWKRILAPRFIRMNEMTDTTDYYRKEGNKLHLSGYQNELKRLDHRHHALDALVVACTTRRHIQYKNSLRSNNRLYNLESKLLKVDPKGTRGKSYKLPWQNIAQDTFDTLSKVIASFRQNKRVATKTTNYYQKYVEQSDGTWKKKYVKQATHPQHWAVRKSLHKDTVFGQVTLREYKHVSINEAIKNIDAIADRMIKIEVREILSKLGGNVEELKKYLKKNPIQRESKNLSKIHIIHYNSDYSTSKMKIDENVTIKQLHKIVDEDLKRQLINHLELYDLDAEEAFSVNGLIQFNEGRNTPVYQVKVKEVLGLKNNLVKSNEKGVKFVEADKGTNLFFEIGIDDETKEHIINKNSTKPFIEVLQQRVNGIENEKIVFGKITLSPNDVVKTKDGNFYKVVSFSKHQCYFVPVNYAGSIIDKVEFSVLNKFERADNGHMIKSKFEFVDLDKLGYL

SEQ ID NO: 3438 - protein, 1456 aa, unidentified
  REGION 1..1456: note = Description of Unknown: Cas Enzyme sequence
TQIYYIMSELKKIVGLDVGTNSIGWAYVSLNLEARKGEIHDLGSRIIPMPADEISNFNQGNLESATSARTAKRGMRRLRERQLKRRERLVDVLKIYGMIPEEWNPNRYSSFAYNYTDGKAEFKFKQAYKEMKAIFESAHPDISVIPNDWTIYYLRKKALEYKISLEELAWVILQFNAKRGYYQLRGDDDLDTADNKFFISDIVDEIVDLDDEVRGKKKFRIVLRDGVEGEFSDKEKPEFIGKRIEFIATEKSTKEGDYISLTKPDGDDWTLRKKRTEHKIAESGKSLGAYIFDRILEEPGIKIRGKEVHTIDRKWYRKELEAILAAQIEFHPELKDEKTYEKAIQHLYNHNESHKKNLRKYGFGHLIATDIIYYQRPLKTKKYLIRNCKFEKYFFKDKNGELESRPVKVTARSNPYFQEFRVWSTLQNLRIIAEERRNEKGELVQDVDVSQEYLHAENIGKLFELFMLKKEVSETQILKELKLDKNAYRINFESQNKLPGNITISSILQPFSKEKKLKKEVLELVRNQNDLHKLWHIIYSLGEDESHMRSGIQTAFPDRLSKDAVDLLLQVPGFDKNYAAFSEKALKKLLPVMRMGKYFDEKEIHSSTKERIEKVINAEFDLSIKDEVREELMNRTEMHQFQGLPLHTASYLVYGRHSEAESDRRFEKPEDIDVDELIPQYSLRNPTAEQVIRETLLLVKKLWEVHGKPDEIHVEMARELKLPNDKRAKYTQRRDENYNTNQRAIAMLNELKADQPSINPHSKGHIETFKIFEEGAHANAGSTADTKIKAIRKKGDPTPKELEKYKLWLEQKYRSPYSGQVIPLSSLFTSSYEIEHVIPKTLFYDDSFNNKIICETELNRFKDNKTAYQMILDAGGTVQNGIRILEREEYEELTKKMYGQNKIKYKNLMRTEPPYDFAQRQLNNTRYISRKLYELLDPFVREEGEEAARSKNLMPMAGGITHELRNDWGLHHIWKKLLAPRFLRMNELTQTDEYYQKNGQRIDLSGYENELKRLDHRHHAVDALTVACTTRQHINYINSRRAENTRYNLRDVLFDKDENGKYQGYRLPWKGFPEEAERSLRQVVVSFKNRIRVINKTINYYQKYIEQADGSFKKKFVRQESNGANWAVRQPLSKETYNGKVILREYKPMSINSAVKDPHLIADPKIRKHMIRLLKKFEDKKSKVKKYLKEKPFQRDGKEIKKLQMIEYNTYATSTMDLDESTTQKHIDKIVDPNLQQELYDHLEKYGGDAELAFSTNGLIDFNSSRKLPVQNVRVKEKFGLKYPVGQTGNKQDKYVESAKGTNLFFNVYWNEKKQKREFETISLQEVVLHQMSVAHLSKKERRPVPIDTDKGEFLFYLSPHDLVYVPTKNQIDSYRPKNVELSTLSAERIYKSVSFSNTTALFLPQTVSSIIKDKKEFEAKNKMQKDILGNSIKNNCWKLQVDKLGRIKNIITGPA

SEQ ID NO: 3439 - protein, 1186 aa, unidentified
  REGION 1..1186: note = Description of Unknown: Cas Enzyme sequence
MGKKVLGLDLGVGSIGWCLITLDKDEKPQSILGMGSRIVPLSADDATEFTQGKAITKNKMRTVARTIRKGMDRYQLRREALKKVLREHGMLPDEALIKLPLLELWELRARAATPGEQLSLTELGRVLLHINQKRGYKHAKADEAAEAETESKAKKEKESYVAQVKGRYQALKEKGQTIGQHFAGELRANQQTAPRGTYYTYRIKKQVYPREAYIEEYDRIMAAQRVFYPELLTDALIGRIRDRIIFYQRPLKSCKQLVSFCEFEKKEKVIRVKHTNKEGVEELVEKTITIGPKVAPKSSPIFQVCKVWESIHNIRLYHPDGTERVLEQEEKQKLFDYLQENDKLSLTVLRKELKIKPKDKLWCDKLLVNGIAGNTTAAILRKVLKGYEQYEGLLRFNLTTRDSHEVDEDGVIRPIIDESYQNEPLYKLWHILYSIEDREEMRSALIGQLGIKAEDLDSGLMDALYKIDFVKQGYGNKSAKFICKLLPHLQEGKMYSEAAEAAGVRHSDSMTAQERDERSLLEEIPLLQKNALRQPVVEKILNQMINLVNALKREHGEIDEVRVELARELKMSREEREQVLSNNRKRKGKNETIAKRIAAEDITPTKARIQKYSLWEESGGRCIYCGNPVGVVQFLRGEEIEVEHIIPRSILFDDSMSNKVCACRSCNQEKGNRFAMVYIQTKGWEQDYISRIETLFKGKKISDSKRQRLLMLPENLPEDFIERHLRLTQYISREAQGILRKGIRLVSASEGGVTAKLRQLWGYDNILRDLNLERYRSMGETEVVTVEHRDGERTDERIKDWSKRKDHRHHAVDALIVACTRQSYIQRLNRVNAEADRQEMDAFIKEQQEQKPSKKEKLSLLEHWLIRQPHFTTGEVTKHVEGILVSLRPGKRTISRGRNIYKRSGKTDVQRGVLIPRGALSEETIYGVISVDGVDKVVCKYPLQSLKPKDVGYIVDEVLREKVRERISQYGEKQAFAEPLYLDEAKTQEVRSVRCFTGKDQSKLVPLRYNIEGEAVGFVAPGNNHHLALYKDDDGNVVESIVTFWQAVERARYGLPIVVVNPREVMEKALAIPELPESVLRALPASNLRLMEVLRMNDMFLIGMKDGEIQAAIEGEDYPTLSRHLYRVQKLATHDYVFRYHLETTLDGKDNVGEIPKSYRAQSLKAYVKLNPRKVKIDLLGRISLV

SEQ ID NO: 3440 - protein, 1192 aa, unidentified
  REGION 1..1192: note = Description of Unknown: Cas Enzyme sequence
MGKKVLGLDLGVGSIGWCLITLDKDEKPQSILGMGSRIVPLSADDATEFTQGKAITKNKMRTVARTIRKGMDRYQLRREALKKVVREHGMLPDEALIKLPLLELWELRARAATPGEQLSLTELGRVLLHINQKRGYKHAKADEAAEAETESKAKKEKESYVAQVKGRYQALKEKGQTIGQHFAGELRANQQTTPRGTYYTYRIKEQVYPREAYIEEYDRIMAVQRVFYPELLTDALIGRIRDRIIFYQRPLKSCKQLVSFCEFEKKEKVIRVKHTNKEGVEELVEKTITIGPKVAPKSSPIFQVCKVWESIHNIRLYYPDGTERELVQEEKQKLFDYLQKNDKLTLKNLYKTLGIKDKDEEEELWCDKLLEKGIAGNTTAAILRKALKGYKQYEGLLRFDLTIRDSHEADEDGVIRPIIDESYQNEPLYKFWHILYSIEDREEMRSALIGQLGIKAEDLDSGLMDALYKIDFVKQGYGNKSAKFICKLLPHLQEGKMYSEAAEAAGMRHSDSMTAQERDERSLLEEIPLLQKNALRQPVVEKVLNQMINLVNALKREHGEIDEVRVELARELKMSREEREKTTKNNNAREKENKDAAERIKEYRVTPTKSRIQKYHLWDESGGKCIYCDNPMGVEQFLKGEEIEVEHIIPRSILFDDSMSNKVCACRSCNQEKGNRFAMVYIKSLGTEQEQKYISRVEGLFHAKKISYSKRLRLLMLPENLPEDFIERHLRLTQYISREAQGILRKGIRLVSASEGGVTAKLRQLWGYDNILRDLNLERYRSMGETEVVTVEHRDGQRTDERIKDWSKRKDHRHHAVDALVVACTRQSYIQRLNRVNAEEDRQEMDAFIKEQQEQKPSKKEKLSLLEHWLIRQPHFTTKEVMKHVEEILISFRPGKRTVTRGRNVYKRSGKTDVQRDVLIPRGALSEETVYGVIHAGGKDEVVCKYALRGLKVKDVDYIVDKALQEKVRGRISQYGEKQAFAEPLYLDEAKTQEVRSVRCFTGKDQSKLVPLRYNIEGEAVGFVAPGNNHHLALYKDDDGNVVESIVTFWQAVERARYGLPIVVASPREVMEKALAIPGLPESVLKALPASNLRLMEVLRMNDMFLIGMTDEEIQVAIEAKDYSTLSRHLYRVQKLSSRYYVFRYHLETEVKDEKNTTGNIPKFYRIVSFNAYNKLNPRKVKIDLLGRILLV

SEQ ID NO: 3441 - protein, 1185 aa, unidentified
  REGION 1..1185: note = Description of Unknown: Cas Enzyme sequence
MGKKVLGLDLGVGSIGWCLITLDKDEKPQSILGMGSRIVPLSADDATEFTQGKAITKNKMRTVARTIRKGMDRYQLRREALKKVLREHGMLPDEALIKLPLLELWELRARAATPGEQLSLTELGRVLLHINQKRGYKHAKADEAAEAETKTGKETGYVAQVKGRYQILKEKGQTIGQHFAGELRSNQQTAPRGTYYTYRIKEQVYPREAYIEEYDRIMAAQRVFYPELLTDALIGRIRDRIIFYQRPLKSCKQLVSFCEFEKKEKVIRVKHTNKEGVQELVEKTITIGPKVAPKSSPIFQVCKVWESIHNIRLYYLDGTERKLEQEEKQKLFDYLQRNDKLSLTVLRKELKIKPKDKLWCDKLLVNGIGGNTTATILRKALKGYEQYEGLLRFNLTTRDSHEVDEDGVIRPIIDESYQNEPLYKLWHILYSIEDREEMRSALIGQLGIKAEDLDSGLMDALYKIDFVKQGYGNKSAKFICKLLPHLQEGKMYSEAAEAAGIRHSDSMTAQERDERSLLKEIPLLQKNALRQPVVEKILNQMINLVNALKREHGEIDEVRVELARELKMSREEREKTTKNNNAREKENKDAAERIKEYRVTPTKSRIQKYHLWDESGGKCIYCDNPMGVEQFLKGEEIEVEHIIPRSILFDDSMSNKVCACRSCNQEKGNRFAMVYIKSLGTEQEQKYISRVEGLFHAKKISYSKRLRLLMLPENLPEDFIERHLRLTQYISREAQGILRKGIRLVSASEGGVTAKLRQLWGYDNILRDLNLDRYRSMGETEVVTVEHRDGQRTDERIKDWSKRKDHRHHAIDALVVACTRQSYIQRLNRVNAEADRQEMDAFIKEQQEQKLSKKEKLSLLEHWLIRQPHFTTKEVMKHVEEILISFRPGKRTVTRGRNIYKRSGKADVQRDVLIPRGALSEETIYGVIHAQGKDEVVCKYALQGLKAKDVDYIVDKALQEKVRGRISQYGEKQAFAEPLYLDEARTQEVRSVRCFTGKDQSKLVPLRYNVEGEAVGFVAPGNNHHLALYRDDDGNVVESIVTFWQAVERARYGLPIVVASPREVMEKALAIPGLPESVLKALPASNLRLMEVLRMNDMFLIGMTDEEIQVAIEAKDYSTLSRHLYRVQKLATHDYVFRYHLETTLDGKDNVGGIPSSYRIASQKRYQVLNPRKVKVDLLGRILLV

SEQ ID NO: 3442 - protein, 1192 aa, unidentified
  REGION 1..1192: note = Description of Unknown: Cas Enzyme sequence
MARKVLGLDLGVGSIGWCLITLDNDEKPQSILGMGSRIVPLSTDDATEFTQGKAITKNKMRTVARTIRKSMDRYQLRREALKKVLREHGMLPDESLIKLPLLELWELRARAATPRKQLSLPELGRVLLHINQKRGYKHAKADEAAEAEAEGKSKSKKEKEGYVAQVKGRYQALKEKGQTIGQHFAEELRANRQTASRGVYYTYRIKEQVYPREAYIEEYDRIMAVQQEFYPEILTDELIQRIRDRIIFYQRPLKSCKQLVSTCEFEKKERVVQVKRINKEGVEELVERTITIGPKVAPKSSPIFQVCKVWESIQNIRLYYPDGTERKLEQEEKQKLFDYLQKNDKLSLTALRKELKIKPKDKLWCDKLLDKGIAGNTTVAILRKALKGYEQYEGLLRFDLTIRDGHKADEDGVIRPIVDESYQNEPLYKLWHILYSIENRADMYRALVGQLEIKEEDLDDGLMDALYKIDFVKQGYGNKSAKFICKLLPHLQEGKMYSEAAEAAGVRHSDSMTAQERDERSLLETIPLLEKNALRQPVVEKILNQMINLVNALKREYGEIDEVRVELARELKMSREEREETTRSNNAREKKNKDIAEDIKEYKEYNITPTKSRIQKYRLWQESAESCIYCGKHVDLVQFLRGEEIEVEHIIPRSILFDDSMSNKVCACRSCNQEKGNRFAMEYIQSKGWEQDYIERVDSLFHAKEISYSKRQRLLMLPKDLPEDFIERHLRLSQYISREAQGILRKGIRLVSASEGGVTAKLRQLWGYDNILRDLNLERYRSMGETEVVTVEHRDGERTDERIKDWSKRKDHRHHAIDALVVACTRQSYIQRLNRVNAEPDREEMDAFIKEQQQKPTHSKGEKLSLLEHWLIRQPHFTTGEVMKHAEGILVSLRPGKRTISRGRNIYKRSGKTDVQRGVLIPRGALSEETTYGVIRVDGVDKVVCKYPLQSLKLKDVEYIVDEVLREKVRERIDQRGEKEAFAEPLYFDEAQTQEVRSVRCFTGKDQAKLIPLRYNDESEAVGFVAPGSNHHLALYQDERGNLVESVVTFWQTISRIRYGLPAIVTHPREVIEQALSIPELPGEVLGALPESGLRLMEVLRINDMFLIGMKDEEIKAAIEGEDYPTLSRHLYRVQKLTTHDYMFRYHLETTLDGKDNVGEIPKSYRVRSLKIYRELNPRKVKIDLLGRISLA

SEQ ID NO: 3443 - protein, 1210 aa, unidentified
  REGION 1..1210: note = Description of Unknown: Cas Enzyme sequence
MGKKVLGLDLGVGSIGWCLITLDKDEKPQSILGMGSRIVPLSADDATEFTQGKAITKNKMRTVARTIRKGMDRYQLRREALKKVLREHGMLPDEALIKLPLLELWELRARAATPGEQLSLTELGRVLLHINQKRGYKHAKADEAAEAETNKGKETGYVAQVKGRYQILKEKGQTIGQHFAGELRANQQTAPRGVYYTYRIKEQVYPREAYIEEYDRIMAAQRVFYPELLTDALIGRIRDRIIFYQRPLKSCKQLVSFCEFEKKEKVIRVKHTNKEGVEELVEKTITIGPKVAPKSSPIFQVCKVWESIQNIRLYYPDGTERVLEQEEKQKLFDYLQENDKLSLTVLRKELKIKPKDKLWCDKLLVNGIAGNTTAAILRKVLKGYEQYEGLLRFNLTTRDSHEVDEDGVIRPIIDESYQNEPLYKLWHILYSIEDREEMRSALIGQLGIKAEDLDSGLMDALYKIDFVKQGYGNKSAKFICKLLPHLQEGKMYSEAAEAAGIRHSDSMTAQERDERSLLEEIPLLQKNALRQPVVEKILNQMINLVNALKREHGEIDEVRVELARELKMSREEREKTTKNNSSREKENKAIAEKIKEYSITPTKSRIQKYRLWQESAESCIYCGRRVDVVQFLRGEETEVEHIIPRSILFDDSMSNKVCACRSCNQEKGNRFAMEYIQSKGWEQDYIERVDSLFHDKKISYSKRQRLLMLPKDLPEDFIERHLRLSQYIAREAQGILRKGIRLVSASEGGVTAKLRQLWGYDNILRDLNLERYRSMGETEVVTVEHRDGQRTDERIKDWSKRKDHRHHAVDALIVACTRQSYIQRLNRVNAEADRQEMDTFIKEQQQEQKPSKKEKLSLLEHWLIRQPHFTTKEVMKHVEEILISFRPGKRTVTRGRNVYKRSGKTDVQRDVLIPRGALSEETIYGVISVDGEDKVVCKYPLQKFLDTKETNVDKIADQAAEKIVDKVLREKIRERIKRYGKKEAFAEALYLDEAQTQVVRSVRCFISKDQAKLIPLRYNDESEAVGFVAPGNNHHLALYRDTSGKMRASVVSFFAAVERARYGIPMIVLNPRETREKARIIPDLPESVFSKLPEEDWVLEETLQEGEMVLLGMENDAIEEAIEKKDYAKLSRYLYRVQSLSYNDYKFCFHLETEPEKKEKKEGEDKKRGEKAKNTAVITPKRYRIRCLATYQDLNPRKVKIDLLGRISLA

SEQ ID NO: 3444 - protein, 1203 aa, unidentified
  REGION 1..1203: note = Description of Unknown: Cas Enzyme sequence
MTKKVLGLDLGVGSIGWCLITLDKDEKPQSILGMGSRIVPLSTDDATEFTQGKAITKNKMRTVARTIRKGMDRYQLRREALKKVLSEHGMLPDESLIKLPLLELWELRARAATPGKQLSLTELGRVLLHINQKRGYKHAKADEAAEAEAEGKSKKEKEGYVAQVKGRYQALREKGQTIGQHFAEELRANKQTASRGVYYTYRIKEQVYPREAYIEEYDRIMAVQRVFYPKVLTDELIQRIRDRIIFYQRPLKSCKQLVSTCEFEKKERVVQVKRINKDGVEELVERTITIGPKVAPKSSPIFQVCKVWESIQNIRLYYPDGTERKLEQEEKQKLFDYLQKNDKLSLTALRKVLKIKPKEKLWCDKLLDKGIAGNTTTAILRKAFKGYEHYEHDKDHNPFQFDLVRRDSHEVDEDGVIRPIVDESYQNEPLYKLWHILYSIEDKDDMRRALVGQLGIKEEDLNNGLMDALYKIDFVKQGYGNKSAKFICKLLPHLQEGKMYSEAAEAAGVRHSDSMTAQERDERSLLEEIPLLQKNALRQPVVEKILNQMINLVNALKREHGEIDEVRVELARELKMSREEREEATKSNNAREKENKAIAERIKEYDITPTKSRIQKYRLWQESAESCIYCGKRVCVVQFLRGEEIEVEHIIPKSILFDDSMSNKACACRSCNQEKGNRFAMEYIQSKGWEQDYIKRVDSLFHDKKISYSKRQRLLMQPKDLPEDFIERHLRLSQYISREAQGILRKGIRLVSASEGSVTAKLRQLWGYDNILRDLNLERYRSMGETEKVKVEHRDGERTDERIKDWSKRKDHRHHAIDALVVACTRQSYIQRLNRVNAEADREEMDAFIKEQQQQKPTHSKGEKLSLLENWLIKQRPFATEDPTKDPTEEVKKHVKKILISFRPGKRTISRGRNIYKRSGKTDVQRERVLIPRGALSEETIYGVIRVNGEDEVVCKYPLQSLKAKDVVSIVDEVLREKVRERITQHGEKEAFAKPLYLDEAQTQEVRSVRCFTGKDQAKLIPLRYNDESEAVGFVAPGSNHHLALYQDERGTLVESVVTFWQAISRIRYRLPAIVTHPREVIEQALSIPELPEEVLGALPKSRLRLMEVLRINDMFLIGMKDGEIQAAIEGEDYPTLSRHLYRVQKLSSMSYVFRYHLETEVKDEKNTSGEIPKFYRIKSLGRYQELNPRKVKIDLLGRISLA

SEQ ID NO: 3445 - protein, 1190 aa, unidentified
  REGION 1..1190: note = Description of Unknown: Cas Enzyme sequence
MARKVLGLDLGVGSIGWCLITLDNDEKPQSILGMGSRIVPLSTDDATEFTQGKAITKNKMRTVARTIRKGMDRYQLRREALKKVLREHGMLPDESLIKLPLLELWELRARAATPGEQLSLAELGRVLLHINQKRGYKHAKADEAAEAEAEGKSKKEKEGYVAQVKGRYQALKEKGQTIGQHFAEELRANQQTAPRGGVYYTYRIKEQVYPREAYLEEYNRIMAVQREFYPEPLTDELIRRIRDRIIFYQRPLKSCKQLVSTCEFEKKERVVQVKRINKDGVEELVERTITIGPKVAPKSSPIFQVCKVWESIQNIRLYYPDGTERVLEQEEKQKPFDYLQKNDKLNLTTLRKVLKIKPKEKLWCDKLLEKGIAGNTTLAILRKALKGYEQYEGLLRFDLTIRDGHKADEDGVIRPIVDESYQNEPLYKLWHILYSIEDRADMYRALVGQLKIKEEDLDDGLMDALYKIDFVKQGYGNKSAKFICKLLPHLQEGKMYSEAAEAAGVRHSDSMTAQERDERSLLETIPLLEKNALRQPVVEKILNQMINLVNALKREYGEIDEVRVELARELKMSREEREETTKSNNAREKENKTKAEYIKGEYSLTPTKSRIQKYRLWEESGGCCIYCGKHFGVEQFLRGEEIEVEHIIPRSILLDDSMSNKVCAHRSCNQEKGNRFAMEYIQSKGWEQSYIERVNSLFHDKKISYSKRQRLLMLPKDLPEDFIERHLRLSQYISREAQGILRKGIRLVSASEGSVTAKLRQLWGYDNILRDLNLERYRSMGETEVVTVEHRDGERTDERIKDWSKRKDHRHHAIDALVVACTRQSYIQRLNRVNAEADREEMDAFIREQQQKPTHSRGEKLSLLEHWLIRQPHFTTGEVKGQVDKILVSLRPGKRTISRGRNIYKRSGKTDVQRGVLIPRGALSEETIYGVIRVDGEDKVVCKYPLQSLKLKDVEYIVDEVLREKVRERIEQRGEKEAFAEPLYFDEAQTQEVRSVRCFTGKDQAKLIPLRYNDESEAVGFVAPGSNHHLALYRNEEGNLVESVVTFWQAISRIRYGLPAIVTHPSEVIEQALSIPELPEEVLGALPESGLRLMEVLRINDMFLLGMTDEAIDRAIEGEDYPTLSRHLYRVQKLSSMYYVFRYHLETEVKDEKNTSGEIPKFYRIKSLGRYQELNPRKVKIDLLGRISLT

SEQ ID NO: 3446 - protein, 1191 aa, unidentified
  REGION 1..1191: note = Description of Unknown: Cas Enzyme sequence
MARKVLGLDLGVGSIGWCLITLDKDEKPQSILGMGSRIVPLSTGDAKEFTKGEAISKNKMRTVARTIRKGMDRYQLRREALKKVLREHGMLPDESLIKLPLLELWELRARATTPGDQLSLTELGRVLLHINQKRGYKHAKADEAAEAEGKSKSKKEKEGYVAQVKGRYQALKEKGQTIGQHFAEELRANQQTASRGVYYTYRIKEQVYPREAYIEEYDSIMKVQGTFYPELLTDALIGRIRDRIIFYQRPLKSCKQLVSTCEFEKKERVVQVKRINKDGVEELVERTITIGPKVAPKSSPIFQVCKVWESIQNIRLYYPDGTERKLEQEEKQKLFDYLQKNDKLSLTALRKVLKIKPKEKLWCDKLLEKGIAGNTTTAILRKALKGYEQYEGLLRFDLTIRDGHKADEDGVIRPIVDESYQNEPLYKLWHILYSIEDRADMYRALVGQLEIKEEDLDDGLMDALYKIDFVKQGYGNKSAKFICKLLPHLQEGKMYSEAAEAAGVRHSDSMTAQERDERSLLETIPLLEKNALRQPVVEKILNQMINLVNALKREYGEIDEVRVELARELKMSREEREETTRSNNAREKKNKDIAEDIKEYKEYNITPTKSRIQKYRLWQESAKSCIYCGKHVDLVQFLRGEEIEVEHIIPRSILFDDSMSNKVCACRSCNQEKGNRFAMEYIQSKGWEQDYIERVDSLFHAKEISYSKRQRLLMLPKDLPEDFIERHLRLSQYISREAQGILRKGIRLVSASEGGVTAKLRQLWGYDNILRDLNLERYRSMGETEVVTVEHRDGERTDERIKDWSKRKDHRHHAIDALVVACTRQSYIQRLNRVNAEADREEMDAFIKEQQQKPTHSKGEKLSLLENWLIRQPHFSTGEVMKQAEGILVSLRPGKRTISRGRNIYKRSGKTDVQRGVLIPRGALSEETIYGVIRVNGEDKVVCKYPLQSLKLKDVEYIVDEVLREKVRERIEQRGEKEAFAEPLYFDEAQTQEVRSIRCFTGKDQAKLIPLRYNDESEAVGFVAPGSNHHLALYRDVDGRLVESVVTFWQAISRIRYGLPAIVTHPREVIEQALSIPELPGEVLGALPKSRWRLMEVLRINDMFLIGMKDGEIQAAIEGEDYPTLSRHLYRVQKLSSMYYVFRYHLETEVKDEKNTSGEIPKFYRITSFSAYQRLNPRRVKIDLLGRISLA

SEQ ID NO: 3447 - protein, 1199 aa, unidentified
  REGION 1..1199: note = Description of Unknown: Cas Enzyme sequence
MARKVLGLDLGVGSIGWCLITLDKDEKPQSILGMGSRIVPLSTDDATEFTQGKAITKNKMRTVARTIRKGMDRYQLRREALKKVLREHGMLPDESLIKLPLLDLWELRARAATRGEQLSLTELGRVLLHINQKRGYKHAKADEAAEAEAEGKSKKEKEGYVAQVKGRYQALKEKGQTIGQHFAEELRANQQTAPRGGVYYTYRIKEQVYPREAYLEEYDRIMAVQREFYPEILTDELIRRIRDRIIFYQRPLKSCKQLVSTCEFEKKERVVQVKRINKDGVEELVERTITIGPKVAPKSSPIFQVCKVWESIQNIRLFYPDGTERVLEQEEKQKLFDYLQKNDKLSLTALRKVLKIKPKEKLWCDKLLEKGIAGNTTAAILRKALKGYEQYEGLLRFDLTIRDGHKADEDGVIRPIVDESYQNEPLYKLWHILYSIEDRADMYRALVGQLGIKREDLDNGLMDALYKIDFVKQGYGNKSAKFICKLLPHLQEGKMYSEAAEAAGVRHSDSMTAQERDERSLLEEIPLLQKNALRQPVVEKILNQMINLVNALKREHGEIDEVRVELARELKMSREEREEATKSNNAREKENKDIAEDIHLKGEGLTPTKSRIQKYRLWKESAESCIYCGKHVDLVQFLRGEEIEVEHIIPRSILFDDSMSNKVCACRTCNQEKGNRFAMEYIQSKGWEQSYIERVDSLFQGRKISYSKRQRLLMLPKDLPEDFIERHLRLSQYISREAQGILRKGIRLVSASEGSVTAKLRQLWGYDNILRDLNLDRYRSMGETEVVTVEHRDGERTDERIKDWSKRKDHRHHAIDALVVACTRQSYIQRLNRVNAEADREEMDAFIREQQQKPTHSRGEKLSLLEHWLIRQPHFTTGEVKGQVDKILVSLRPGKRTISRGRNIYKRSGKTDVQRGVLIPRGALSEETIYGVIRVDGEDKVVCKYPLQSLKLKDVEYIVDEVLREKVRERIEQRGEKEAFAEPLYFDEAQTQEVRSVRCFTGKDQAKLIPLRYNDESEAVGFVAPGSNHHLALYRDVDGRLVESVVTFWQAISRIRYGLPAIVTHPREVMEQAFSIPDLPEEVLGALPKSRLRLMEVLRMNDMFLIGMKDEEIEAAIEGEDYPTLSRHLYRVQKLSSMSYVFRYHLETEVKDEKKAGGKDEKEEEVKIPKFYRVQSMKAYVKLNPRKVKIDLLGRISLA

SEQ ID NO: 3448 - protein, 1197 aa, unidentified
  REGION 1..1197: note = Description of Unknown: Cas Enzyme sequence
MTRKVLGLDLGVGSIGWCLITLDKDEKPQSILGMGSRIVPLSTDDATEFTQGKAITKNKMRTVARTIRKGMDRYQLRREALKEELRKHKMLPDEALIKFPLLELWELRARAATPSEQLSLAELGRVLLHINQRRGYKHAKADEAAEAETKKGKETGYVAQVKGRYQALKEKGQTIGQHFAEELRANQQTAPRGGVYYTYRIKEQVYPREAYIEEYDRIMAVQRVFYPEHLTDALIRRIRDRIIFYQRPLKSCKQLVSTCEFEKKERVVQVKRINKDGVEELVERTITIGPKVAPKSSPIFQVCKVWESIHNIRLYYPDGTERKLEQEEKQKLFDYLQKNDKLSLTALRKELKIKPKDKLWCDKLLEKGIAGNTTAAILRKAFKGYEQYEDLLRFDLVRRDSHEADEDGVIRPIIIIDESYQNEPLYKLWHILYSIEERADMYRALVGQLGIKREDLDDGLMDALYKIDFVKQGYGNKSAKFICKLLPHLQEGEMYSEAAEAAGVRHSDSMTAQERDERSLLEEIPLLQKNALRQPVVEKILNQMINLVNALKREHGEIDEVRVELARELKMSREEREQVLSNNHKRKAKNETIAKRIAAEGITPTKARIQKYRLWEESAESCIYCGKHVDLVQFLRGEEIEVEHIIPRSILFDDSMSNKVCACRSCNQEKGNRFAMEYIQSKGWEQDYIKRVDSLSHAKKDKKISYSKRQRLLMLPKDLPEDFIERHLRLSQYISREAQGILRKGIRLVSVSEGGVTAKLRHLWGYDNILQKLNLERYRSMGETEIVTVEHRDGERTDERIKDWSKRKDHRHHAIDALVVACTRQSYIQRLNSVNAEADREEMDAFIKEQQQEHKLSKKEKLSLLEHWLIRQPHFTTGEVTRHVEGILVSLRPGKRTISRGRNIYKCSGKTDVQRGVLIPRGALSEETIYGTIRHYRKDRSGTELVRSYVKRIPLSKVNRSNVKNIVDSQIRKVVQAALLSLSNQDQVLPTELYIDDTQKRVVKSVRCLVRSNTLIPIRFNADGEAIGFTKPGGNHHVALYRDGVGKIRESVVPFFRAVERARYGIPMIISDPSKAREQARANPNLPESVLLSLPEEDWQLEEFLQGDEMFLLGMTDEAIDRAMETKDYTTLGRHLYRVQSLAAGDYMFRYHLETTLDGKDNVGSIPKSYRIQGLKTYRKLNPRKVKIDLLGRISLA

SEQ ID NO: 3449 - protein, 1527 aa, unidentified
  REGION 1..1527: note = Description of Unknown: Cas Enzyme sequence
MRKILGLDLGTNSIGWAVVSTNEENKPQKIEAAGSRIIPISQDILGNFDKGNSISQTAERTRFRGTRRLRERHLLRRERLHRVLHIMNFLPKHYEQYIDFEKRFGQFVSDIEPKLAWKNSESGGYEFLFQKSFNEMLADFEKTQPELLENNKKVPYDWTIYYLRTKALREKIEKEELAWIFLNFNQKRGYYQLRGEEEDENPNKQIEYHALKVTDVAEDAPQKGKTDIWYSITLENGWVYRRSSKTPLYDWINKVKKFIVTTDLNDDGSIKKDKEGNEKRSFRAPAEDDWGLLKKKTEADIEQSKKTVGTYIYEAILQNPSQKVRGKLVRTIERKFYKEELFRIIEKQKEFHVELNDKALFTQCIEELYTYNESHRSTLQHNDFTKLFLNDIIFYQRPLKSKKSLISNCQYEYRIFKNEVGIYEKSPIKCIAKSHPAYQEFRLWQFLHNLRIYEREKVVNEKLHTDVDVTDELLPDENSRIELFDWLNDRKDITQDILLNKFFKKKKIKNTTSYPYRWNYVEDKEYPCNETRGLMIIRLQKADIQIDFLNKDTELALWHLLYSVEDKNEIQKALGSFAKKHSLPDSFIEVFSKFPPFKKDYGAYSLKAINKLLPLMRIGKYWDENSIDEVTISRINSINERLESILKDNLKIEDVSDDDIPKQVLRSFVKTNNKVSGLNTYQACYAVYGRHSEANGIPKWNTPQDIDNYLKEFKQHSLRNPIVEQVITETLRVVRDIWKSYGDFSEIHLELGREMKNPADKRKRMTAKVTENENTNLRIKALLMELKNQDVDNVRPYSPNQQELLKIYEDGVLNSNIEIEDDIVKISKSSNPTKSELIRYKLWLEQKYRSPYTGEIISLSRLFTHEYQIEHIIPQSRYFDDSFNNKVICEAVVNANPYKDNQLGYEFIKNNEGRIVSELSTNGRQIKIFNLAEYERFVKDNYGKNKTKMRNLLLEDIPDSFIERQLNDSRYISKEIKSILSNIVREDNEQEATSKHVIPCTGGVTSTLKQEWGLNDIWNKIITPRFIRMNQLTNSEAFGRWVNKEGKNVFQIDMPLKELQKGFNKKRIDHRHHAMDAIIIACATRSHINYLNNESAKSTSKETRFDLKHKLCYKNKIDDKGNYKWQFHKPWNTFTQDTQAIIENIIISFKQNLRVINKSVNYHLSYKNEDGILQLDKNNKPKKVLRKQIAGDNWAIRKPLHKDTVAGQVNLRLKKQVNLLQAIDQWETIVDKSLKTKIKQLINEGLDKKKIQKYFVSNENKWLGKDVTKPEVYYFSNEKEVLVASRTTLDTSFNSKKIESITDTGIQQILLRQLRKYDEEQDGKIIEHPELAFTPEAIEEMNKNISILNNGKPHQPILKVRTYEPKGNKFNVGYTGNKKHKYVEAAKGTNLFFAIYADENGKRNYETIPLNIVVERLKQGLKEVPELNEKGEKLLFSLSPNDLVYVPTEEEISSGNISNDYRADRIYKIVSFTGNRLYAIPYNIAKVIVDKVEFTQLNKIENETCSNVSIKQICQKIKINRLGNIIY

SEQ ID NO: 3450 - protein, 991 aa, unidentified
  REGION 1..991: note = Description of Unknown: Cas Enzyme sequence
KISGVDAELFLTKEIEQKLWHIIYSVKDPNVFEKALKTFARKYNLPVEEFKDAFIKHPPYKNDYGAYSEKAIKKMLPLMRMGRYWDEREIPNEVLDRINKIITGEFDENIADRVREKAIHLREVYDFKGLPVWLVGYIVYNRHSEIGDIQQWKSPHDIDKFLTTFKQHSLRNPIVEQVVLETLRTVRDIWNYYGKGRENFFDEIHIEMGRELKNPAGVRQEISKRNTINQNTNERIRLLLYEMMDFGAKPNSPSHQEILKIYEEGVYQNNINIDDEIEKIRKNNAPKSSDIRRYKLWLEQGYVSPYTGKVIPLSRLFTHEYQIEHIIPQSRYFNNSMSNKVICESSVNQDKSNRTAYEYMKAKGGSIVDGHRLLSFDQYVMHCNKYFKNNRIKLSNLLAEEIPEGFINRQLNDSRYISKLVKSLLGNIVREEEEQEATPKKIIVLTGAITWKLKQDWGLNDKWNELILPRFQRMNELTQTTDFTAINNNGVVIPTVPDELKKGFSKKRIDHRHHALDALVVACCTRKHIQYLNSLNNQKEKYDLQPSLLIKNEKGHYTKYFKMPWSHFPVDAKNALETCIVTFKQNLRVINRTNNKYWKYVDGKKQLVAQEGKNFAIRKSLHKETVSGKLNEIAGRGKIFTAVRKSLSEIKSIKNLEQITDSGIRTILRNHLQSYRKDNGKPDFERAFSAEGMEDLNKNIIGLNNGKKHQPIYKVRIKEEGSKFALSENEQSPKSKKYVEAAKGTNLFFNIYKDRNGQRMFETIPLYDVVEHQKQLAYEGVKGIDRSLVPVKNTLIKGRKEVEVEFLFTLSPNDLVYVPTDEEIKSPDLVDFDHLSKEQVGRIYKMVSTTQGKCHFVPLYYSSPIQKNEMGTNNKSQNTIDNQYQIKARCWKLKVSRIGQIIQVEGVPPSEGDGASIASEPTTGYVERKKRIRFGDKSDDFDGDRKYYVRHSPSERWQHTVELIKRAYGSIAKEIAPFPRRIFFNLQPYRK

SEQ ID NO: 3451 - protein, 1197 aa, unidentified
  REGION 1..1197: note = Description of Unknown: Cas Enzyme sequence
LISTQPMLMSKHVLGLDLGVGSIGWCLIALDAQGDPAEILGMGSRVVPLTNLGDDKAFSKGEAFTANQKRTARRTMRRGFARYQLRRYRLRRELEKVGMLPDAALIQLPLLELWELRERAATAGERLTLPELGRVLCHINQKRGYRHVKSDAAAIVGDEGEKKKDSNSAYLAGIRANDEKLQDEHKTVGQYFAEQLRQNQSESPTGGISYRIKDQIFSRQRYIDEYDQIMAAQRVHYPDILTDEFIRMLRDEVIFMQRPLKSCKHLVSLCEFEMLEKVMRVQQDDGKGGRQLVERRVKFGPKVAPKSSPLFQLCRIYEAVNNIRLTRPDGSPRDITPEERDKIVTHLQSSASLSFAALKKLLKEKALIADQLTTKSGLKGNSTRVALATALQPYSQYHHLLDMELETRMMTVQLTDEETGEVTEREVAVVTDSYVRQPLYRLWHILYSIEERDAMRRALITQLGMKEEDLDSGLLDQLYRLDFVKPGYGNKSAKFICKLLPQLQQGLGYSEACAAVGYRHSNSPTSEEITERTLLEKIPLLQRNELRQPLVEKILNQMINLVNALKAEYGVDEVRVELARELKMSREERERMTRQNDKRKEANDEVAAKIRECGLYPTKPRIQKYMLWEEAGRQCLYCGQSIEEEQCLREGGMEVEHIIPKSVLYDDSYGNKTCACRRCNKEKGNRTALEYIRAKGREAEYMKRINDLLKEKKISYSKHQRLRWLKEDIPSDFLERQLRLTQYISRQAMAILQQGIRRVSASEGGVTARLRSLWGYGKILHTLNLDRYDSMGETERVSREGETTEELRITNWSKRMDHRHHAIDALVVASTRQGYIQRLNRVSSESEREAMSGEIEMQKATKTDKLSLLERWLTQRPHFSVRTVSDKVAEILISYRPGQRVVTRGRNIYRKKTADGREVTCVQRGVLVPRGELMEASLYGKILSQGRERIVKRYPLHDLKGEVVDPRLRELITTYNQELKSREKGAPIPPLCLDKDKKQEVRSVRCYAKTLSLDKAIPMCFDENGEPTAFVKSASNHHLALYRTPKGKLVESIVTFWDAVDRARYGIPLVITHPREVMEQVLQRGDIPESVLRSLPPSDWVFVESLQLNEMVIIGLSDEELQRALEVQDYRKLSEHLYRVQKLSAGKYFIRYHLDTDVDEDNRSGRIPKFYQLSLDAYKKNNVRKVRVDLLGRISLL

SEQ ID NO: 3452 - protein, 1193 aa, unidentified
  REGION 1..1193: note = Description of Unknown: Cas Enzyme sequence
MLMSKHVLGLDLGVGSIGWCLIALDAQGDPAEILGMGSRVVPLTNLGDDKAFSKGKAFTANQKRTARRTMRRGFARYQLRRYRLRRELEKVGMLPDAALIQLPLLELWELRERAATAGRRLTLPELGRVLCHINQKRGYRHVKSDAAAIVGDEGEKKDSNSAYLAGIRANDEKLQDEHKTVGQYFAEQLRRSQSESPTGGISYRIKDQIFSRQRYIDEYDQIMAAQRVHYPDILTDEFIRMLRDEVIFMQRPLKSCKHLVSLCEFEKQEKVMRVQQDDGKGGRQLVERKVKFGPKVAPKSSPLFQLCRIYEAVNNIRLTRPDGSPRDITPEERAKIVAHLQSSASLSFAALKKLLKEKALIADQLTTKSGLKGNSTRVALAAALQPYPQYHHLLDMELETRMMSVQLTDEETGEVTEREVAVVTDSYVRQPLYRLWHILYSIEERDAMRRALITQLGMTEEDLDGGLLDQLYRLDFVKPGYGNKSAKFICKLLPQLQQGLGYSEACAAVGYRHSNSPTSEEIAERTLLEKIPLLQRNELRQPLVEKILNQMINLVNALKAEYGVDEVRVELARELKMSREERERMTRQNGERKKANDKVAERIRQCGLYPTKPHIQKYMLWEEAGRQCLYCGRSIEEEQCLNGDDMEVEHIIPKSVLYDDSYGNKTCACHECNQTKGNRTALEYIRAKGREAEYMKRINDLLKEKKISYSKHQRLRWLKEDIPSDFLERQLRLTQYISRQAMAILQQGIRRVSASEGGVTARLRSLWGYGKILHTLNLDRYDSTGETERVSREGEATEELRITNWSKRMDHRHHAIDALVVACTRQSYIQRLNRLSSEFGREDKKKEDQEAQEQQATETGRLSNLERWLTQRPHFSVRTVSDKVAEILISYRPGKRVVTRGRNIYRKKMADGREVTCVQRGVLVPRGELMEASLYGKILSQGRERIVKRYPLHDLKGEIVDPRLRELITTYNQELKSREKGAPIPPLCLDKDKKQEVRSVRCYAKTLSLDKAIPMCFDEKGEPTAFVKSASNHHLGLYRTPKGRLVESIVTFWDAVDRARYGIPLVITHPREVMEQVLQRGDIPESVLRSLPPSDWVFVESLQLNEMVIIGLSDEELQRALEVQDYRKLSEHLYRVQKLSAGKYFIRYHLDTDVDEDNRSGRIPKFYQLSLDAYKKNNVRKVRVDLLGRISLL

SEQ ID NO: 3453 - protein, 1561 aa, unidentified
  REGION 1..1561: note = Description of Unknown: Cas Enzyme sequence
MTKTTLGLDLGTNSIGWALVKSNAEDKSDFGATNGKILGMGSRIIPMSQDILNNFSAGVSHSQTANRTAYRGIRRLRERHLLRRERLHRVLNILGFLPTNYVKKIDFDKRLGKFLPNTEPKLTLDEEGKFVFMKSFLEMINDFPEGTKVPLEWTIYYLRKKALTDKISKQELAWILLNFNQKRGYYQQRGDIEEEVKDKLVEFHTLKITDVIDTGENRKNETWYNCKLENGWVYKRASKVPLNDWIGKTRDFIVTTSLDADGNPKVDDEGEVKRTFRSPKEDDWTLVKKKTEKMLEDSNKTVGAFIYDTLLEKKKGENIKQKIRGKLITTIERDFYKDELLQILNKQKEHHAELRDEDLYKKCVNELYKSNEAHRNMIANKDLTYLFVEDILFYHRPLKSKKHLIGTCRFEKRSFINAEGKKEEKGIRGVPKSHPLFQEFRIWNWINNLRIIQKQKEIDGKLKVDEDVTQLHLKNSKDKTHLFDFLNTKKQINEKQLLGHFGLEQKTHKWNYVRDDKVVKYYPCNETRYDLLKYFDKAGIEIILEEEEDAKSDNKPSLTYKQFETPLWHLLYSVDDLKQLKKGLTKFANNNNLPDAFVNAFIKFPKLDKDYGAYSLKAIKKLLPLIRVGKYWSEEDVVHKFGVYYGNIKTVIKDKLKQQQKAKEENKHFNSDFLAKLQLLDDAPSAYQGLELHTACYATYGYFAEADNTTKCNNPKAISDFLKNEFKQHSLRNPIVEQVISETLRLVADVWQQYGNGEKDFFDAIHIELGRDMKNPKDVREQITASNLKNQNTNQRIRYLLAEFAKDPKIKGVVPYSPHQQEKLKIFEDNIVSNFEMPDDVKKIASAEQPTQKQIERYKLWLEQKYVSPYTREPIKLSDLFDRGKYEIEHIIPQATYFDNSFNNKVICEAEVNKLKDKELAYNFIENNEGTEVQVNGGMETVKILSIEKYEKLVEQNFSGNDKKKKNLLRTEIPTKMIERQLNDTRYISKKIMGLLSNIVREPGELDHKAKRILNVNGAVTARLRNDWGLNNIWNELVTPRFKRMNKITNSNNYGSINEKIKKFLPDVPIEEKKDFKKKRIDHRHHPLDAVLIAFTTLNHTNLLNNETHLRAGKTKKERKKIRYDLKDKLMHSKPFEKKDEETGEVEKNKFYTTFKKPWENFEQDVLTHLKKTVASFKQNTRVINKTTNYYKRFIKNENGQLKKKSVKQTKGDSWAIRKPLHKETVYGKVRVKVDNNKVVTLNKALEQPDLIVDKQIRKHVLESIKTLNITDVKLVKKHFKTNPIIIEGKKIERVKVWQWLEGTASRNLLDTSFNEKKISSITNSGIQKILLKHLNKPNYQNQTDEEGKDIAPEKLAFTPEGITDMNVNIAALNNGKFHQPIYKVRTWEEGSRFAVGYKNSKSTKYVEAAKGTNLFYAVYKKADKRNYTTIPLNEVIEHQKQMAEEKIKDALPIPIHSNNGQFLFYLTVNDLVYVPLENENINEIDFSNLNEHQINRIYKAVSFNKKQAFFIQANVAYPIKNKFEFSSLNKMERSINGDMIKAVCIKLNIDRLGNISLAKY

SEQ ID NO: 3454 - protein, 1062 aa, unidentified
  REGION 1..1062: note = Description of Unknown: Cas Enzyme sequence
MKKILGLDLGTASIGWALVSEAENEKERSKIEKLGVRIIHYGDNLKVVDRKSNKLTEPRDPVSDFAGGKGLSSNAGRTQKRGARRNLKRYQIRRAELIRILKENNFLQDNSLLSENGSGTTFHTLAIRAKATKQQITKEEFAKVLLMLNKKRGYKSSRKAKQDDDGTSVNGMEVAIHLYENELTPGQYTYTLLKSNEKDIPDYYRSDLQSEFDRIWIFQSKFYPNLLTEELYKDVFGKSKGQTWSILSKALKLESIKQSGKPAEIKLERYLWRNLAVEKEMELEKLSVVFQEINSQINSSSGYLGAISDRSKELYFKKITVGEYLFNQIKQNPHTRLKNQVFYRQDYLDEFNIIWEKQKEFYPELTEQLKSLIRDVVIFYQRRLRSQKHLISECRFENHHKVIPKSSPLFQEFKIWSILNNLELRNIETGERFSLELENKELLFNELNIKPKLSSEDILKLLVNNYKQYELNYKELEGNRTNAALYDAYFKMFFSEDELSYMQKKSASDINEIISSRFLELGIETGILFLDYTLEKDDFDKQPLLQLWHLLYSFDGDNSRTGDEKLIQKLTSKFGFSIENAQIMAKINFINDYGSLSSKAIRKVMPYLSQGQRYDEACYLAKYNHSYSLTKEELSNRTLQGRLELLSKNSLRNPMVEKILNQMVHVVNGIIDDKTLGRPDEIRLELARELKYSADERRKMTEGIAKATKEHEEYRKVLENEFGISKVTRNDLIRYKLWLELEPNGYKTLYTNTYIPKEKLFSKEFDIEHIIPKARLFDDSFSNKTLAKREINLAKKDETAYDFLSNYLNKEEFEQYLSRINLLYKNKQISKAKYNKLKMKGDELPEDFIERDLRNTQYIAKKANEMLEQVVRTVNTTTGSITDRLRQDWDLVNIMQEINLHKYEKLGLVKLVQGKDGRIEKQIQDWSKRNDHRHHAVDALAVAFTTHSHVQYLNNLNARKDSSNKKHASIIGIEQKYLYRNEKGKLLFKPPMPINVFREEAKRQIENILISFKASNKVVTRNMNKIKIKGKDNYKTQITLTPRGQLHKESFYGSIKRYANYR

SEQ ID NO: 3455 - protein, 1241 aa, unidentified
  REGION 1..1241: note = Description of Unknown: Cas Enzyme sequence
DGKTIDAMDIAIKLHKEKLTPGQYVLEQLKSGKKYIPDFYRSDLLNELDLIWQNQKKYYPEILKDNLKIEIQNKSKKQTWQILKKQFGIQGIKIKGNKEEIKFQKYKLRVKGLTEKIDLEHLAIVLQEINAQISNSSGYLGEISDRSKILHFNNLTVGQYLYNILKDNPHNSLKNRVFYRQDYIDEFEKIWENQAKYYEVLTPELKTEIRDKIIFYQRNLKSQKSLLNICEFEGKEIEIDGKKKMIGPRVIPKSSPLFQEFKIWQILNNLYKINKETGEKKTLDLEDKKQLFEELNQKGKLSNRELLKLLGLKTKEWELNFKNGIEGNNTNALLYEAYQEIVEISGHSIDLHKMNAKKAKDALMTIFDTLGIKKEILNFDAGLEGKEFIKQPHYQLWHLLYSYDEDKSPSGTEALYKKLKEKFGFEKEFAKPLVSIAFENDHGSLSAKAIKKILRFLKEGHEFSKAAELAGYKHSKHSLTAEEIANRKLEDRLELLPKNSLRNPVVEKILNQMINLVNEIIAKYGKPDEIRVELARELKKSARERAEITQNINTIRKEHESIKKDLKKIYPFNKGVRITRNDIIKYKLYKELEPNGFKTVYTNTYIPFEKLYSKEFDIEHIIPKALLFDDSFSNKTLATKRFNLEKGDKTAIDAIIDKFGKDSKEYFRYLKTIDDLHKNKRISEAKYRKLKMTAENIPDGFLERDLRLSQYISKKAIQILEKVVRRVVPTTGSITKKLREDWQLIDILKELNWNKYEKLGLIEYEETKDGKKVGKIKDWSKRDDHRHHAVDALTIAFTKHNHIQYLNYLNARKNEYHKMHKIILAIEQKETYVNEKKKRLIKPPIPVAQLRAEAKKHLEMMLISFKAKNKVVTKNRYKTKKKGGFNIHTGLTPRGKLHEETLYGVSRYYKTKYEKIGTKFDEEKIKKVTKKSYRDALMKRLKEYGNDPKKAFGGKNSPSKNPVYLDEQKLIKIPEKVKLAWLEDRYTIRKEINPDNFKNMKHIEKIVDEGHKRLLLERLKKFNNDFKKAFSNLEQEPIWLDKDKGISLKRVTITGINNPIPIHDKKNHLGTLMLNEKGESIPVDYVNPGNNHHIAIYMDEEGNFHEEVVTFFEAVTRVNAGVPIIKKEHEKGWKFMFTLKKNEMFVFPDKENGFDPKEIDLTDKDNYHLISPHLFRVQKISEKNYLFAHHYETKAITGDMLKNKKELKGINYYFIQSPQKLKGIVKVRINHLGEIVKIGEY

SEQ ID NO: 3456 - protein, 1386 aa, unidentified
  REGION 1..1386: note = Description of Unknown: Cas Enzyme sequence
MKKILGLDLGTTSLGWAYVHEAEDKNEISKIIKTGVRVIPITTDENDDFQKGKSMSVNADRTLKRGMRRNIDRYQLRRENLIKVLKDNKIINSETVLTEYGAKTTHQTWEIRSKAVDNKVTLEEFARILLAINKKRGYKSNRKAKDEGDGQSIDGMDVAKYLYMNNITPGEYVYQRLKKGKKNIPEFYRSDLIEEFDKIWNNQKQYYPDILIDKLKNEIIGKNKGKTWSICKEGFNIEGIKLKGKRDEIKLQQYELRVKGLKNQLDLEHLLIVLQEINGQINSSSGYLGEISDRSKELYFKKITVGQYLYNQIKANPHSRLKNQVFYRQDYMDEFDKIWEKQSQYYDVLTDKLKDEIRNKIIFYQRRLKSQKGLLSICELEGKEVEIMIGGEKKKKIIGPRVIPKSSPLFQEYKIWQILNNIIIRNYETNEQYYLDDENKKILFEELNLKGKLTDTQVLNLIVDKPKEWQLNYKDGIEGNKTNQTLYKAYQNILIASGHNIDISKMKTKKIKEAIKVVFESLGINTDILNFDSDLKGKEFIKQPAYQLWHLLYSYEGDNSLTGNERLYKKLKEKFGFKREYAKFLVSVVFQDDYGNLGAKAIKKILPYMKEGHEYSEAASLAGYRHSKKSLTKEEIKSKVLLDRLELLPKNSLRNPVVEKILNQMVNLVNAIIDEYGRPDEIRIELARELKKSAKERKEMTENISKANKEYERIRNVLKEIPPFNSGVRITRNDIIKYRLYQELTNNGYKTIYTKTYIPLEKLYTKEFDIEHIIPKALLFDDSFSNKTLAVREFNRVKSSLTGIDAIIEKYGKDSDGYKNYIDGIENLYKNKAISRAKYLKLKMKQSEIPDGFIERDLRNSQYIAKKAKEMLESISRRVITTSGKVTSKLREDWQLINVLQELNWDKYNKLGLTYYEVDKGGKKIPKIKDWTKRNDHRHHAMDAITIAFTKHSHIQYLNNLNARKDKKNEKFHSVYGIEQKETEVNERGKRVIKPPMPLNKLRNEVKEHLDKTLISFKAKNKVVTKNKNKTKKKGGYNIKTELTPRGQLHKETIYGTSKYYVTKYEKIGTKFDEEKIFMVAKKEYRNALLKRLREFENNPKKAFGGKNSISKNPIFLDEEQSEKVPDKVKLVWLENRFTIRKEITPDNFKTRKNIEKVIDTGARKKMLERFEENNNDSKKAFSNLEENPIWLSKEKGIKLKSVSISGVSNAVPLHHKRNNKGKEILDKNGKPFPADYVSLGNNHHVAIYRDENGNLQEEVVSFFEAVARAKTGTPIINKNHEKGWEFLFSMKQNEMFVFPNEETGFDPKEIDLMDENNYDQISPNLFRVQKFTIRDYFFRHHFETNVDNINLLKSTTWKRLGLSGLLNVVKVRMNHLGKIVSVGEY

SEQ ID NO: 3457 - protein, 1433 aa, unidentified
  REGION 1..1433: note = Description of Unknown: Cas Enzyme sequence
MNNTENYILGLDLGTNSIGWAVINDAQNPGETPEIIDLGVRINPLTTDEKNEFTQGKAISTNAGRTISRGIRRNNQRYKLRRLNLINILKNNNIINNETILGENGQNTTFELLKLRAKAAKEQVSLKDLGHILLKINKKRGYKSNRKAQDNDEGQLIDGMAIAKILHNENLTPGQLSLRLANEGRKVLPTYYRSDLQAEFDKIWEFQKQFHPDILTDELYTELIGKTKKTTIDYFQKYNINPAEYKYSNQSEKIKVPLQLRVDAISKEISLENLALVIIEINGNISSSSGLLGSISDRSKELYFSEQTIGEYLYAQLENNPHASLKNQVFYRQDYIREFETIWETQANFYPELTIELKKEIGDEIFYQRKLKSQKGLVSFCEFESKEIETDNDGKKSTKIIGARVAPKSSPLFQEFKIWQILNNILIRRKGVKKRTAEKVSQQNLFNEEVSIFELNLEQKELLFEELNLKDCLTSDNCLKILGYSNKEWEMNYSKDAKIEGNATNKAFYDAYLQILEIEGYESDFIKNNDAPKIKKRLFTIFNELGIDTRILDFDAELSGKDFEKQPAYQLWHLLYSYESDNSPSGNERLYSLLEQKFGFKREHSEILANVKLLADYGSLSTKAIRKIYPYIRENKFSEACELAGYRHSKHSITKEEIDNKALKETLTILKKNSLRQPVVEKILNQMINVVNELIYKYSEKDDEGNIVKYHKFREIHIELARELKKSAKERSEMQTQINKSTKENEKITKILQDDFSIMYPTKKDIIKYRLWLELSPIGYRDLYTNQEIKKESLFSKNNTIEIEHIIPKARLFDDSFSNKTLAFSNINKLKGDNTAIDFISNTYNSDLDNYIERVETLYKAKTISKAKYLKLLKKTSEIGDGFIERDLRETQYIAKKAKDILSQITKNIVSTSGSITDKLREDWGLINIMKELNLPKYRALGLTEMQERKHGHKVETIIDWTKRNDHRHHAMDALTVAFTKLSYIQYLNHLNARKDESDKKHASVMKTQNNEMTKVIDHNGQEKRVFKEPIPKFRKIAKEYLENILISHKAKNKVITININKAKNKVTSEIIDKNGNKKTIKGQITKTPRGQLHKETIYGTYQYYETKEVKISSRLNKETINKVANPLYKSLLLKRLEENNNDPKKAFSGKNSINKNPIFLDKNKTKTMPDSVKLAWLETGYSIRKDVNPSNFDSEKSIEKVLDKNIRNILIQRLDEYNGDPTKAFSNLDKNPIWLNKEKGISIKRVTITGVSNAEPIHYKKDHLGNFILNDKGDKIPVDYIQTGNNHHIAIYKDDKGVLQEQVISFYEAVERANQGEPIINKTYKQEEGWKFLFTMKQNEMFVFPSDDFNPNDIDLLDRKNKKEISKHLFRVQKLSFTGYKYVFRHHLETTVDTKKQLNDIAYKQFSNLDFANNIIKVRINHLGDIVSVGEY

SEQ ID NO: 3458 - protein, 1557 aa, unidentified
  REGION 1..1557: note = Description of Unknown: Cas Enzyme sequence
MKKILGLDLGTNSIGWAVVNADETNRDNETKYLKPTEISAAGSRIIPMSADILGEFEKGNSVSQTAERTGFRGTRRLLERNLLRRERLLRVLQLMNFLPEHYAIYINRYGKFTDNSEPKLPWSKNEQGKFKFIFADSFNEMLADFAKFQPQIVADGQKVPYDWTIYYLRKKALTDAITKEELAWILLQFNQKRGYYQLRGEEEEENKDKLVEFLAQKVIKVEATDEKKGDDIWYNVYLENGMIYRRTSRIPLDWEGKTKEFIVTTDLEKDGTPKKDKEGNIKRSFRAPKEDDWTLVKKKTEYDIENSNKTVGYYIYDNLLQNPNQKIIGKLVRTIERKFYKEELRLILEKQKEFIPELRDENLYLECINELYHTNEAHRNNIAKPDFTNLFINDILFYQRPLKSKKSLISDCPYESRFDKDGIEHHVKCIAKSNPLFQEFRLWQFVQNLKIYQREKIVSDGQLDLFGNQNTGKLQTDVDVTAEFLTTEDDYVKLFEWLNDRASIKQDTLLNSYFKIKKAKGQEKYPYRWNYVEDKEYPCNETRNDLLSALDKCGMKKEFLSREMEMKLWHILYSVEDKIEIGKALETFAQKNKLESNFVETFKKIKPFKKEYGSYSEKAIKKLLPLMRMGKYWNSDDIDDNTKKRIEKIMSGEYDETIRNRAREKSINLEEIYHFRGLPTWLACYIVYDRHSEAKEIEKWEKPEDIDNYLKHFKQHSLRNPIVEQVVTETLRTVRDIWKQEGQIDEIHIELGRDMKNPADKRKKMTERIQQNENTNMRIKAMLMEFASPEMEIDNVRPHSPSQQDILRIYEENALDNLSKDDKEYDFISKISKTAQPTKSDIIRYKCWLEQKYHSPYTGEPISLGKLFTSAYEIEHAIPQSRYFDDSFSNKVICEAEVNKLKNRQLGYEFIKNHHGEKVQLSMGKTVEILSVDAYERFVKDNYSSNPPKMKKLLMDDIPDGFIERQLNDSRYISKVVKGLLSNIVREKLANGEYEQEAVSKNLISCNGTITDYLKKDWGINDVWNRIILPRFERMNKITGKDCFTTTTTEGHLIPNMPFELSKGFNKKRIDHRHHAMDAIVIACTTRDHVNLLNNEAAHSKNNANRYQLSRKLRRYEKITINGKEDREVPKEFIKPWDSFTTDVQKSLENIIVSFKQNLRVINKTTNHSEHFEDGKKVLVKQEKGDSWAIRKPMHKDTVFGEVNLRKIKTVSLNEALKMPTNIVNKDFKQKIRELLAEGNDAKFIKKYLEENKDVWSDINLAKVEVYYFSQEEKKKNGEAKERYFATRKNLDTSFDKKTIVESIADTGIQKILLAHLEAKGGDPELAFSPDGIDEMNRNIVSLNNGKFHQPIIKVRKYEKAEKFAVGQKGNKSKKFVEAAKGTNLFFAIFVSEKENKETGEIEKIRSYLTIPFNTMIDCQKKFGTKWNDNIEIYLKEKELVAPNAKLLFILSPNDLVYLPIENDTDIIDKKRIYKFVDSSGTIANFIPARSANIIFSIPTKKQKELGLNYNIQDEYGVGSPQSKNQKSITGEMIKETCVPLKVDRLGNIIEINGKKL

SEQ ID NO: 3459 - protein, 1243 aa, unidentified
  REGION 1..1243: note = Description of Unknown: Cas Enzyme sequence
MKKILGLDLGTNSIGWAVVNADENGNPVSIEGMGSRIVPLTADDTNEFTKGNAISKNQSRTEKRTARKGYDRYQLRRNKLTLEFRKLNMLPDEQLIKLQPLELWQLRATAATEGHKLTLPEIGRVLYHINQKRGYKHAKSDESADTKQKAYVAEVNARYAMIKERKQTIGQFFAEKLKENEIETSKGKLYTYRIKEQVFPRRAYEAEFDQIMECQRVFYPDVLTNEEINRLRNEIIFYQRKLKSCKHLVSLCEFEKREYKNKDGKIVIDGPKVAPKSSPLFQVCKIWEEINNITLRNRRNDELYISMDQRQAMFDFLDTHEKMTLSDLYSILGISKNDGWWGGKAIGKGLQGNTTKIALKNALGDFENADNLLQFKLESIDSNFVDEETGEIIQIINPNLEKEPLYDLWHTVYSISDKEELANALKKKFNINDEDIINNLYAIDFVKPGYGNKSAKAIRRILPYLQQGLKYSDACEYAGFRHSESLTKTENEQRQLLDKLPAIQKNALRQPIVEKILNQMINVVNALMVEYKEHFYSIRVELARELKQSKDDRNTTYLQNEAMERLNDAIAKRLNSEGIKTTKRILEKYKYIFPTKGCIDKKTGKFVSKNFENLSTVNQCIYCGKSFSLTAALNGDGYEVEHIIPRDLICDNSQSNKVLSCRSCNSKKSNKTAFDFMRGQGEQALEDYIARIEKWYKDGIISPAKREHLLLSHEDYLKRKKEGKTTDEDKKYWEDFVSRQAGETQYISREAIKILKQCCKNVNATSGAVTAILRHLWGYDEILHQLDFERYKKAGLTKIVTWESDHGKNKHTKEQIVNWTKRIDHRHHAIDALVIACTQQGFVQRINTLNADETKDLMKKQIESSGVKFEEKKDLLNKYLASLTPFSTQTVADNVDKILVSFKAGKKSASTGKRIKYVKGKKVVLQKGIIIPRGALHEEGVYGQIEINGKKEIVKKYKLGKGAQGFVFTGKETYEKKVNNKTGEIHVVDKIKNVLDSIVDVNIRSKILQRLNQGFEDGKDYRDDVKKALDNLNDLDKNPIFADDNNTIPIRTVRCRTGLSAVVPIKHNEKGEPIGFVKPGNNHHIAIYSDKNGNLHEHTVTFWHAVERKKYGIPVIIENPQSVWDSIIDKQLPESFLENLPDVKWTFEISLQQNEMFVLGMENESFEDAVRNNDFSTISKYLYRVQSISESDYWFRLHIETQNDKTPSAKLANKYHRVKSLKSFHELNPHKVYISVIGKIKAL

SEQ ID NO: 3460 - protein, 1158 aa, unidentified
  REGION 1..1158: note = Description of Unknown: Cas Enzyme sequence
MKNILGLDLGSSSIGWAVIHEDDTHGELVTMGSRIVQLSPDELSSFTQGNGVSVNAQRTQARGQRRGYDRYQLRRALLVEKLRELDMLPDVSLTGLPKLELWGLRARAVTERIGLRELGRVLFHLNQKRGYKSTKSDFSGDKKTTDYVKTINNRYDDLQAAGLTVGEHLYRELSANPFYRCKEQVYPRRAYVEEFDRIMACQQAYYPSLLTDEQIRCLRDEIIFYQRPLKSCKHLVSVCEFEKRRYVNAAGKEVEAGPKVAPRTSPLFQLCRMWESINHIVVRNRQNEILEISLEQKNQILAFMNTHEKLRITNLLQLLGLPKSGGYRFGDQFKAGIQGNKTRIDIATALGDYPDKERLLQFNVREISSSMVDEETGEILPIIDPSFEQEPLYRLWHVLYSIDDRDQLQAVLRRQFGIDDEEVLARLSALDFVKAGFGNKSSKAMRRILPFLQLGLNYADACAAAGYNHSNSMTKAENEARELLDRIPAIRKNELRQPVVEKILNQMVNVVNALMAKYGRFDEIRVELARELKQSKEQREKSYKSMLSTQRENERIAARIAEYGVVTRSRIQKYKLWEETDHCCIYCGQPVDVHDFLQGFGVEIEHIIPKSLYFDNGFANKVCACRRCNSEKGNSTAYDYMSHKGASLFQAYVDRVNDLKSRNKISENKMKNLLTKVENIPDDFIARQLKESQYIARKSRELLSMVCRQVTATSGSVTDFLRHTWGWDTVLHDLNLPRYREAGLTEMKEVQHKDKEQIVGWTKRLDHRHHAIDALTIACTKQGYIQRLNNLSAVGKKAEGEEAASGSENASQNLERYIQAQPHFSVAQVREAADRILISFKAGKKSVTPGKRYICKNGKRVVAQRGLLVPRGALSEESVYGVVRLWEKDDRGNRVQVQRAVLKYPVTSIDSKSLDKVFNKGIREILSNRLEQYGNDPKKAFATPVYSDAEGRRPIRTVRCLARPAVDTLVPLRYDRDGKPIAWVNPGNNHHVAIYRDEAGKYREQVVTLWNVVDRRRAGLPAIITDPRAVWDDVLQRTDLPEPLLKSLPDVKWQFVLSLQQNEMFVLGMSDEDFRYAMDHHDYALLNKYLYRVQKVSKGDYFFRFHVETMVDDKYDGKTNMALSIRMGKLKRVSVKSLLSLNPYKVHLSVLGEIDEVL

SEQ ID NO: 3461 - protein, 1299 aa, unidentified
  REGION 1..1299: note = Description of Unknown: Cas Enzyme sequence
LYSTPDSHFKEKIKEDKDFKFSLSNYLPFSENTIREFYKDFGYSENDIQEVLNEIEFRKNHHKKGNENIKLLPEDWIVYFLRKKALTEKIEIPELARIIYMLNQRRGFQSSRKDLKDSHVLPYDEFIKRRDANDFGENGIETKFVSITKVIKVEEVTTESKNKEKKKFKIYVEDERIRSNENEKGTFELDYKNKPEWEGKEFTFIVTQKISNKGKFTQYKPDIPGKDDWGLCTTALDEKINLVTYPGKYFYEELLKAYKEKRNYKIRQYPVYRWRYKKELEAIWEKQCELNPELNKLNTDKEILKKLAELLYPTQAKNNMSKLKEFLSHDLLHIISNDIIYYQRELKSQKNSISECRYEKRIGKEKDENGNWLESGKYGLKCIPKSSPLFQEFRIWQDIHNIKILKREEQVNGKTIFDIDCTKQYINDDVKVALFELFNENESITETDILKLIKDKNPNNDIEISKKKDTPHSHKINLFSKRETLKGNETLSRYKKVFKKVGYEDNSILNDPAKLYKLWHIDYSISSSDEKKSEKGIRTALKNNFPDIPEQFIEPLVKSILKLPEYKKEYGSYSALAIKKLLPLMRVGKYWNENSIHEQTKNRIQKIIDGEFDELINTETRENIRKWEKNNRSLVTLNDFYGLPTWLAGYVVYGTHSENEIENCNTPEEFNDKVILKLKNNSLRNPVVEQVVRETLLIVRDLWKKYGKIDEIHIELARELKKNSEEKRKIAENQKKNLEEKKKIKEILYELLNDGFQQYNVNEEIEFVNFEVKPNPENPGDIEKFRIWRSLSKFSESDWEKKVKDEKIPTDQQIKKYILWLSQNCRSPYTGKIIPLSKLFDPNQYEIEHIIPKAKMKNDSLANLVISELGVNKAKGNQLAANFISASNGKCNYGDIEYKLFTYEEYEKYCRDVFKHNKAKLKNLLANEVPEGFVERQINDTRFITKKVSQLLKPVVGSDTKIIFTGGSITSELKKNWGLTKEWKKLMLPRFKRLEAITGKTYIKQNEHDQNDIDFNVPENENFDIKRIDHRHHALDAIIIAATTREHIRYLNSLNAADSDEEIKKIKQSLVKEKIRDFKLPWETFTKEVREKIEETIVSFKVNNKIISKPQNFYTKWSNDLKKIKVEQKSNKKWMAVRRSLFKEPLGVKWIKQIKSVKVKDAFEIEIDRQANKHDKELRKTASYIYDKQARQIIKQIIHQCNTSIHEKDALLKEIDTYLKKNKSTKGYLLNGIPYEKIDVAKFVTYKTKRMSFTKNEEYFEGLTLQKMKKDFPYFNYISKQQFEQFDPKKQELIKQAGI

SEQ ID NO: 3462 - protein, 1243 aa, unidentified
  REGION 1..1243: note = Description of Unknown: Cas Enzyme sequence
MKKILGLDLGSASVGWAMIAESECDGNHETKILGLGSRIIPYNGTEGNDFSKGAGESRNSVRTKMRTARKGYDRYQLRRKNLVDLLVKNNMMPDYEAKSLSKIELWKLRSDAVNTEISNAQLGRIMLWLNQKRGYKSGRSDANLDKKDTEYVAMVKSRHEQIKEKSQTIGQYFYSELQENEFFRIKDNVFPREAYIEEFDAICDIQRQYNSALTDVLINRIRNEIIYYQRPLKSCKGLVSICEFEGFWTKKGDKEYFVGPKVAPKSSPLFQLSKIWENINNIKLGSDIDLTPEQKHALFEYLDNNEKLTSAKFIEIIGLKKGFVLSKQLDKGLSGNITKSAIKKCFGDNKEYEKFLKLELKISEGNGEGFLYNKTTGEVLNSKPVKFIDPSVEKEPLYQLWHTIYSISDMEECSNALQAKFSIDKATADRLAAIDFTKHAFGNKSAKAIRKILPYLIEGDGYSAAMSYGGYDHSNSLTKDQNTKRELLDRLKPIPKNSLRQPIVEKILNQMANTVNAVIERYGKPDEIRIELARELKQSKDERGETERYMNKRQRENEDITKRLAEYGLRATRNNILKWRLYEEIDNKDKKLNAMCIYCGQHISLTEAIKGSDVDIEHIIPKSKLFDDSQSNKTLAHRHCNRNKNDMTAYDFMCTKSEQELNEYVDRVEKLYSSHIIGKAKRDKLLMTEDKIPDNFIDRQLRESQYIAKKSREILQSICHNVWATSGAVTAELRHLWGWDEVTMNLQFAKYKKLDLTEIKEWESDHGRNKHSKEVIKDWSKRNDHRHHGVDALTIACTKQGFIQRFNTLNTIKTKDELRKVVENYSDTFKERLSLLGKYIVSQQPLPVSEVEQAVDNMLISFKSGKKVAVTGKRKIGKKGDKRVVQQGIVIPRGALHQEFVYGKIKSLEIAKPIKYLFENPSLIVKSYIREHIEQRIAESGDCKKALASLKKQPIYLDKDGKVELKYGSCYTDEYVLRYPVKELKYGDLKYIVDKRAKEAITERLELFGNDHKMAFKDLDKNPIYLDPQMTIPVKRVRLYTKLSALEPVKFNESGEPISFVKPANNHHIAIYRDREGALHEHVTTFWHAVERKKYSKLNGIHIPTVITNPETVWDTITQLPEEKQLSETFLEKLPDPSWTLELSMQQNEMFVLGMEDETFANAVADKSYSVLSKNLYRVQKLSSAKYVFRHHLETTVDDKYGGDKNELLSQKIGKLVSVRSLGALQSQNPHKVRINILGEIVP

SEQ ID NO: 3463 - protein, 1245 aa, unidentified
  REGION 1..1245: note = Description of Unknown: Cas Enzyme sequence
MENKILGLDLGSASVGWALVSEDSNGDSTNTTIIDLGSRIIPYEPKEDQNFVKGTGESKNSIRTNYRRARRNYDRYQLRREFLIKTLLKHNMMPTDEQKKLPKQELWNLRARAAKEKIELNELGRLLLWLNQKRGYKSSRSDANLDKKDTEYVAMVKSRHDTIKELNCTIGEYFFTQLSQDEFFRVKENVFPREAYIDEFDTICRTQQQYYEELTNELIAKIRNDIIYFQRPLKSQKGLVATCEFEGFTVTRGEKEFFTGPKVAHKSSPIFQVVKIWESINNLRIRTKNGEKLNFTKEQRQSIFNYLDNNEKLTFKNLCKIIGKKEEEIYADRKLYNSGIQGNITKCIISKILKDNKNADNLLKLELKIKEDPNNKTYLYSKETGEIIENTECNSKYVDRIIEYEPLYRLWHAIYSITDIDQCKKTLEKNFNIDLETADKLAKIDFNKYGYSNKSVKVLRKILPYLLEGYTYSQAMELAGYNHSGSLTKDENLSRNLLDKLKLLPKNSLRQPVVEKILNQMINVVNEIISKYGKPDEIRIELARELKQSRDERNETESFINKRNRENERIAKSLEEYGLRATRNNIIKWRLYEEMDNEEKKLNATCVYCGKNISLTEAIRGNDVDIEHIIPKSKLFDDSQSNKTLAHRRCNSTKGNLTAFDFMKTQKSDHEFHAYIERVNTLFKNHVISKTKRDKLLMSEKDIPDNFIDRQLRESQYISRKAREILNTVCHRVWCTSGTVTAELRHLWGWDDVTMNLQFPKYKSVGQTEIINWESNHGKNTHEKEVIKGWSKRDDHRHHAVDALTIACTKQGFIQRFNTLNSQKTRALMEEQVAKNRIEHKEKLSILEKYIISMQPISVHEVQKAVSKILVSYKSGKKVATKGTRKIGSRGNKRIVQNNIIVPRGALSEESVYGKIKVLEKEKPIKYLFDNPDLIVKQYIRDLVQQRIENCDGDVIKAIAQTKKNPIFLDIDKTIPLEHASCYKEEYVIKYPINSSFNKVDKVIDSGIRDILVNRLQKFNNNPKEAFKDIVSEDKSTVPWFIDEGLKHPVYSVRCLTGLSAVVPIRRDPEGNDIGFVKPANNHHIAIYYDQDDKLVEHACTFWHAVERKKYGLPVVITNSNQAWEYLQMNNMEELPESFLNQLPPPGYKLKYSLQQNEMYLLGLPEEEIKSLIEKEDYSTLSSYLYRVQNISSKDYFFRHHLETQNIITSEASIAKRYVRIKSIKGLEALNPYKIKIDILGKPSV

SEQ ID NO: 3464 - protein, 1235 aa, unidentified
  REGION 1..1235: note = Description of Unknown: Cas Enzyme sequence
MKKILGLDLGVASIGWALVEEENGIVTIVALGSRIIPYDSTEGQDFVKGTGESRNAQRTKARTIRRGYDRYQLRRKFLVETLVKNKMMPNEALKNAPKMHLWKLRNKAVTENISKQELGRLLLWFNQKRGYKSGRRDINLNKKDTDYVKEVKSRFDKIKDLKVTIGQYFYEELKKNEYFRVKENVFPREAYMEEFDVICARQKEHLGLTDELISKIRNEIIYYQRPLKSQKGLVAICEFEGFWVKKDGKEFFVGPKVAPKSSPLFQLSKMWENINNIKLSSKFGEIVELTQEEKQKVFEHLDNNEKLTATDLFRILKKSKREYTITKQLEKGIQGNITKNAITKILDKNGKYKDLLRFDLNTVETDKLCYLYARDTGEILGEKRLKYTDAVVEYEPFYQLWHTIYSIDDLQECSAALQKRFGIDVETADKLAAIDFNKYAFGNKSVKAIRKILPYLMEGDRYSEAMSYAGYNHSNSLTKDENFDRKLLDKLKPIDKNSLRQPIVEKILNQMIHVVNAVIDEYGRPDEIRIELARELKQGKEERNDADKAMSKRQRENENIKKRLAEYGLRATRNNIIKWRLYEEINNQDKKLNAICIYCGQPISVTEAIKGEDVDVEHIIPKAKLFDDSQSNKTLAHRHCNSNKRDMTAYDFMKTKTQQEFSAYVERVNKLFADKIISKTKRDKLLMSEDKIPSDFIDRQLRESQYIAKKAREILQTICYNVWSTTGTITAELRHLWGWDDVIMNLQMPKYKDLGLTEIVEWVSEHGKRIHSKEVITDWTKRDDHRHHAVDALTIACTKQIFIQRFNTLSASKTREDMQWEIEKRSKQYKEKLSLLEKYIISQCPIAISDVEKAVAEVLVSFKSGKKVAVIGKRKVGKRGNKQVVQKGIVVPRGALSEASVYGKIRMIEKNKSVKYLFENSSLIFKPYIKKLVEQRLAKFEGDSKKALASLKEEPIYLDAERSKILEYGTCFKEEVVIKYSVDTNFNKTDDVIDGKTKEILQNRLNKFGGKPKEAFKDVKRGEKTLKWYEDEELEYPIHSVRCSTGLVAVVPIRKDENGNEIGFVKPGNNHHVAIYVDKEGNRLETVCTFWHAVERKKYGFPTIIKNTNEVWDKVTSMKDDTYPQSFLDQLPSYNLELELSMQQNEMFILEMEGDDIKIAIESRDYRTISEHLYRVQKLGSNDYTFRHHLETNLINSDISKMSKRYFRVQSLKTLFSLKPFKVKIDYLGNIRTLQ

SEQ ID NO: 3465 - protein, 1458 aa, unidentified
  REGION 1..1458: note = Description of Unknown: Cas Enzyme sequence
MSTKKILGLDLGTTSIGFAQVIEGETPEQSSIVQIGVRVNPLTTDEQTNFEKGKPVAVNSERTLKRGARKTLDRYQLRRENLIEILIQAEVITNETMLAEVGKGTTHETWSLRAKSVTEKIEKAELARVLLAINKKRGYKSSRKAKNEDEGQAIDGMAIAIRLYDEQLTPGQLVYQLLIEGKRAIPDFYRSDLQTEFDKVWNCQKQFYPEIFTDEFYKELQGKGQRATSASFWVKYKFNIAEIKDLEDSSKNEKTFKLNLRDKKKLQAYKWRSIAISEQLEKEQAAYVITEINNNLNNSSGYLGAISDRSKELYFNKQTVGQYLYAQLLKSQHNRLKNQVFYRQDYLDEFEAIWKEQSKHHPELTNELKSEIRDITIFYQRKLKSQKSLISFCEFENREIEINGKRKTVGLKVAPKSSPLFQEFKIWQVLNNVLIKKKGSKKRVARETANSENTEAEIFAFDLQTKQTLFNELNLKGNLSASKAIELLGYKPAEWELNYLALEGNRTNKSLYEAYLKILDIEGYDAKELLKVKSNKDEVELDDLNVPATEIKEMVKAIFAVLGVNTEILEFNAELDGKAFEEQKSYQLWHLLHSYEGDNSPSGNEKLYELLEKKFGFKREHSKVLANMALSDDYGSLSAKAIRKIYPFIKENTYSEACELAGYRHSALSLTKEEIETRPLKDTLELLKKNSLRNPVVEKILNQMVNVVNTLIETNSKKDEKGKITEYFKFDEIRIELARELKKNAKERAEMTSNINTAKTKHDKIIKLLQSEFGIKNPSRNDIIRYKLYEELKNNGYKDLYTNTYIAREILFSKQMDIDHIIPQARLFDDSFSNKTLAFRQDNLKKGNRTAIDFIESDFGTEKATEFLQRAETLFEAGKKNIEEGISKAKFQKLQKRESDIGDGFIERDLRDSQYIAKKAKNMLFEISRSVLSTSGSITDRLREDWGLINVMQELNFDKFKALGLTEKVEKKDGTFRERITDWSKRNDHRHHAMDALTVAFTKHSHVQYLNFLNARYNEAHKFHSNIKGIEIKETHVVKDDKGNSNRIFNLPIPNFRQLSKEHLENVLVSHKAKNKVATLNINKAKNDVVSTIKDKDGNEKKVKGQAVKTPRGQLHKETVYGKIKVPVVSEEKLGAKFDLSTINNVASAKIKQALLQRMKENDNDPKKAFTGKNSLTKNPIYLNEDKTETLPEKVKLIRYEDGYTIRKEVSPDLKIEKVIDSAIRKVLEERLKQFGNDPKRAFVDLDKNPIWINKDKGISIKRVTISGVSNAENLHFKKDHLGKDILDANGKKIPVDFISTGNNHHVAIYQDENGNLQDRIVSLFEAVQLVNAGEPVIDKTYNQGIGWQFLFTMKQNEYFVFPNETTGFNPKEIDLLDPINNKLISPNLFRVQKLSRVSYGNSTVREYVFRHHLETSVDEKKELKEIAYKNIKSLGYFNNITKVRINHIGQIVKVGEY

SEQ ID NO: 3466 - protein, 1430 aa, unidentified
  REGION 1..1430: note = Description of Unknown: Cas Enzyme sequence
MKRILGLDLGTNSIGWAIIQIFEDGRKKILKLGSRIIPMDGAEMSNFKKGLPQTKNAKKRLKKGIRVGNKRYKQRRNKLIYVLQKLELLPEQIKTSKAFDDPLKIQKVNVLPIDKGTKQLSGKELIELKAKAIHKPVSAKEFGKILYRFNQLRGYAGGDDIDEQDELNEVLGIKSDKIFPAILNKTKMLRILSVEKTDEKEGKHQKEVYRIKVIDADGKICEGTTLTSDLKINDSIELRQTIRQNTKTGEITSIKFFIPKKSSWRKQIESLEEAIEKYSKEEGRKIFLSEYFLTCLNKNKWYRLRGNVVLRSRYVEEFDAIWKTQFESHLKQVKNATIEEIVNFLFPGKKQAKYRKEGLEKGLCHIIRNQIIYFQRELKDQSHLISDCRFEKGEKAMSKSHPLFQEYRIWEQINKLSISRRTQIGTLKNGKPKYAYKERSVSSRFKENLFEDLQEKQSLKFGTVFNNLKKTESFEEGKDFFNGLSPKGQLVGNSTRIQLKRKLGRFWDILDLENNVENQIELWEILYNAKGNEYDLKSERNKRISIYLDRKGVEDTGFDKIVVAISCIKFPRNYASLSEKAIKKTLPLVRTGKYFDVNHFPKLVNERIVKLLNEHVEDPFDKSVQSYLENNESLVLHEGGFINAFALMLLYGKHTAKEVDNEKVFNDFNQIKVLKRHSLRNPLVEQIVNETMMVVKDIWRHYGKPSEIKIELARELKNSIKERNKIHDANEKGRKWNNTVKERLVEMKVNTSSGNIEKYKLWYQQKGIDPYTGKIIKISDLFDKDLYDVDHIIPQSRYFDDSMQNKLVCATVVNRDKSNRTAMEYFDTGSSKVDLYSKEEFMNNVSKNYFGKKAKNLLATKIPDNPIERQKKETQYISVKAKEELAKIVGTSNVKVSSGGVTHYLRNHWGVTEIFKNLLKERYERFYKDIKAPMEWSKLQMEIEKESNKNIDLIRKYFVNISQNQLTIEQAKCILNKYENLSSPITQDQFCQLYLECHIYKSNNHQIMYGYSKRYDHRHHAMDALVVACTDEKAVKRLNDLNKHLQDWLKENINRFDLDISADDDALLENFFSEEESVRKLVLKDIDKFRNVELPWSGFHADVEKALTKIIVSHKPKDDILIQNKEEKNTKGELVKTDEKTIRIRGPLHEETLYGISKGFETIRIPLTKFSNAKFDTAGNIDKIVNEYLKMIIKNHFENTFNKSKSEAFGEEGIFKLNKELEKDKHPPISSIKVYRKKIKNPKTYKITLQRLDREKSYNKRVYVQTGSNYLFAVLEKEGKRIYDIISLFDAVDYIKDSFVNSEDKSTFNKKSLLKNYFENRANAKLLFSLKKLDMVYFPDEEEEVVLDTKSSLYDSYWKSPKRLDNIYVVTKFSGSQIYFKKHTIAEVLESKVELGSQNMMETLNGRKIVEFCYPIVLDRLGKIQSVYRD

SEQ ID NO: 3467 - protein, 1201 aa, unidentified
  REGION 1..1201: note = Description of Unknown: Cas Enzyme sequence
MFFRCFFCTVRLSIFERFVFPKGSKFNRLVWDSLEIWKCGLYIKYIVGMKNILGLDLGSSSIGWAVIRENSEEQELVAMGSRVVSLTAAELSSFTQGNGVSINSQRTQKRTQRKGYDRYQLRRTLLRNKLDTLGMLPDDSLSHLPKLQLWGLRAKAVTQRIELNELGRVLLHLNQKRGYKSIKSDFSGDKKITDYVKTVKTRYDELKEMRLTIGELFFRRLTENAFFRCKEQVYPRQAYVEEFDCIMNCQRKFYPDILTDETIRCIRDEIIYYQRPLKSCKYLVSRCEFEKRFYLNAAGKKTEAGPKVAPRTSPLFQVCRLWESINNIVVKDRRNEIVFISAEQRAALFDFLNTHEKLKGSDLLKLLGLSKTYGYRLGEQFKTGIQGNKTRVEIERALGNYPDKKRLLQFNLQEESSSMVNTETGEIIPMISLSFEQEPLYRLWHVLYSIDDREQLQSVLRQKFGIDDDEVLERLSVIDLVKAGFGNKSSKAIRRILPFLQLGMNYAEACEAAGYTHSNNYTKAENEAHALLDRLPAIKKNELRQPVVEKILNQMVNVVNALMEKYGRFDEIRVELARELKQSKEERSNTYKSINKNQRENEQIAKRIVEYGVPTRSRIQKYKMWEESKHCCIYCGQPVDVGDFLRGFDVEVEHIIPKSLYFDDSFANKVCSCRSCNKEKNNHTAYDYMKSKGEKALSDYVERVNTMYTNNQISKTKLQNLLTPVDKISTDFIDRQLRESQYIARKAKEILTSVCYNVTATSGSVTSFLRHVWGWDTVLHDLNFDRYKKVGLTEVIEVNHRGSVIRREQIKDWSKRFDHRHHAIDALTIACTKQAYIQRLNNLRAEEGPDFNKMSLERYIQSQPHFSVAQVREAVDRILVSFRAGKRAVTPGKRYIRKNRKRISVQSVLIPRGALSEESVYGVIYVWEKDELGHVIQKQRAVMKYPITSINREMLDKEKVVDKRIHRILSGRLAQYNDNPKEAFAKPVYIDKECRIPIRTVRCFAKPAINTLVPLKKDDKGNPVAWVNPGNNHHVAIYRDEDGKYKERTVTFWEAVDRCRVGIPAIVTQPDTIWDNILQRNDISENVLESLPDVKWQFVLSLQQNEMFILGMNEEDYRYAMDQQDYALLNKYLYRVQKLSKGDYNFRYHTETSVEDKYDGKLNLELSRQMGKLKRVSIKSLLGLNPHKVHISVLGEIKEIS

SEQ ID NO: 3468 - protein, 1375 aa, unidentified
  REGION 1..1375: note = Description of Unknown: Cas Enzyme sequence
MTKTILGLDLGTTSIGWALVKEGNDADIIKTGVRVIPLSTDEIQNFDKGKSITTNADRTLKRSARRNLQRYKQRREHLISILKENKLINDESILTEHGNHKTFETYQIRSKAATEKIELNEFARVLLMINKKRGYKSSRKAKGEDEGTAIDGMEIAKRLYEELLTPGQLVHIRYKEGKTNIPDFYRSDLQEEFNSIWHFQKKFHPSILTNELYEELLGKTKTVTAAILRKLGFDGIELKGNLSEKKKERYSIRSKAVTIECSIEEIAEILPEINNNINSSSGYLGAISDRSKELYFNEETVGQYQYKQIVANSHFSLKNQVFYRQDYLDEFNTIWEKQKEFYSTVLTENLKNEVRDTVIFYQRRLKSQKGLLSICEFEGKKIEIIIDGKKKNKIVGPKVCPKSSPIFQEFKIWAQLNNIEYSADSEKKTKGISLELNQMEQLFHELNWKEKISSSEVIKLLGLKGYKLNFDSIEGNRTNAALIKVLEEFFEKEGHDELNFSKSNSTQVITDIKALLAVYGINTEILEFDSSIQGQAIEKQPFYQLWHLLYSFEGDNSTSGIEKLRIALFEKFGFPYETNSPISNIKLIDDYSSLSARAIRKILPYLKEGNRYDLACGLAGYNHSHSETKADLDNKILKEKLTILSKNSLRNPVVEKILNQMINVVNGVIETYGKPDEIRVEMARELKKSAKERESATKAIRQATDEHEKLRKELQNEFGIKNVSRNDLIRYKLYLELKDNGYKTLYSNQPIDRSKLFSSAYDIEHIIPQSKLFDDSFSNKTLELRSVNLKKDNATALDFVATEYGETGLAQYEERVKSLFGNQIGKKSKYRKLLMSDKDIPTDFIERELRDTQYIAKKAKEILSEIVRDVATTTGSITEKLRDDWQLVDVLKELNWGKYELLGLTETFENRHGQKIKRINDWTKRNDHRHHAMDALTVAFTKREYVKYFNNLNARSDKDGEIFKIQKMETYFDKDQKRRINPPMPMGKFRALAKEHLENTLVSFKAKNKVSTKNKNITKTEKGKKTVISETPRGQLHLETVYGSSQAYVTKLEKVGASFNEEKISKVANQKYRALLLKRLEENGNDPKKAFTGVNSLSKRPIYLNQLETYSLPESIKLVEFETVYTIRKSISPDLKIDKVIDKGVQRILQKRLDEFGGDTKKAFSNLEENPIYLNKDQGLVLKRVAISGVSNAVSLHDKRDKFGNKILDNNGNPIPVDFVNTGNNHHVAIYRDEKGNLQEEVVSLFEAVSRKNQDLPIIKKSHELGWEFVFTLKQNEFFVFPNEKTGFDPKEIDLLDPENFKKISPNLFRVQKISTKNYVFNHHLETGAVDGEMLKLKKMLSNVTYRFIQSTSHLESTIKVRINHLGLIVQTGEY

SEQ ID NO: 3469 - protein, 1516 aa, unidentified
  REGION 1..1516: note = Description of Unknown: Cas Enzyme sequence
MKKILGLDLGTNSIGWALIEQNFENKQGSILGMGTRVIPMGQDIIGDFGKGNSISQTAERTRLRSARKLRQRHLLRRERLHRVLNNLGFLPHHYQKQIDFQKRLGQFTVNTEPKLAYQTSVSDLTGKVNYDFLFKSSFESMLEDFRKTNPDVLVGIKGQPRLIPFDWTIYFLRKKALTDRIEKEELAWILLNFNQKRGYYQLRGEEDEEISNKLVEYHTLKVVEVSTLETAKNKTDMWYALTLENGWVYKRSSKVPLFDWKGKTKDFIVTTELNDDGTVKLDRDGLERRSFRAPSEDDWTLLKKKTEADIEKSGKTVGTYIYESLLCDPKQKIKGKLVRTIERKYYKDELNAILKKQIEFHPVLRDEDVYNECVRELYRNNDVHQHQLAGKDFLHLLINDIIFYQRPLRSQKGTISNCSLEFRLFKNDEGQVLKQHLKAIHKSNPYYQEFRIWQWIYNLAIYDQDEINVTNDFLSNTSDYESLFEFLNDKKEVDQKAIFRFFLEKRGMKGKALSAEAEKYRWNYVEDKKYPCNETRNLIISRLTKIGIDYSDFLTKEVEMRLWHIIYSVTDKKQFEQALKSFANKHQLDTEQFIEVFKRTPPFKSDYGAFSEKAIKRLLPLLRCGKYWSWEAMDDATKDRILKIITGEYDPSIKERVRDKTILLSSEADFQRLPLWLAQYVVYDRHSEASEIVKWKSSDELKEFIDDFKQHSLRNPIVEQVVTETLRVVNDIWNHYGNGSGSFFDEIHVELGREMKSTSEQRKNMTIQITQNENTNHRIKYLLAEMAHDSEVQNVRPYSPVQQEILKIYEDGVLNSELEIEEDIIKILKTPQPSASDLRKYKLWLEQKYRSPYTGEVIPLNKLFTPEYEIEHIIPQSRYFDDSLSNKIICEAAVNKLKDNCLGLEFVTKFHGQIVEIGFGRKVKIFEVDAYKDFLTRHYAKNRAKKSKLLLEDIPEAMIERQLNDTRYISKYITSILSNIVRSDDKDDGVNSKNVIPGNGRITDELKRDWGLNDVWNDLILPRFERLNKLTGTAQFTVWNERHQKFLPTVPLELSKGFSKKRIDHRHHAMDALVIACATRDHVNLLNNKHAKSSVRFDLNRKLRRFERVSYNNAETGQVINREVPREFLKPWDSFTVDAKSKLEQIIVSFKQNLRVVNKATNSYQKWVVAAGKKEKQWVEQLGTNWAIRKPLHKDTVSSIISIRKKKIVSINNAIDDYVNIVNKKLKQEIKRMLEDGLDKNKILKLFKEADNKFQNKDISKIEIYYFEQDNVATRSSLNETFDPKSIESITDTGIQKILHKHLSQYSGRLDEKGKEIPPHQMAFAPEGIEEMNKNIVQLNDGKFHQPIYKVRTYEPKGNKFTVGQKGNKRSKFVEAAKGTNLFFAIYVDSAGKRKFETMALNVVIERFKQGLTAVPETSDNGDKLLFYLSPNDLVTIPVDEIDGDDNTRNPGEINYVYKVVSFSGSQIFFVAQNIATPIVNKVEFSALNKMERTVEGIMIKDCCQRLKIDRIGRIS

SEQ ID NO: 3470 - protein, 1041 aa, unidentified
  REGION 1..1041: note = Description of Unknown: Cas Enzyme sequence
MAKVLGIDMGTNSIGWCLIEEYVDKDSQLIDLGVRIFQRVLEDKQPIPKNRKRREKRLARRVLDRRARRKSRLKNYLIKVGLLPETLRFEPPEKILNSIGHPILKTFRVGDEIITRTCITNPYDLRRIGLEEPLKPHEFGRVLLHLCTRRGFQSNRKTLLGNLADDPDFLEAIAEIEAESGDDADKLLPKEKQRIEDEQTIKAEIAKLKDQMGSQTLGQYLAGLDPHERKRNRWTDRSMYRDELKRLWEKQSSFDPDRCTSEVYREIEHIIFYQRPIRFMKNRIGKCLLESDRPRAKRARLESQRFRYWQDLNNLQLEHATGETSILTLEQKQMIAQALERQESMSWGGLRKKLSIKQVKFNLEKSGTKMLFGNRTACALRKCIGVHWDNLSPENQIQLVEDISTIDNKKALKKRLQEHWNFSLPEIIKLVTVQFEPGYMNQSLKAIRALLPHLRKGLIYSDARIAAGYGYETLAPETVAGRLGPHPDIPNPVVSKALSQTRRLVNAVIAAYGKPDEIRIELARDLKMNAKDKERFEKQQKENQKANETAEEQYRNIRQNNHHLNLPGYPSRDDKIKYRLWGECKGVCIYSGNGISLTQLFSPEIEIDHILPFSRTFDNSFMNKVIVFSDQNRAKGNKTPYEHFSVAHYDEILQRARALPFAKRQRLMKRELKQPEEFISNQLNDTRYMSKLAQQYVQQLGIKVSVNKGGITAMLRSRWGLNEVLGTPDKNRTDHRHHSIDAAVIAVTGRRMYQRIATHLQQPENQRFGKPIRIPAPWEDFFVQLQQRVDSILVSHEVCRKVSGALHEETAYGLRPGENGEMRIVHKKKLDSSFNAKQIEKIYDPVLKEIIRNHFVKHGSNPKEAFSDDNFVVHANGRARIRHVLVDESRFNEDSYIAISNDQGKKPKFYPLGSNHHVEIFKIEKKGKPQYKGRFVSMLEASKRETIFKTPVVNTIGGDGETFVMSLCINDIVSITIKEKTLFYRVQKLNATSDRLYLRLHTAATLNNEEEEMGNAINSLITKYSMKKVNVNVLGKKIGND

SEQ ID NO: 3471 - protein, 1505 aa, unidentified
  REGION 1..1505: note = Description of Unknown: Cas Enzyme sequence
MKKHILGLDLGTNSIGWALVEVDENNKPCSIEGMGSRIIPMSQDILGNFESGNSISQTAERTAYRGTRRLRERHLLRRERLHRVLNVLGFLPEHYMNQIDFEKHLGKFFTDLEPKLAWKENANGKYEFIFQSSFNEMVSEFKKAQPYLFENGKLIPYDWTIYYLRKKALSQKIKKEELAWILLNFNQKRGYYQLRDEVDEENPNKLVEFHSLKVIDVVPDESANSKGETWYSLHLENGWIYRRSSKTPLFDWKDKVRDFIVTTDLNDDGTIKTDKEGNVRRSFRAPAEDDWTLLKKKTEADIDKSKKTVGTYIYDALLENPSQKIKGKLVRTIERKFYKEELKQILQKQQEFHPELQDEDLYNEAVRELYRSNESHQLALGKRDFTHLFLEDIIFYQRPLRSKKSSIGNCSLEYRKYRDKEGVEHIEYLKAAPKSNPYYQEFRLWQWLYNLTIYRRDDDTNVTQEFLNSVEDYETLFDFLDNRKEIRQDTLIKFLLEQKGFKGKMLANEASKYRWNFVDDKEKVYPCNETKALIVSRLAKVENLPDGFLKRETEQQLWHIIYSVTDKDEYEKALKSFAERHGLDVASFVENFKKFPPFKSEYGSFSEKAIKKLLPLIRTGKYWDWGKIDESTKKRIDKIITGEYDENIKERVREKAIHLKEEGHFQGLQLWLASYIVYGRHSEPGIAGKWNSVNDLEKYLHEFKQHSLRNPIVEQIVTEALRVIRDIWAHYGNGVKDFFSEIHIELGREMKLPAEDRKKLTDQVLENEKTNLRIKALLAEMLHYPEVENVRPYSPMQQEALKIFEDGVLSSNIEIDDDILKISKTAQPSSSELRRYKLWLEQKYRSPYTGQVIPLNRLFTADYEIEHVIPQSRYFDDSFNNKVICESAVNKLKDNQTSFEFIKNHHSEIVEVGFGKTVRIFEEEEYQKFVKEHYAKNRSKRNKLLMDEIPEKMIERQMNDTRYISKFISSILSNIVRSETNDDGINSKNIVPLNGKITGRLKQDWGLNDVWNDLILPRFERMNELTGSKGFTVYNERYQKYLPTVPLELSKNFQKKRIDHRHHAMDALVIACATRDHVNFLNNQHALDKKKTKEEKDKSRFDLRNKLCFKNKGDDKGNYNWQFFKPWGNFTVDARNELEKIIVSFKQNLRVINKSVNYYQRYIDGEKVVDKQTKGDNWAIRKPLHTPMPYGKKEYWFDILKVADNIGKRAYIIDNEVKKKVENVLSSFNNKITEAQKYLKKTPIVDDSGVPIIETAFSVKSEKFRRRQPISKLSNRGQGGIKTIADATKFINKIADFKLREDLLQHLKDNADNIDLAFSPEGIERFNANRKIPAYKLPIAESGSSRFRVGYTIGTKSKWVEAAEGTNLFFAIYADDEGKRSYETIPLNIVIERLKQGLKEVPERNEKGHNLLFSLSPNDLVYVPGEEELTTSLNHQLDRNRIYKMVSSSGNQCFFVKSEVANPIVNKVEYSVLNKMEKSIDGIMIKQVCVKLKVDRLGNTEETFR

SEQ ID NO: 3472 - protein, 1198 aa, unidentified
  REGION 1..1198: note = Description of Unknown: Cas Enzyme sequence
MKKVLGLDLGVGSIGWSLIALDEYQRPTEILGMGCRIVPLTKEENKFASGGGISENAKRTQMRTMRKMLDRYQQRRTKLANILREHQMYPDEALMQLPLMQLWQLRADAATPGRQLSLPELGRVLYHLSQKRGYRHSKSDESGEKKDTEYVAEVKSRYQQIQEEGLTVGQHFAKLLKDNEQHSEHGGVYYNYRTKDQVFPREAYAEEFDRIMAVQRGFHPSLTDRLIAKLRDCIFYQRPLKSCKHLVSYCEFERKQIELPVKQVERDGTITYKKQLVDVGPKVAPKSSPLAEVCRIWETLNNLRLYFPDGSERTITQEERQRLFDYLQENDALSLAQTKKILKCKDEDLFSNILLEKKKKEKPTEKKEKETSKAKEDTGNPEVKIKGNTTTATLRKALKGYKQYLELLSFELTQEEKADPETGELRPVISEHYQQEPLYKLWHILYSIEDKEAMRGALTRQLGISEADLDAGLLDKLFKVDFVKQGYANKSIKFISKLLPHLMQGQMYSEAAERAGKRHSDSLTSEDLQLRPLLDKISVLQRNSLRQPVVEKILNQMINLVNQLKADYGEIDEVRVELARELKMSREERERTASNQRKNEKENQRIAALITKDYGLHPTKTRIQKHKLWKETEGNCMYCGKPVDIKQFLLGSEVEVEHIIPRSILYDDSLSNKTCACRKCNSEKKNRTAKEYILSKDEETQKKYNARVQELFERHKISSAKRSRLHMTLADIPEDFLERHMRLTQYISREAHSILTKGIRCVEASSGGITATLRRLWGYDTILKELNFEIYQSRGETETILIEGVPTERIANWSKRNDHRHHALDALVVACTNREHIQRLNYLNSEADRKGMGDELKETEGQHTDQQQLLDRWLRAQPHFAPHVVQAKIAEILISLQPEEKTYSRGRNIIKRKGERFVQEGILVPRGALSKETVYGSIQQGDHREIVCKYALHAIEEKDIPHIVDPRLRNIIAQRLAEHGGDRDKAFAEPLYSDRAQTQQVRTVRCFTGLQREKLAPLRRDEEGQATAFVSPSNNHHVAFYRDAKGQLQEYISSFWQVIERVRFGLPPIIYDPRTTMEQALVIADLPESILKALPPSDWVIEEILRRDEFFLMGMNDEEIASALETQNYSLLSRHLYRVQKLATRSYWFRHHLETSVQDKTNSRGDVPKFYCVTSFKGYGKLNPRKVKVDRLGRISLL

SEQ ID NO: 3473 - protein, 1478 aa, unidentified
  REGION 1..1478: note = Description of Unknown: Cas Enzyme sequence
FDKGNSISQTAKRTEFRGVRHLRERHLLRRARLHKILRLLGFLPDHYVQDLDGHGNFLVNVEPKIAWRKDSNGTFEFIFNDSFDEMLQDFATYQPELIACNRKVPYDWTIYYLRKKALTKKLSKEELSWILLNFNQKRGYYQLRGEEDDESVKTAKTRQYFDRQKIKSIVDTNQTYKGQKVLIVELEDGVKGKIFKKEIPNWVGQEKSIIVTVDIDKDGCDKYEESGELSCRFKIPSDAEWESEWKLIKMKTQKDLDASGKTVGAYIYDAILQNPSQKIRGKLVRTIERKYYKEELKQILKKQVEFHPELRDKDLFLDCLNELYPNNDAHRNACADRDFIYLFMDDILFYQRPLKSKKSLIADCPYEKHMYRDKETGELKYSSVKCIAKSHPLFQEFRLWHFISNIRIYQKERVIDVDACQPDLSSARSALKSKLEADVDVTNEFLTCEADYVSLFEWLNNKKSVSQKDFLKYPAFGIKKSGDNYRWNYVEDKSYPCNETRALILSHLEKANIRGDIFTREQEEALWHILYSVEDRYEIVKALQSFAAKYRFNDDFVTVFSKFPPFKKEYGSYSAKAIKKLLPLMRMGKYWSESAIDIKTRERIEKIITGECDDSIRERVRLKAIRLHDIEHFRALPVWLACYVVYDRHSESGDIMKWKTPQEMDSYIQNFKQHSLRNPIVEQVITETLRVVRDIWKQVGRIDEIHVELGREMKNPADKRKEMTKRIIENENTNLRIKAMLTEFLNPEFEIENVRPYSASQQDILRIYENGVLNSVSEIPEEITGILKKFNEREQRKRPSTSEVLRYKLWLEQKYCSPYTGKMIPLGKLFTPAYEIEHVIPQSRYFDDSFNNKVICEAEVNKLKGNLLGYEFIKKHHGQRVDLGLGEIVDIFSVDEYETFVKDYYSGNQQKMKKLLMDEIPEQFIERQLNDSRYISKVVKSLLSNIVREQDEQESISKNVIVCTGGVTDRLKKDWGINDVWNKLILPRFQRLNNITETTEFTAKNMEGHEIPVVPFEYQRGFNKKRIDHRHHAMDAIVIACASRNIVNYLNNESARKKARISRYDLQKLLCDKVRTDDNGNYKWILKKPWGTLTQDVYAALDNVIVSFKQNLRVINKTKNYYVHYEAGKKTIAKQEKGSSWAIRKPMHKDTVFGEVNLRKVKTVSLNEAIKNPQCIVEKDFKKKLLSLLKQNFDAKKVKAYFEEHKDVWSDINLSKIEVYYFTKDTKERFFATRKPLDSSFDKKEIESVTDTGIQKILLRHLEQKNGDPDLAFSPDGIEEMNHNIVQLNGGRKHQPIVKVRVYEKADKFAIGQQGNKSSKYVEAAKGTNLFFAVYEEEVRDKKTNAVMLKRHYASIPLNVAIDRQKKGLSTAPEDENGNVPIFVLSPNDLVYLPTAEDIANASISFPINKNRIYKMVSCTGNRCFFIKHHVANVIVDKSEFSVLNKIEKAETDEMIKEICVPIKIDRLGNIVKIGVYK

SEQ ID NO: 3474 - protein, 1100 aa, unidentified
  REGION 1..1100: note = Description of Unknown: Cas Enzyme sequence
MKKILGLDLGTNSIGAALINVPKTIADFGKKGNIEWLGSRIIPMDGFVRSTGKSLRQGETPLNAFSKGVGISKNAARRMKRGSRRLKQRYILRRTRLIKVLKILGWLNESFPENFKDEMRNNENFKFRISDFLPCNEETIEEAKEFLGTKNNKGIIKLPEDWIVYYLRKKGLKEKLSFTELARVIYMMNQRRGFKSSRKDLKDESTEEKKWVEILKIKSVEQETFELNKNKNFKFKVIPYNENIQPWTVEKKKKPEWEEKEFTFLITEKYKRQADGSLKFEKQLTPQLPKEDDWDLCVTAQDNKMGNKFPGEYFFDGLVESVKNKTDFKIRQYAVYRKKYKAELEKIWETQLELNADLRNINNDKNLLKKLAEILYPKQTELGNSKLKEILSHDLLYLISDDIIYYQRELKSQKNSKSECKYEKKKGIDGEYYGLKCTPKSSPEFQEFRIWQDIHNIKVLQRDGTKTKTLKNGETKEFDIVDIDVTANFVNDDVKEKLFELFDSSKEVSQKQIIDVINLENSKNKISDKTHRINMFFDGKEKLLGNETKDYFRKLFKKCNYEIEGEKVLSDREKFYRLWQISYSISLNDEEKSKFAITKALSEKINKRGKEKKITFDFPPNVVEAIANAPEIETTKKYASYSSKAINKLLPLMRCGKYWDETLIHNDIKKKIENIKLRLDSINHNSKKIQSVSDDEIPQQILTSFINQENCLSGLKTYQACYLVYDRHSERTDFTKYSTPQEFDIMKLLPNNSLGNPVVEQVIRESLFVVKDLWQKYGQPDEIHIEMSRDLKKNAKEREKATKNSTSNSEEKQRIKALLKELMTGEFEQYVNDGDEKDENGEYKIKKERNEFITKPNPESPVDIDKFRLWKSGVNDADYENGKKWDTIVKDKEIKKYALWLSQKCVSPYTGKIIPLSKLFTDEYEKEHILPRGLIKYDSNENLIIAETGVNKAKGRELAAIFMANKNGSCEYGNQKYKLLDYDRYVEHCKRTFKGKKLKNLLATEIPDDFISRQINDTRYISRKISELLYPVAKGNPNVTTDSEKGGIVFTIGTITSDLKNEWGLTKVWKQLMKPRFERLEKLNSRKYIFDNENDRNDFH

SEQ ID NO: 3475 - protein, 1465 aa, unidentified
  REGION 1..1465: note = Description of Unknown: Cas Enzyme sequence
RKKALYKPLTKEELAWVILNFNQKRGYYQLRGDKNIEEKDGKIIETVEESILSVEKINKNEYKVTLPDDTEYIEKNRTQISFKGEKRLVKHITATKTDRKTKEKYIDKYKQVVYLITSKVIEVINTNETIKRNNNINKKYKVFLDNGLSFIKENNINNELNWTGKEKTVLLTYTIKNNKQSLKITAPEDTDWTLMKLKNEQDLNNSGKTVGEYIYDTLLIKPNQKIRGKLIKTIERKYYKEELDKILTKQIELQPELFTNELYEKCIFELYPHNDAHRNNIKQKDFKYLFINDIIFYQRPLKSKKSTIGGCQYERRSYWKTVTDENTGEKTKVFVKDEPIKAISKSHPLYQEFRLWQFLKNLKIYKKETQIEGKTKINYDVTDELLKNDEDWVKLFDFLNDKKEIEQKQIIDFFVKQNLIDKKDKDNYRWNYVEDKKYPANETRATFLSRLKKVEGFDIQQFNDKFARNLWHIIYSVKDKTQYEQALKTFANKNNLNENSFVENFKKYPPFKSDYGAYSEKALKKILPLMRIGKYWDEQAISQEVKDRITNIMERVNAFNLPDKPKKEDVERAFEKVSDDDIPRPLIKSFIPFRTKNPYTGLNTYQACYAVYDRHSEISEVTRWTKPEDIDEYLKNFKQHSLRNPIVEQVVTETLRTVRDIWKEYGNFDEIHLELGREMKNPANKRKQMTQRVTENQNTNERIRLILKELMNDGVEGVKDYSPSHQEILKIYEEGIWQNPDAKYDELSEDDIMKIRKNQSPSKQKSTPTKTDIQKYKLWLEQGYISPYTGKTISLTKLFSTDYQIEHIIPQSRYFDNSMNNKVICESEVNADKSNKTAYEYIKEKGGSIVDGHQLLTLEKYEAHCKRYFKKNRTKLKNLLSEDILDSFIERQMNDTRYISKFVKGLLSNIVREEDEQEATSKNLVPITGAITSQLKQDWGLNDIWNEIILPRFERMNKLTGSNEFTTLNTQGKTIPNVPEELKKGFSKKRIDHRHHALDALVIACTTKDHINYITSINSERKNYSLVSKLRKIVEIQKKDKTTGKITNIKVPSDYHKPWKGFTVDAKNTLEKTIISFKQNIRVINRTNNKYWKYVKQNDGSYKKQLVEQKGKNWAIRKPLHKETVSGQVFIKDKKTVAFNIKLLEKLKNEKLDEKYILTNNKLHRKIKELEKKHYNPKQIVAYFKREKYKFEGENIKKVEVYFFKKATATRTELTDKFTKKHLESITDSGIKKILENHLKNYTNEKGERDFKKAFSPEGIEELNKNIQELNDGKPHKPIYKVRIYVESSKFPVGEKKPVNRKKYVGAAKGTNLFFAIYETEDKNGQKIRTYETIPLNEVIAHQKWRAEQPKEEQKNIPMIPISSEKGRFLFSLSPGDLVYVPTDEEIENPNLVNFGNLTKEHIKKIYKIVNFSEKRLYAIPNSIATVIYNKVEYTSHNKIEFIKEKDICWKLKTDRLGKIIKVIK

SEQ ID NO: 3476 - protein, 1136 aa, unidentified
  REGION 1..1136: note = Description of Unknown: Cas Enzyme sequence
MGTTSIGWALIENEVILASGVRVFPEGVNRPKGSYEESKNLTRRLARQIRRQYFRRRMRKSILIKILKQHEMYPHPDGLLAWNALNPYELRAKGTEEALTPLEFGRVMYHLAQRRGFKSSLKGSDNEEGKIYDGDLKLLKKGISATQNAVVSGGYPTLGSYLNSLDTTEERIRNRYTLRSMYLHEFEVLWNVQATFNPQIYTQELKDKLGHEKEGVLFFQRPLKSQKGLIGKCTFEPGKTKAPSSSPLYQEFRAWQFINNLQYGDNQLLSPQQRELVFREMSTKMTLKISQIKKKLKLNEEFNYDDDTSAPCMTTICQIQNLFGDKIRIDNPKEVQDLWHLLYDAVDPEWLIQKIQIKYGLSPDEATTVGKGKKRIRLEEGYGNLSLAAIRRILPFLRMGKKYHTSTLLAGVRKVLGETYWSTLNELDIQSLIDCVHAAIDSKGNGTIKDRLWAYLNAEFSIDPKWSAKDLYHHSDLDHQQDLLDLLPEPKNLRNPIVQQSLFELRSLVNTILKKYGKPDRIALEMARELKSSKKAREEMLDKNRKREKQRMEIKQRLIEESIRPTGANITKYLLWEECQKQCPYTGNTISRQDLFNDGIWQIEHIIPYSISFDDSFNNKTLCFADTNRDKGNRTPYQYLSFSPASWEDVKSRAKHLFCNKNSYPKFLKFINEHTPKADDFQARQLNDTRYMAKEAKSYLAKVCANVLVTPGGVTADLRHLWGLNAILAPPIRTHFDYEGFCWLITDHHRNPLRFEPWDIAKVSKIEERLSKEGVVWEGEIRDHTFYSFKNRDDHRHHAVDAITIACTEQRYVKAISSYNSLDQKFSRPVFDQPWPAFFEDAKASIESILVSHKSRNRLVTKRTVRQKINGQKVIHHYSTPRNQLHEETFYGQVLDPNLQEKKYTTRKPLSSITKVKQLKGITDKGILRLIEDRARELQIDLGNKDTELPKNFFFEHNEEGMPIPTLYLPGPEYGRPVPIRKVRYRVDSSNMTLRNKLTDQYAEPGKNFIAAVIEGAQGEWREEIVSFWTAVLRHKANQPLVNLNAGEKLLYSFQANELYLINLPESISIPEIPTKILSQHLYRVQKFSSQFYVFRLHNASTINYDNESVSMRSFGSIKKTNPIKVGIDSTGNLII

SEQ ID NO: 3477 - protein, 1144 aa, unidentified
  REGION 1..1144: note = Description of Unknown: Cas Enzyme sequence
MKVIGIDMGTNSIGWAVIEDQKILASGVRVFPEGVNRPKGSYEESKNLKRRLARQIRRQYFRRRLRKATLTKILKAHGMFPDEQGLAAWAGLNPYLLRAKATEEQLTLLEFGRVMYHMAQRRGFKSSLKGSDSEEGKIYDGDLKLRKPGITATQQAIKSEGYASLGAYLNSLDTTVERIRNRYTTRKMYQHEFEVIWDVQKSFDPQTYDSALYDLLGHEKKGVFFFQRPLRSQKSLIGKCTFEKGKPKIPISHPNFQEYRAWSFINNIRYGNNEKLTKDQNQVVFNEMLTKATLKMSQVKKKLKLQGEEFNYDDDTLVPCMTTMVQLTKHFGNKIDFTNAKELEDLWHLFYHAEDPEWLTSKVHAKYHLDLESAKAAAEGKPRVRLDEGYGSLSSAAIKRILPFLRMGIRYDLATLLAGVRKVLGESYWGSLNENDVQALIDNVRHALLAKESGKLRERLWAYLSSEFTIDERYSAADLYHHSDLDTQQDLLEALPEPKNLRNPIVQQALFELKSLVNALLKKFGPPDRIALEMARELKSPKKVREKMLDDNRKREKQRMEIKQNLISEGIRPSSANITKYLLWEECGQQCPYTGMSISRQNLFDDGVWQVEHIIPYSISFDDGFNNKTLCYADENRSKGNRTPWQLYNFNPNKWEEVKARAKHLFCNRNSYPKFLKFVNESDPKADEFLERQLNDTRYMAKEAKSYLAKVCRDILVTPGGVTAELRHLWGLNGILAPPIRTEYAYEGLCWLVTDPNNKPLHLEPWEMSKAGKIEEKLSKQGVVWEGELREGTFYSKKIRDDHRHHAVDAIAIACTERNYVQKISAYNALDWRFPRPAFEKPWTNFFEDAKDSIESILVSHKVRNRLITKRTLRQRINGKKVVHHTTTPRGQMHEETFYGVVKDPASGTDRFTTRKPLASITKVKQLKGITDSRILGLIDERARELGVDLTNKDLELPKNFFFEYSEEGIPTPTLYLPGGTYGRPVPVRKIRYRVESGNMKLRNKETNQYAEPGNNYMAVIIEDAQGNLREEIVSFWDAVTRQKEGLTIVSLLEGEKILYNFQANEMYIFNIPEGIRWQDLPAKTLSKHLYRVQKFSSMFYVFRLHNASTLKYENEFIRIQSFLALKKINPVPVSSTYFGLNDL

SEQ ID NO: 3478 - protein, 1539 aa, unidentified
  REGION 1..1539: note = Description of Unknown: Cas Enzyme sequence
MTKILGLDLGTNSIGWAVVDKEGQSIIDCGVRIFPEGLVKDTIGQGDKEVSNNAARREHRQARRQHYRKRLRKVKLLQVLIDLQMCPLTIEELKVWKNWNSKMKSEGFKFPDSQPFRDWLKMNPYELRTRAVNGLITRMELGRIFFHFIQRRGFLSSRKGSDDGAIYKGKDKMTGITATQKLVGNETLGVVLNKMMQVPGKSYERKLDQEGKEIRIRSRYTLREMYIREFEEIWNRQASSLGLHNSEIVVFKKRYFEGLAESGQNKKRYRKLLDKYGRDNVTVRKGFFEVRTFLSLKEYFAGNIIITSSDIRFNSSESLLFWQRPLRSQKGLLAKCSFEGRKFYDQYHGKWIQTGPTPCPLSHPDYELYRAYQFINNIRYGKSGLTLNESYRLQVLKLINENDKNFDFEKIPKTLKLTYEQFNYDSSHKVPGNITHKRLMQFFSEELWQRRREEIWHDFYFYQDKDLLTEKLMKSYGLEESKARKASEVKLTEGYGSVSLKAVRNILPFLKQGYVFSTAVILGGVKNAFGSRWEYFHNSHDEIIKKTVYLIEKEEHKEYELIKKIKEMLGNPDNQYGFTQDDKAFRKLYHHSQDIEKKVLNTKISDLENLRNPIVQKGLFEMRRLVNALLEKYRGDDAFGKDFRFDRIQVELARDLKSSKSIRQDMLFKIMKNEKENDEAREKVIEFGLKPSRENITKYRLFREIEARHGTAVCPYTLRTISVKDLLGRDNLFQIEHIIPYSISLDDGFANKTLCESNFNREKGEKTPYEFYLVNNDPKLWKANSWEEIEQRTFAILPYNKARRFNARKKFASEGFIERQLNDTRYISKKATEILSEICDDVRVLPGQLTAELRRLWGLNNVVQEITPLNLEGIRVYANESVPHYVILDENQKPVSAHAMINLRPDTIADQILLAGKVNDKGEFEAGSSWKNLGFHCRVDHLSPGRYWAKIRVAEPLEFNRVFTVKPDQGPDEIIYKGKVERGIFVHDSLPRKLKTNQEDGSYWVRFKVGKVNFVRPEPETQPATRLNQVLLYGIVIDNQFKSYIYQCECNLEPGKYWAVLDIEFESAEYTRAVVTPPSPSENEIVIQGSVNESGLFTADIDPSYIKSSGKKPGKYFTILEILRLEDFHPIVNQPPEITKDQTLVEGNVWVNRQTGEIMFDPKKNREDQRHHAVDAIVIAFTELSNLQRLSHYFGALKARERGLSDRPDFPQPWPGFGMDVSRAVGGILVSYSRNSKVLTKISKVIMKDGKKYQSIGFAARGRLHREYYFGRHPKPVLKAREKETGELLFETDKHGSTVYYYHIRKPISSIENHKHVQKIVDEGIKNLITGRLRNEYNIDPDKAYKIPENFFFDREGNPLLLLPNKGGGDPVPVRKVRMRELMANAVQLKKGMNQWVNPYNNHHVVIYLDHNGELKESIVTFWEVIERMQQGQEIYQLPNDGKVVVTTLQENDMFLLNLPEAIIETISDGKLERHLISRYLYRVQKISSMYYTFRHHLASSPNNENEEYRIQSFIAWQNANPIKIWMNELGEYRLFSIE

SEQ ID NO: 3479 - protein, 1225 aa, unidentified
  REGION 1..1225: note = Description of Unknown: Cas Enzyme sequence
MSDKTLGIDLGTNSLGWAILDDITGDIKDKGVLIFPEGIDPNNDTLETPAALRRAARMGRRMKFRRKIRKWILLKILIENKMTPLTEEELARWRKEGVFPLNNKAYIEWLHSSDLSNPYADRAAAASGKVDPMTLGRALYHLAQRRGFKSSRKDADAQGEETDKDLGKVKGDIARLTDEIAAAGCKTLGQYFNKILETNKSKKVKERIRARYTGRIEHYEAEFAAIMDAQGFVPGDDFREKVHEAIFYQRPLRSQKHLVGSCPLEPDHPRCRIAHPAFEEFRTLAFVNNLRLVQTNGEGEKLPLPKEYRPAVLDCFCRKSNFKFGTIMKKLGKELKKTGMEFYYHTAEEVMTANTVSCSLNETFDNKKYDAQALFDALSFFDDEAKLRQWMLKHFNKKANEGIDKEIRPRLLVDGDLTEEECDKLAKIKIKDGYAKYSLKAINKILPFLRMGRNLRHALLLAKLPDLMENWARDGEAVMRRLDEIGFEYRQEKERYEGHKLPDDFINLSDREENCLRFEFGVDDAMWSKLYTNCESKYIGQKTYKNGKGEIVKPVTPRIPEVKLGMIRNPLVQRSMTMLRRLVNHLSGLGKIDKKTTIRIELARGVNNLAKRNAIKKWNIERAKLREEAREEIAKLSIKPTEEAIDRYVLWKEQDGKCLYTGRQIRITQLFNGNEFDIEHTIPRSLSGDDSLANKTICDAVYNRQVKRGQVPSQCPNFNEVSAQWGSAIKVNLKPWEEKVELLKAAYQKQRGRAKGCVDAVSHNKAQEKANLIELELDYWRDKLNRFLVKPEKLSSEEGKLNGFKRRQLVDAGIMSAHAVELLESVYDEVYAVNGAATAFARKAWGLQGDEAKDRTNHTHHAKDAMVIAALTPSRFNAICSALKDDGTIHPRPCDVCPAPYENFAEKVRKAAEDILVKHVLRQTTLKQSSKRNVLAKSHVNSKDPSKVVSAVLSRGDTVRGQLHKETFYGCIMKPGSEDKAFVVRKSLIGPVKNAKALIDKIVDPAINAIVADAIARLEQSGKTNVEPGDIRMSSGVPVNKVRIYAHKDTCNELRNHTMPSTKPYKNPYYVESGTGSNFRLAIFDNPPDAKLDNSLYWAQNHKKADYMPCNKKPGFVGYVYPGTMAFTHDGDKRGHLYKVVKFNYIGKYPYITLRLHSEARAAKDLEKELPAIGKNKKGESKIDFENPHEMLLIGPKVYLKQIWFEGIHFNMELDGTVRFRQSIK

SEQ ID NO: 3480 - protein, 1251 aa, unidentified
  REGION 1..1251: note = Description of Unknown: Cas Enzyme sequence
VKRTLGIDLGSNSLGWAILDDITLDILDKGVVVFPEGVDLDAGSSLDTPAAARRAARMGRRMKFRRKMRKWHLLKCLIEAGMCPLSLAELALWQKKGSYPLGNRAFVEWLKATDVSNPYCDRDAASRGKVAPLVLGRALYHLCQRRGFKSSRKDEAALVDEETGELKREDKATGAVKGDIAALTKEIRDAGCRTLGQYFFKRLESEKRSPAKTRIRCRYTGRLEHYEVEFAVIMDAQGLREGSDLRERLHEAIFMQRPLRSQKHLVGNCPLEPRNPRAQLGHPAVEEFTLRAFVNNLTLEDEDGNYRDDDGNFLYPLSPVDREAIYAAVASVKKPTFKTLKKVFKKDVRFAEQKLRFHYYDEDDSVPSCPTRTRIAEAFGSVAYDEQGVFDALTFYDDTEMLKGWFRRHYPELDERSIARLVSIHPKEGNASYSLKAVKRILPFLRRGFELSHARFCAKLPEVVPNYGQRAEEVLLRVEETYRQHRREKRERAALPEQIRKNMSDLPTLHERYAAMLRDEFSVPNDKFMRVYLRNDDTYVPTEISRRDEQGQVARDGKGNPIFVCDKDGKPRLRLPPVQLGMIRNPLVQRAMTTLRRLVNYLAEHGKLDVDDTIRIELARSVNDFATRKAYQEWQSGRAALREKAATEIAKYGKAVTEDALERYLLAEEQGWTCLYTGRKIGIAELLDGNAFDVEHTLPRSLSGDDALVNKTICDAAYNRQVKQGRVPKDCPNWDSPLNGCGAIEVMLHPWREKLEELEKTYRNQRNKAKGISDPSAKGKARVKALVTKMERDYWRDKLRRFDMPMDKLSAYAGEGMGFKRRQLVDTGIMCSHAVDLLKCLYPKTFAVNGAATAFARKAWGIQADEAKDRTEHTHHAKDAMVIAALTPARFTSICTALKDDGAQSARGRECDVCPPPCAGFADKVRLAADEILVKHILRQTTLRQSMKRTALAHAHPQKDDPARIVRHVLSKGDTVRGQLHKDTFYGCIMDPMSASLQKVVRKSLVGPVKEAESILDKIVDPAIRSIVAAAVASLKNRGEKYIEAGDVKMPSGVPVNKVRIFMPTATNAWQLRDHTMVSEKDYKRPYYVTSAEGSNFRLAVFDVGGKFATKPDNSLVWAQNHKKDDYVPYDRQNGFVGYIMPGAMALAHAEGNPAELKALSKSELVKRLYRVVKFENNGRMTLRRHIEARASVVLSKDLKSAGKHAAGESKIDLLNPHELLLVSPGVYGNQMLFEGIHFKMMLDGSIKFLD

SEQ ID NO: 3481 - protein, 1224 aa, unidentified
  REGION 1..1224: note = Description of Unknown: Cas Enzyme sequence
MNRTLGLDLGTNSLGWAILDDLTGDILDKGVVIFPEGADLDAGTSLETPAAVRRAARMSRRMKFRRKLRKWTLLKVLIDNKMCPLTLSELDDWKKNGKYPLTNKEFIKWLKSTDTENPYCDRSAAADGKVDSLVLGRALYHICQRRGFKSSRKEEAAQVDEATGEIKNDDKKLGAVKGDIAALSREIEECGAKTLGQYFYKRLEEEKGAIAKSRIRCRYTGRIEHYEKEFEVIMSEQGIKPSSDLYHSLHNAIFQQRPLRSQKHLVGNCPLEPRSPRAQIGHPAFEEYRMLSLVNNLSFENEDGEYRDADGNFLYPLSAEDRAKVCEEFYKVSSTFKFGSVVKKFKKHPAFQKGWRFHYYREDDTLPTCRTIQMMRNAFGDVDFNVQMVFDALMFYNDTDLLKGWFRKHFPKLDDAAIEKAVRIHPKEGNANYSLKAINKMLPFLRKGFDLSLSRIFARLPDVIPEFSKNESMIIGGLTEQLMNYRKDKRHYAELDSSIRKVTPKPKLLLDRFHDYLLEWGLTEDGWKRIYLKGDEQYSAETEYKCKGVIKKLNHPRIPAVNLGMIRNPLVQRSMTTLRRLVNYLGDHEKIAEDDTIRIELARSVNDFATRKAWQEWQNSRKLLREEAETEIVKLGYSVTEDAVERYLLWKEQGGVCLYTGKSIPVAKLFGGNEFDIEHTLPRSLSGDDSLANKTICEASYNRATKKGMVPRDCPNWEEIDVRLRSWRDNLESLEKNYRNQVRKAKGVTDPEAHSKARVKALVTRFELQYWRDKLRRFDMSVDKLTAREGELSGFKKRQLVDSGIMSSHAVELLKSVYPATFAVNGAATAFARKAWGIQGDEKKDRTEHTHHAVDAMVIAALKPSRFTAICTALKDDGARRVRECDVCKSPWPDFAEKIRAAREEILVKHVLRQTTMRQSSKRNVLAKSHPSKSEPGKIVSAVLSRGDTVRGQIHKDTFYGCIMNPEDGKKAFVVRKSLIGPLKAAEGIVDKIVDPSIRDIVDAAITDLKANGVKNIEAGMIKMPSGVPINKVRIVAQTTNPSELRNHQMPSDKDYKNPYYVTSAEGSNFRMGLFMVDGKFSAIPDNSLDWAQNHKANDYVPLDQKPGFIGYIKPGSMAMICEEGNVDNVRDLSQKDLVKRLYKVVKFRSDGLVTFRYHSEARPSVVLSSDLASIGKHKAGESSISLNNPHELLLLSPGVYFKNMLFEGIHFKMIIDGTTKFIK

SEQ ID NO: 3482 - protein, 1207 aa, unidentified
  REGION 1..1207: note = Description of Unknown: Cas Enzyme sequence
MEKTLGLDLGSNSLGWAVLDDLTGDVLDKGVVVFPEGIDAANDTLETPAAIRRAARMARRLKFRRKIRKWQLLKVLIAHGLCPLTQEELDAWKRNGVYPLGNKAFLDWLKATDASNPYCDRAAAADGKVLPFTLGRALYHIAQRRGFKNSRKDAPAETDGEDGTKKPSDKKLGAVKADIARLTDEIAASGAKTLGQHFFRLLESEKGCLAKTRVRCRYTGRLEHYEKEFAVIMDAQGMKEGDALRKQLHDAIFAQRPLRSQKHLVGNCPLEPACPRAQIGHPLFEEYRMLAFVNNLSFDDANGERCELTAEDRALACRAFMKASPTFKFGDLAKLFKKDPRFKTEGYKFHYYRDDESVASCQTLHKLRTAFGETPFDVQKVFDALTFFDDDEKLRGWVRKHYPSLDEKAVAKVAAIRPREGNAQYSLKAIRLILRFLRQGFELSQARFYAKLPQVIPDFEAHEAQIIGNLREILFVYRRDKAELANDSDRRDRKVTPLFDRYRAYLLEHWNVDDDAWKKLYLRGDAAYRASETGRLPKVELGMIRNPLVQRSLTTLRRLVNYLHDHGKIDAETAVRIELARNVNDYATRKAWQAWQKTRQERREDAKRELGKIGVAATDDALERYLLWDEQGRVCLYAGKTISLADLVGGNAFDVEHTLPRSLSGDDSLANKTICDAAYNRQIKKGCVPRDCPNWDEIDVRLRPWRENLERLEKDVRSQMRAAKNAVDPAARSNARIKALTTRFERDYWRDKLRRFETAADKLAVKAGELGGFKRRQLVDTGIMCSHAVELLRSVYPATFSVNGAATAFARRAWGIQADETKDRTDHTHHAKDAMVIAALTPARFTAICTALKDDGQASYRRPCDVCPPPYAGFAEKVQKACGEILVKHVVRQTTLRQSSKRNVLAHAHPLKGDPNGPMVSKVLSRGDTVRGPLHKDTFYGCIRDPASGALKKVVRKPLVGPLKNVEAILDKIVDPTIRDHVAKAVAALKAAGVKNVEPGAVKMPSGVPINKVRVFAPNATNAQTLRAHPIPSAKDYKTPYYVVSAEGSNFRLAIFRTEDGKASVEPDNALLWAQNHKKPDYVPLDRKPGFLGYVMPGTMALAFHEGHPEELETLSQGELRQRLYKVVKFESSGRITFRFHTEARAATVLASDLKDSGHSKSGDSRISFAPPSALLYLSPSTFLGQMLFEGIHFRMALDGTITFIKE

SEQ ID NO: 3483 - protein, 1290 aa, unidentified
  REGION 1..1290: note = Description of Unknown: Cas Enzyme sequence
  MOD_RES 1215..1221: note = Any amino acid
MITNPPYGVKGVTMGKTLGLDLGSNSLGWAVLDDVTGDVLDKGVVVFPEGIDAANDTLETPAAMRRAARMARRLKFRRKVRKWQLLKVLIAHGMCPLTQEELDAWKKNGSYPLDNKAFLSWLRATDASNPYCDRAAAADGVVAPFTLGRALYHIAQRRGFRSSRKDAPSEVDEEDEKKVPDKKLGAVKADIARLTEEIAASGAKTLGQYFHRLLEAEKGRPAKTRVRCRYTGRLEHYEKEFAVIMDAQGMQEGNPLRAELHAAIFTQRPLRSQKHLVGNCPLELACPRAQVGHPLFEEYRMLAFVNNLSFDDANGNRRELTAEDRALVCRAFMKASPTFKFGDIAKLFKKDPRFKSEGYTFHYYRDDESIASCQTLHKLRLAFGETPFDTQKAFDALTFFDDDEKLRGWVRKHYPSLDEKAAAKFAAIRPKEGNAQYSLKAIRLMLRFLRQGFELSQARFYAKLPQVIPDFDAHETEIIDNLKALLFEYRRDRAELADERFRRDHKVTPLFDRYRAYLLEHWNVDDVAWKKLYLRGDAAYQASETGRLPKVEMGMIRNPLVQRSLTTLRRLVNYLHDHGKIDAETTVRIELARNVNDYATRKAWQNWQKKRQELRETARTELARLGVAATDDALERYVLWEEQGRVCLYTGKTISLTDLVGGNAFDIEHTLPRSLSGDDSLANKTVCDAAYNRQVKKGCVPRDCPNWNEIDVRLRPWRENLERLEKDVRSQMRAAKNAVDPVARSNARIKALTTRFERDYWRDKLRRFEMSADKLAVKAGELGGFKRRQLVDTGIMCSHAVDLLRSVYSATFSVNGTATAFARRAWGIQADEAKDRTDHTHHAKDAMVIAALTPARFTAICTALKDDGGASYRRPCDVCPPPYAGFAEKVQRACGEILVKHVLRQTTLRQSSKRNVLAHAHHLKGDPNGPLVSKVLSRGDTVRGPLHKDTFYGCICDPASGTLKKVVRKPLVGPLKNAEALLDKIVDPTIRAYVTEALAALKAAGVKNVEPGTVKMPSGVPINKVRIFTPNATNAQTLRAHPIPSAKDYKTPYYVVSAEGSNFRLALFRVDGKVFVEPDNALVWAQNHKKPDYVPFDRKPGFLGYIRPGTMALAYHEGHPEELEALSQGALRQRLYKVVKFAGNGQVTMRFHTEARAATVLEASLVASGFHKKGESKLNLDDPFRLLRVSPKVYLGQMLFEGIHFRMALDGSITXXXXXXXPHDSPHAFLLVARQAVCQGRATGLRGGGWRAAVVPDRGSRLYHSRNGSDDGFVPLHPAAGRRQCGACRL

SEQ ID NO: 3484 - protein, 1179 aa, unidentified
  REGION 1..1179: note = Description of Unknown: Cas Enzyme sequence
MKTLGLDLGTNSLGWAVINEAGFENTGVLVFEEGIIREKGIDSLKTPAALRREARMARRLRFRRHLRRRLILKILIEQKMCPLTQEELKMWSQTGIFPKGNVAFVEWLKSTDTRNPYCDRARAATEKVDPLTLGRAIYHLAQRRGFKSGRKDQPAEDEETNTSKAKEFGEINGNIARISAELEKSGLTLGQYFFNEIKAGRKVRKQHTGRVKHYEKEWAKMAAVQELDKTLAEKIATTLFWQRPLREQSHLVGKCPLEPKRNRAQIGHPDFETFRALSFVNNIRVLDGEMRTPLTAEQRAVAADCFIRKSPFEFNDIAKKLRKQFKALADARFNYEDDNPSPSPSKVTADLNGILPDSTDAQKAFDALTFFDDDEKLKTWAQNEIGLSEEDSARFVNIRIPEGRAGYSLHAIRKINRFLRKGVELSEAIFLAKLPDAIPDFGAKEDGVIAKVHEHNELYRENKQAAYRDTRTENRIGVLSLEKRLRSWLAEDYGIGNDTFCTLYFRDPKADSSYASVKSGGTVLPPVNLGMIRNPLVQRSMTMLRKLVNELRRNGTIDADTRIHIELARDVNSRNDRMAIQEWQKKSEKERADAKAKLQEHGIAEPAEDLILKYVLAKEQGWLCPYTGKHISINGGGSLFPGFDIEHTLPRSRSGDDAQANKTLCDIAFNRDMKKDRMPSELSSHDEILARLRSWLDKIEELKKLKEKQAKIAKGVSKENPEARSRARQKMLATKLELKYWEDKYYRFTKKPEDVTPSFINRQLVDTGIMTRHAVALLKTVYPDVYPVNGQAVAFARKLWKVQGEDEGKDRSDHTHHAKDALVIAALSRDRFQKICAELKADDERKNPKFNVAPPFAGFAQAVYDATAAIPVKHVTRHNELKRTHYTSKRLSGLTKGKDGKPITRAPAKGDTVRGQLHKDTFYGKIRLPGKTEIVCVIRKELSSANFKSADTLETIVDPAVKARIKAIIATRGDDFKKAIDQGGFTMVSGVPIKKVRIQDRIRNPLPLRDHAATPSQQGYKNPYYVATGENSNFCLSVYRKGTEAPHFIVEKLLPFVQGGIHPPSEGVCRIGRILPGAMAIAYQRFGEWNEPDFPFEKRLYKVENFSDSDGRMILRFHKEARRMTDIDEAKQSSVDFERPHALLRLSFKKAWSTFRFEGVHFAMGLDGAVTFIDRETDA

SEQ ID NO: 3485 - protein, 1208 aa, unidentified
  REGION 1..1208: note = Description of Unknown: Cas Enzyme sequence
MQSDKTLGIDLGSNSLGWAILDNITGDIADKGVLVFPEGIDPANDTLETPAAIRRAVRAARRMKFRRKIRKWQLLKDLIKNGMTPLNVDELLEWKNNGVYPLSNQAFIKWLKSTDTSNPYLDRANAASGRVDKQVLGRALYHLAQRRGFKSSRKDAAGADEDASAQDKELGKVKGDIAALTAEIKAAGCKTLGQYFAKVMEENKNSPCKERVRKRYTGRLEHYETEFAAIMEAQGYTADNQARKDLHRAIFYQRPLRSQKHLVGGCPLESGDVHSKKHKVPRCQIAHPLFEEFRMLAFVNNLSLEDEDGNRFPLTSDDRAKVVECFYRKSSTFKFSVIAKKFVKAFKQNGLKFHYYSDADTLAASNVTHQLNEVFGETPYDRQMVFDALTFFDDNDKLIAWAHKHFPALDDCACKKLAAIHPKEGNANYSLKAIRKMLPFLRKGYKLYDALLWAKMPDLIPDFAAKESEIKRRLDEIKFAYEEERTDERPGRNAPKLKRLEERYQDYFADEFGWSEAEWSKLYINRTSAYRPQISYKNNEGKMVELETPRIPKVELGMIRNPLVQRSMTTLRRLVNFLADHGKIDERTTIRIELARTVNDFATRTAIKRWNQKREALREEAKAEIAKYGKAVTEDAIDRYLLWQEQEGVCLYTGEQIKIADLLEGNRFDVEHTIPRSLSGDDSMANKTICSAKYNREVKQGRIPAECPNYEEVMGRLRNWEEHTAQLEKDYRSQRGKVKGMMEQAARSNARIKALSTKFELDYWRDKLRRFKVTMEKFRENDGGLSGFKRRQLVDTGIMSSHAVELLKSVYPLVYAVNGTATAFARKAWGIQGDEVKDRTEHTHHAKDAMVIAALTPARFNAICAALKDDGVVQPRPCDVCPEPYPDFAEKVRKATGGILVKHVLRQTTMRQSSKRNVLAKAHPAKSNPGKIVSAVLSKGDTVRGQLHKDTFYGCIQKPNQEARAYVVRKPLVGPVKAAKAIADKIVDPAIKEIVTQALAQLEVEGKNNVESGDIKMPSGVPINKVRIYAHVSDPNKLHDHAIPSAKEYKNPYYVESGAGSNFRLALFDIDGKPSVRPDNSLDWAQNHKKPNYMPYDKMPGFVGYIMPGSMALTHDGDKIGHLYKVVKFSGDGRVTFRLHTEARMSVVLEKELQAIGKNKKGESKIDFVNPHEMLLVSPAVYLKQMYFEGINFKMLLDGTIKFLDKKE

SEQ ID NO: 3486 - protein, 1185 aa, unidentified
  REGION 1..1185: note = Description of Unknown: Cas Enzyme sequence
MNKTLGLDLGTNSLGWAVLDDITGDILDKGVVVFPEGIDAANDTLETPAAIRRAARMARRMKFRRKLRKWALLKVLIDNGMCPMSKQELEAWKKSGVYPVENKAFVDWLKSTDASNPYADRAAAASGKVSPLVLGRALYHIAQRRGFKSSRKDAADDGAEDKDLGVVKGDIAALTKEIADAGCRTLGQYFAKHIESERNNSCKKRVRTRHTGRVEHYMTEFAVIMEAQGIDHDSDLYKSLYRAIFLQRPLRSQKHLVGSCPLEHGNPRAQIGHPAFEEFRMRAFVNNLSFRNTATGERVPLTAEDRELACSAFMKESPTIKFSAISKLFKKKFKSEPLDFYYYKSDDTMSSCSTRCKIKNGFGDIPYDEQKVFDALTFFDDDEKLKAWFKRHYPALTDEHIERLVKIHPKEGNAQYSLKAINKILPFLRKGHDLFTARLLAKMPDIVPQFAEHEDEIVLHIKEMEIKCRASREAMRSEAIRREGKPLRLMDLCRDYFLTEWNVGDKAWNKLYLHGDSQYEADPKRPGRIPAVQLGMIRNPLVQRSMTTLRRLVNYLREHGKIDGDTTIRIELARGVNDYASRHAIQQWQKDRAALRDKARSELGTNPSEDLVDRYILWEEQGRMCLYTGKSISLTELLSGNSFDIEHTIPRSMSGDDSLANKTLCDAKYNREVKKGMVPTDCPNYESEIFTRLAPWREKVEELEKTYHSRKNAAKAATDPQQRSNARVKAIRTKLELDYWRSKLKRFEITSDKLVDPENGLSGFKRRQLVDTGIMSSHAVELLRSVYPSVYSVNGAATAFARKAWGIQGDEAKDRSEHTHHAKDAMVIAALTPSRFNAICTALKDDGRSADIRPCDVCKPPYDGFADKVRKAVDEILVKHVMRQTTMRQSSKQNALAKAHPQKSDPSKIVKFVKSQGDTVRGALHKDTFYGCIARPDDGQKAFVVRKPLAGPIAAIESLSDKIVDPAIKSIVETALSELKAQGVKSLEPGMIKMPSGVPINKVRIFANTANPMLLKGHTTASDKEYKTPYYVTAAEGSYFRLGVFGLAGKLSVKPDNILTWAQNHKREDYASLDQQEGFIGYISPGTMAIVKASDGTDIEKLPNSALRKRAYTILSVGGEGDNRAQFRYALAAGMKKDLGGLASEYSLANPPLLMRMRPNKFLSTMLFEGIHFKMMLDGTIVFLK

SEQ ID NO: 3487 - protein, 1185 aa, unidentified
  REGION 1..1185: note = Description of Unknown: Cas Enzyme sequence
LGTNSLGWAVLDDITGAILDKGVVVFPEGIDAASDTLETPAAIRRAKRLGRRMKFRRKMRKWSLLRVLIEQKMCPMKLSELEAWKKDGKYPVDNAAFIAWLKSTDKTNPYADRAAAATKKVALEVLGRALYHIAQRRGFKSSRKDAGGCEDEAKDKDLGVVKGDIAALSQEIAASGCKTLGQYFAKCIEEQKDSPEKKRIRTRHTGRLEHYQVEFDAIMKMQGLADNPIRGRLYEAIFMQRPLRSQKHLVGSCPLEPQSPRAQIGHPAFEEFRMLSFVNNLSFEKIETHERMPLNAEDRAMVAEAFMKASPTMKFKDISKLFKKRFVAEGLKFHYYRDDETLPCCSVRHRLKSYFGDVAFDEQKVFDALTFFDDDGMLGRWFAKHYPTLDDSQIRRLCAVHPKEGNANYSLKAINKILPFLRKGHVLSEARLLAKLPDILPGFSESEEQIVLNLKEMEIAYRNERAAFAEDSVRRGKAPVPLMERYREYFRDRWGVLDEDWKKLYLRGDEVYQVDPGNPTRLPPVQLGMIRNPLVQRSMTTLRRLVNYLRDHDKIDGETTIRIELARGVNDYATRHAIQLWQQDREKMRAAAVAELGAKASADAIERYMLAVEQGFKCLYTGKTISLKDILSGNSFDIEHTIPRSLSGDDSQANKTLCDAKYNRETKKGMVPRDCPNFESEIYLNLAPWREKVEELEKTYNSQVGKARFMTDPVAKAQARIKALRTRFERDYWRDKLRRFEISLDRLTDSASGLSGFKKRQLVDSGIMSKHAVALLKSVYPNVFSVNGTATSFARKAWGLQGDEAKDRSDHTHHAKDAMVIAALTPTRFNAICAALKDDGAMAYRRSCDVCPEPYPGFAESVQHAAEEILIKHVVRQTTLRQSSKRTALAKAHPLASDPSKTVKHVLSRGDTVRGALHKDTFYGCIQNPEEGKKAFVVRKPLVGPLKNAEALVDKIVDPAIRAIVSDALEALKTQGIKNVDPGVIKMPSGVPINKVRILANTTNPAELRNHVMVSDKGYKTPYYVTSAEGSNFRLAIFNFNGKLSVKPDNSLDWAQNHKKSDYVPFDRQEGFVGYITPGALALTHKPGENLEGKSAHELGKRLYKVVKFGSDGRVTFRLHTEARASVVLAKDLVELGKHKAGESAIDFEHSHELLLLSPGVYLSEMIFEGIHFKMSIDGTIEFIS

SEQ ID NO: 3488 - protein, 1248 aa, unidentified
  REGION 1..1248: note = Description of Unknown: Cas Enzyme sequence
MPGEPGGSLKTTSAYSLVVIRCCGYDIKTDGSPSIRKVEEKKMRRTLGLDLGSNSLGWAILDDITGDILDKGVLVFPEGIDAANDTLMTPAAIRRGARMGRRLKFRRKLRKWHLLSILIENGMCPLTKAELEAWKKEGKFPLDNKAFIEWLKATETSNPYCDRAACLDDKVPPFTLGRAIYHICQRRGFKSSRKDAAPDTGDDEADKKAADKKLGKVKTDINELSDEIRKSGARTLGEYFYKLIESQKDAAAKKKVRSRYTGRLEHYETEFTAIMNAQGIAEGSELRSALYKAIFMQRPLRSQKNLVGNCPLEPSSPRAMIGHPAFEEYRMLAFVNNLSFDDADGQRQPLTAADRETVCKAFLKASPSMKFGDVSKLFKKDPRFKSDGWKFHYYRDDETVSTRCTHHRIASAFGDLAYDEQMVFDALTFFDNDEKLRDWFKKHYPALDDKSVNKLVAIHPKEGNANYSLKAIRKILRFLRLGYELSQARFYAKLPDVIPDFDANEEQILTNLKEILLQYRQDKAALADEKFRKTNKLVPLLDRYFEYLRDNWGVDEEKWRRLYLRGDEAYSVDPDKPNRLPRVELGMIRNPLVQRSMTTLRRFVNFLFDHGKIDRETTIRIELARNVNDFATRQAYKAWQKKNETLREEAAAEITKLGVKLTEDAIERYLLWKEQNGVCLYTGKAISLADLLTGNKFDIEHTIPRSKSGDDSLANKTVCDAAYNRQVKRGNIPTECPDFNDTMLRPWRENLERLEKDYHNQQRAARGATDPEAHSKARTKALTTKFELDYWRDKLRRFDITADRLIDPEGGLSGFKKRQLVDTGIMCSHAVELLRSVYPATFAVNGAATAFARKAWGLQGDEAKDRSEHTHHAKDAMVIAALTPARFTAICTALKDDGSDAFRRPCDVCPSPWPDFADKVRAATDEILVKHVLRQTTLRQSSKRNALAKAHAPAGDPNGKPIKYVLSRGDTVRGPLHKETFYGCIADPATGELKKVVRKSVVGPIKNLESIVDKIVDPAIREIVEDALADLKAKGVKNIEPGMIKMPSDVPINKIRVCAPNATNAQMLRDHAIPSAKDYKRPYYVTSAKGTNFRLALFDNGGKITVEADNSLVWAQNHKKPDYVPLDQMPGFIGYLMPGSMALTYHEGHPEELEQLTARELCNRLYKLVKFESTGRITFRFHKEARASVVLAQNLKSCGKHAAGESKISVDKPHELLLVTPGQYVKLMLFENIHFKMMLDGSIRFIKR

SEQ ID NO: 3489 - protein, 1126 aa, unidentified
  REGION 1..1126: note = Description of Unknown: Cas Enzyme sequence
  MOD_RES 1091..1094: note = Any amino acid
MTKILGLDLGTASIGWALVERNDTEYALLDQGVDIFQEGVAREKNSEKPAVQDRTAARALRRHYARRRLRKIDLLRVLVRHDLCPALTDEQLKDWKQKKIYPLTDEFIRWQRTDDRTDKNPYRDRYKALTETLDLDTQRDRYTLGRALYHLAQRRGFLSNRKDAGDESESGKVRQSIEGLTVDMEKAGCAYLGEYFYRLYARKEKIRTKYTSRNEHYLAEFRAICEKQRLADGLRKALHRAIFYQRPLKSQKGSVGRCTFEKDKSRCPASHPRFEEFRMLSFINNIRITTPDDPEPRPLSRQETETILPLFTRKTKPHFDFEEIAKKLAGKGRYACQGDRGEAPYRFNFARTATVTGCPVTASLIALFGDDYLTKICDLYTLGAGKTREQILGDVWHALFSFDDEERLSAWAKQKLRLSDDEAGRFAAIRLPQDYAALSLHAINKILPYLREGYRYDEAVFVANLKAVLPSDIYSDESERSAIEADITALITDFRRNPLNRGTTKEQCVRDYLRNCRGIDEKRLGRLYHPSMIEIYQTAQPDAQGVLQLGSPRTPAVRNPMAMRALFRLRVLVNRLLRDGKIDRETKIHIEFARGLNDANRRKAIELYQRDREAERKAYADEIRRQYASESGREIEPTDDDILKYRLWKEQNHICPYTGKQIGLSDFMGDSARFDIEHTVPRARGGDNSQMNKTLCESRFNRELKRDKLPSELPNHADVMARIEELGWPEKIAGLQKQIEIQRRKSKSATTKSEKDGAIQRRHVLQMQLDYWRGKYERFTMTEVPDGFSNRQGVDIGIIGKYARLYLKTVFERIYTVKGATTAEFRRMWGLQEEYARKERVNHTHHCLDAIVIACIGRNEYDRWAQYAGDEERYRRGEGAKPRFEKPWPTFTEDLEAVADRLLVAHHTPDNMPKQSRKRLRIRGRIRTGRNGETLYAQGDTARGALHQQTFYGAIERQGEVRYVVRKPLGQLQLADVDNIVDDAVRQKVKEAIDAVGFKTAMDTESHPIWMNEQKRVPIRKVRIFAGKNISPKSLGGKKHRDLSALPHKRPVYVSYGSNYCMAVYEGEDKRGKLKRTFEIVSTLEAAQYFXXXXGQGGATRSRPAIGRERLSAEVHSENRNHGAFL

SEQ ID NO: 3490 - protein, 1207 aa, unidentified
  REGION 1..1207: note = Description of Unknown: Cas Enzyme sequence
MEKILGLDLGTNSIGWAVIERKDDNSCALLDKGVHIFQDGVAHDKSGEKPAVQERTAARASRRHYFRRRLRKIELLKVLIKNGFCPVLSDEDLMRWKSEKVYPLDEEFIKWQRTETESDKNPYRDRFRAVTERLNLSDTRDRYVLGRALYHLNQRRGFLSNRKDAAEDQKDGTVKESITKLTADMSAAGCRYLGEYFYKLFNEKKKIRTHYTARKEHYREEFNAICEKQQLDADLKKALERAIFYQRPLKSQKGNVGKCSFEKRKPRCPLSHPRYEEFRMLQFINSVRIKGPEDEAFRPLNHDEAEAITPLFFRKSKADFDFEEIAKRLAGKGNYGYKDDRAAHPYLFNYKMTASVSGCPVTASIIQALGMEPNRNWAEDLCALYTKGEGKDQEQILNDIWHALYSFDDEKKLTEWLRISLQLGDDEAKNLAKARIPQGYASLSLKAINKILPWLRKGLIYSDAVFYANLDSVLPASVTGDATKLDEVYDNMSVCLRDFDQNPLNRTSNKAAVISDYLITVAEGVKVDKLYHPSMIEAYPAAQRDNHGRIRLGSPRLNSFKNPMAMRALFRLRALVNALLDEKVIDPDTKINIEFARELNDSNTRKAIADWNKEQEDLRKQYREEIRNLFSGNYEPTEDDLLKYRLYEEQKHICLYTGKQISPTMFLGNATEFDIEHTVPRSKGGDDSLANKTLCDSKFNREVKKTKLPSELPEHETILQRIEEWKSIIEDLDKRLSAQRRKCKAASTKDQKDAALRTIHYLRMKRNYWKGKYDRFVMKDVPEGFSNRQGVDIGIIGKYARLYLKTVFQKTYVVKGATTSDFRKAWGLQNEYAKKERVNHAHHCIDAITIACIGKGEYERWAQYMRQMDSHLFWNDPKPRFEKPWATFTEDVLAVPSSLIVSHYTPDNLPKLSKKKVRIRGIIQKNQEGKLMYTQGDTARALLHKDTFYGAIQSNGDIRYVVRKAIDALKDSDIQNIVDEAVREKVRAAVKQHGNLKKAVAETIWMNEEKQIPIKKVRVFTPTITNPIPLKAHRDLSEKEYKRQYYVSNDSNYCMALYGDDKPSFKLFSMLSAVNHFNGKPEEWIGSEDKQGRALRCVLKPGTMVLFYENTPEELHDCSQTELSKRLYKVTGLSPMTIRQKYHFGRITLKHHQEAKRASELTEKNGLWKEVEAYRPVIGLNNNQAKFIVEGKDFTLTVTGRIILRKK

SEQ ID NO: 3491 - protein, 1226 aa, unidentified
  REGION 1..1226: note = Description of Unknown: Cas Enzyme sequence
MMRRRLGIDLGTNSAGWSILEDDKIKDCGVLIFEQGIPAEKGVEAPQSPAADRRAFRSARRLKFRRRLRKYHVLKLLIENGMCPLELQELKNWISHGVFPLNNRDFIAWLNSTRESNPYYFRARAATEKVPPFEFGRALFHIAIRRGFKSSRKDQAANEKETGQLKGKISDLKKCLDASGQTLGQFLYEQFKKGIRFRSEVMCGRVEHYIPEFNRICDVQKLPDDLRKKLYTALFMQRPLRSQKHLAGKCPLEKKCARCLKGHPLFERYRMLAFINTIRITEEGASAPRFLKEEERLALQEQFLYKAPTFKFERLKKFLIKKFFPKQSPEFNYRDDHTVGSSTLTYQLQTILQCEDLFTWRRAYTDRRGAKQIMDIQTLFDGIKYFTQDYDEDDDAFEKFARERVGLSEEAAVQLTRVKIPDGYARYSLKALRKIVPFLEAGFIEPYAVYLAKLPELFGEERYRINQDEVSEDFKKCVENYTWEKENLEGRDRERILSLSERFGQMLEEKWKISPADIAQLYAFREPSNYKDCSGDGRLPRVEMGMIFNPMAHRSLTVLRHLVNSLRAEGKIDGDTEIHIELAREVNDRNRRMAYLEYQKQNEKKREKVVAAFQERNITPTDEQILRWRLWEEQKHLCLYTGRKIEANEIFRPLENATVEVEHTIPRSVGGDNSMENLTLCDWKYNRETKNNSLPTDCPNYRAPTPEYEKPIIENLKLAGFYQELEAAEKSYEEACRKAKSAPLIGRGEARQKALLQRFRLDYWRNKIRSFEMRRDETGEFSRRQLAATGVMTRHALQFLKSVYGRVFSNSGRVTAFARQAWGLQKQYENKDRSDHVHHAIDAIVAAALDRNTFAKIGMAFHEYELNGYDRSILKLGYPWKSFPDDVHTAIESIAINHLARHNEMKQTKRNAVRLTSPVTLADGRVLQRVGSAGDTVRGALHDLTYYGCIKDNTGKLSFVLRVPFTFKTFSSLSKFDDIVDKGVREAVKAQMQALLDGGHEFKDAMSHEFRMKTKSGNFDGPVIRHVRVFCPEIKNPISVKKQTYLSKQEYKQNYYARTSKGGNFMVALYRPEGAGSGEKKYHYEMISLWDWAHDHRQKDYIPPQQRTDKGQFVGFINPGVLVLFYKDSPEELKSMNPAELQKRLYKVTEFKQDGRICLRWHREAQAKKDAAAAMKKEFNFEASSKPPFDKSYPLLQLSPSSYQNHTLFAGIDFNMTVDGQIRFKE

SEQ ID NO: 3492 - protein, 1029 aa, unidentified
  REGION 1..1029: note = Description of Unknown: Cas Enzyme sequence
KELGVVYGDIARISAELAKTGLTLGQFFYNEIKAERKVRKQHTGRDEHYRKEWERIAVVQNLDKTLADKIARTLFWQRPLREQSFLVGKCPLEPTRKRAQIGHPEFEEFRALSFVNNIRVIDGETRNPLTPEQHAVAVDCFNLKKPFDFKTIRKKIEKQCKELRGAEFNYEDNVSLTPSKVTASLEKILPGIDGSERQKAFDALTFFDNNEKLTAWARKHFGLSQEAADKFVKIRIPEGRAAYSLHAIRKINRFLRKGVELSEATYLAKLPDIIPEFDAKEDEIIAKVHEHHELYRENKRVAYRDTRTENRIGVVPLEKRLGSWLQDEYGIDAKKANLYFRDPRADSSYASLTKEEKTGVERGILPKVNLGMIRNPIVQRSMTMLRKLVNELRKKGDIDADTRIHIELARDVNTHNDRIAIQEWQKQNEKKRAEARTKLQEHGFTDPADDLVLKYILAEEQNWTCLYTGRNISMKELIEGGFDIEHTIPRSRSGDDSQANKTLCDATFNRNIKKGLMPSELPNHDEILTYIRPWLNTIEELKKLRAKQSKAVKSVPKDNPEARARARQRLLVTKLNLKYWEDKYHRFTKRPDEITPSFINRQLVDTGIMTRHAVALLKTVYENVHPVNGQAVAFARKLWKVQGEDAVKDRTDHRHHAKDAMVIAALSRDRFHKICAELKADDERKNPKVAVEPLFAGFAQTVFETTQDILVKHVTRHNELKQTKRKSIRLSSPKKTRIGTITRAPTGGDTVRGQLHKDTFYGKIRKPGETETVCVVRKDLNSSNFPDEKALKKIIDPAVCKAITDEIARRGGEFKKAMDAAVEEGTFKLPGERGAIIKKVRIEAVVTNPRALREQTATPSKHPYKNSVWVQAADNSNFRISVYEQHNDPVVFVTENLLDHVQGKILSPTDGFRGYIYPGTMAIAYKYEGEWNEDGFDYRNRLYRVVKFAQKRVTLRYHCEARRMTELQNDLAESGKNKKGESSIDFDTPHELLLLSEKKVQESFLFEGIDFKMGLDGTITFIDRRRYSK

SEQ ID NO: 3493 - protein, 1297 aa, unidentified
  REGION 1..1297: note = Description of Unknown: Cas Enzyme sequence
MTAAVKTLGLDLGTNSLGWAVIDENSVQKTGVLVFEEGVNREQDKSLKTPASERRTQRMARRLRFRRHLRRRLILKILIEQKMCPLTQEEWKTWFQPDKGDKAVFPKGNVAFVEWLKSTDTRNPYCDRARAATENVDPLTLGRAIYHLAQRRGFKSGRKDQPEDGEESNSAKAKKLGKVKGEIARISAELDKSGLTLGQYFFNEIQVGRKVRKQHTGRVEHYEKEWVKIAKTQNLDQALADKIARALFWQRPLREQSHLIGKCLLELKRNRAQIGHPDFEEFRALSFVNNIRLVDGEKKTYLDDKERCAALDCFNRNKSRIPFCGKNVKTIPLTPEERAVAAEFFIMDTKGKPRYNPDAKATQNKLKFETLGNLLRKKFPELKGAAFNYEDNDSLSPSKITAALTDVLPNRTDWQTAFDALTFFDRFVDGDEKLKDWAQKVEIQRKDKYGKPREPSKGLGLSEEAAKKFIKIRIPEGRASYSLHAIRKINRFLRKGFELSQAIFLAKCPDVLRDFNEYEDTFIKELEIINIDYHKDLKKAEREDRYPESVPTLEERRRDWFSGKVKQDWVAKVEKPFESLIYFRDPKADSSYATPDENQQLSITKGVLPKVNLGMIRNPLVQRSMTMLRRLVNELRRKGDIDATTRIHIELAREVNSRNDRMAIQEWQKQNKAKREAAEKALKQYIAQPTEADILKYLLWEEQKFQCPYTGKQIALCPYTGKEIKDIGFFAGFDIEHTIPRSRSGDDSQANKTLCDLNFNRNIKKGMMPSELPDHDVILARLKPWKDKIDDLKKLKKRQAADAKVISKANAEDRSKARQKMLVTKLDLKYWEDKYYRFIKKPDDITPSFISRQLVDTGIMTRHAVALLKTVYPDVYPVNGKAVAFARKMWKVQAEDAVKDRSDHTHHAKDALVIAALSRDRFQKICAELKTDDERKNPKFTVAPPFDGFAQAVYDATAAILVKHVTRHNELKQTRRKSIRLSSPKKVIDKQTNEKVTRAHFKTGGDTVRGQLHEDTFYGKIKKPGDTKTVCVIRKSLASCNEKDILAIVDPIIRKCVQDKLAQIGGDFKKAIVQDVFKMESGVPIRKVRIEVTPHTSLNEIRHHTTTPSKHDYKVPVYACTAAGSNLGIAVYQLENGNPHFIIEKLFDHVREVVPEPPSEATLLGRILPGAMAQARPLVECKDVCSPKSPVLLYKVRKFTENAITLWFHREARAKKDFEQVLKEIKAQLSEGNLPDIERKRLEDIKKSHADSSSLDYNHPYARLCLNLKKAWASFLFEGIHFTMDLDGTIHFKDTLC

SEQ ID NO: 3494 - protein, 1211 aa, unidentified
  REGION 1..1211: note = Description of Unknown: Cas Enzyme sequence
MKVLGIDLGTNSLGWAILDSEKKKKAIVDAGVVIFEEGIKREKGRDSLTTPAAERRTYRSARRQKFRRRMRKIKTLEILIAHGMCPLKPEELDAWRKDNQYPLNNRAFLNWLKSTHTDNPYGDRAAAATQKVAPDVLGRAIYHLAQRRGFLSNRKNIVEANAPGEEGKKSKKKVDERSKVKNSIAQLTAILEEKNWTLGQHFHDLYQRGEKVRGCYTGRVEHYQKEFDQIASVQKMDAALAKKIRDVLFFQRRLRSQSHLVGKCPLEKSHSRCLVAHPVFEMYRMWTFINTIRTIDENGDKIPLSDEERQRASRAFFKTARYISFADIAKALKKPEGTRYNYPDKKTVPTCSVTHQLNKLLGGDCFAWKRTVKTADGRDVTYTYQTAFDALMFFEDADRLQVFAREKLGLAEAEAEAFSKIVCRDGYAQYSLCALRKITPFVERGIELSQAIFLANMPAVLGADAFEANQEQIIADVAERAADYLENREVPLQKRLRDYMQAVWKVSPEDFERLYFRVPGQDNSYASAETGGDMLPPVNMGMLRNPLVQRALTILRKQVNFLRRTGRIDANTRIHVELARSVNDRNTRMAYATWQQSRQAARDEARQRLITDLKHANPSDTDILRYILWKEQDMKCLYTGQTIGQHELLTPAFDIEHTIPRSRSGNNSRANLTLCDHVYNRQRKRGRLPTECDNYDEIHVRLTPWREKVEQLENTYLQQMRTARNTPADNPELKSKNRQKALVTQMEWRYWREKLKAFTLEADHLDDKFMNRQLVDTGIITRHAVALLRSVYPQTYPVNGTAVAWARQGWGIQEITEQKERTTHLHHAVDAMVIAGLDRKRFNDICAYCKDDGEKDYDLTLPESLHPFPGFAQAVFDKADDILVKHIPRRVAMKQTHRKAVHLARPMRTLTGQVRRKVPARGDTVRGQLHKESFYGCIQSPETGKKQFVIRKPLNSESFATRNSLDKIVDPIVRQTVQDQLQTALDQGVPLKKALDETTFHMPSGVPIKNVRIYADNITDPKEVRTQAFPSKHDYKNLYYAETGTDSNFRMALYRQEKNGKIKWNYVVGNLLDWTQRNPEEGELHDKKDLGQFVGYIIPGAMALTYEQTPSELHTFGPRQLKKRLYKVVAFEAGYGRVTLRLHSEARASTDLSKFLKSINKRADGVSSIDYSRPHELLRLSPSVYTKHVLFEGIHFDMDLAGKITFRDYEC

SEQ ID NO: 3495 - protein, 1171 aa, unidentified
  REGION 1..1171: note = Description of Unknown: Cas Enzyme sequence
SHPDFELYRALQFINNIKIGKNGQLLNNEQRKTVLELINSKDKAFDFKLIKKTLKLPHEFFNYEDDFKVSGNKTHAIVASAFPKNIWEEKREEIWHAMLFFEDSEQLAAKLEKAYGLDAEKANKLSKIELEEGYSSISLKAIRNILPFLEMGYRYSTAVILGGVKNAFGERWERFEIVHNELISDLVRLIEDQKHKEYALIELVKAYLSDSDSKLGFIKDDAAFKKLYHPTQAIEKRALKKRLTEIENLRNPIVQQALYEMRRLVNQLIEQYEVLYGEDFRFDRIQVEFGRDLKNNKKRRQEISIRNRNNEQKNGAARDRLAEYGLRPSRENITKYLLFQEIVEKNGTMQCPYTGKTININDVLGHENRYQIEHIIPLSVSLDDSYGNKTLCESNFNREKGELTPYEFYQQNSASELWGVNSWEEVEQRAYRLLPYLKAKRFTAMKRLGADEFIQRQLNDTRYISKKAAEMLSEICDSVRVLPGQLTAELRRLWGLNHLLRDPLLTARDLPVPPEGGAVQFAIMDESGKVKELLPAQNTKPQGVDGVICISGLVDKKGSFIEESKWKHLQYKLEETGQPEGKSWARLKLSEPLEFTRVYIERPAFNEKSISLKGTVSNGKFTNDSLKRKLNAPIEDGQYWATFPIKQNRYIFAQRDQKPEPTANEILLYGKVINGKFSSYIFEEETGLSDGRYWLIIEPDTELVSYLKSRHLPIDKQPNELLVEGVVDDLGKFTADNDPDFSFNTTQSTGKYFVRFEVSQLIDFLPQENEKPTLKKGEKLLEAYTWVNKETGEIKIDIQKNREDQRHHALDAIVVALSELTYLNQLSRYSGQLKEWERGKEDRPTFEQPWPLFDQTVNTAIQQILVSYAQNKKVVSRISKMISKNGRSFKSVGFAARGRLHREFYFGRHPYPISHQKNPQTGELLFEKDKDGNLQYYYHIRKSVVNLKNNKHVDKIVDEGIKNLIRERLEKEFNINTKNTYNIPADFFYDKDKKPALFLPNKKGQPVPIKKVRLRETISNAEQLKEDVNQWVNPYNNHHVVIYETAEGNLQEQIVSLWEAVERVNQGQAVYQLPSNGKRILTTLQENDMFLVDLPEDLKSILEDSVISFADFSPYLYRVQKISSMDYSFRHHLVSSVSDEQGEKRIASFKAWISLNPVKVIVDQIGNLKVK

SEQ ID NO: 3496 - protein, 1329 aa, unidentified
  REGION 1..1329: note = Description of Unknown: Cas Enzyme sequence
MQTNLKFFTKFIFETFKNFRKMKKILGLDLGTDSIGWTIVQQNEEKKFKLIDKGVRIFQKGVGEEKNNEFSLAKERTTHRNTRKKYRRTKQRKVRLLRELIKHGMCPLSFDELELWSKYRKGKPYIYPLSNKGFTQWLKLNPYDLRERAIKPDEKLTPLELGRIFYHITQRRGFKSNRKDNSEDSEGVVKTSISQLREEMEGKTLGQFFNNELKKGNKVRKKYTAREDYHHEFNEICNIQKIDNKTKAALEREIFFQRALKSQRHLVGKCTLEPKKPRCPLSAIPYEEFRALQFINSIRIKDAEENLMPLTQKEREVIQSLFFRKSKPSFPFNDIKKILEKHNGQRLTFNYPEKLQIIGSPTIALLKSVFGEEWASLSVAYTKKDGTTGTINSEDVWHALFEFEHNDKLEDFLKQRLKLSDDNIQKLIKGNLKQGYASLSRKAINNILPFLKDGHIYTHAVFLAKIPEIIGRKQWLHSKDQIVNWFLKSAEELPLKNRLCKIVNNLITEFNETYANADPKYILDDSDKKSINRSLQHDFGPKTWNKFSSEKKDELQKETERLFLSQINKGNASAPYIKPYRQDEELKQYLIDNFNIKQEEAERIYHPSAIDIFDEAPYNDDGIKLLQSPRTPSARNPMAMRALHELRYLLNQLLSQRGIDEHTVIHLEMSRELNNQNKRLAIQRYQQARNEEHQEYAKEIKKIFKEQTQKEIEPTEADILKYRLWKEQEHNCLYTGRKIGIADFIGDNSNVDIEHTWPRSKSFDNSTANKTLCDSHYNRNIKKNKIPYDLPNFKESAIIEGKQYDPIKARLKDWEEKCNHLKELAAKYRYNAKRASTKEQKDKALQNAHFYQMHHEYWKDKIFRFTGKEIRNSFKNSQLVDTGIINKYARAYLQTVFNKVFTIKGTLTADFRKAWGIQNPDTSKSRQRHTHHAIDAAVVACLTRDRYDFLTQWYRAEEKGNERKKHIIQERMKPWTTFVQDIKAFENSILVSHHTRKTSAKQTRKRLRENGKIVKDPNGNPIYSKGDTFRNRLHKDTFYGAILRPQIDKEGKTVTDENGNPKLTTQYVVKKPVTDLKETDIKNIVDSKIKSLFESKKLNEIQKEGISIPPSKPEGKETPIKSVRLKQPFNPIPLREHTHLSQKPHKQYYHVQNEGNFLMAIYEETSASKKPEKTFELISNLQAADYYKASNKENREQYPIVPERKFITKRNKEIELPLKQIIYIGQMVMLYENSPEELKSKNEEELFKCLYKIVGITSMTIQAKYEYGVFILKHHAISTPYSELKPKDGDFSWEGNIEAMRKQLHSRIKVVIENLDFKITPTGKIEWLF

SEQ ID NO: 3497 - protein, 1168 aa, unidentified
  REGION 1..1168: note = Description of Unknown: Cas Enzyme sequence
MAKILGLDLGTNSIGWALIDDASKIIIKTGVRIFPEGVNRDTKGKEVSKNETRRDARQKRRQTFRTKLRKKHLIKTLQDVKMYPLSSDDKILREYFHNSPYVLRSKALIEKLTLFELGRIFFHLAQRRGFKSSRKAGTSEESVIMKGDEKIGKIGIIDTNNAIEKGSYQTLGNYLNSIDTKEQRIRNRYTTRQMYIDEFANIWEKQKKYYPAILTNELKEKIGNTKTGILFFQRPLRSQKGLVGKCTFENGKTRCPISAIPFELFRTYQFINSIEIYSPDGEILNLTDDQREEIVSLFNRKESVKFFEIVKRLGFLKGYKYNYSADEKKGDSRPGNKTIIQLSKLFGKEWDSFSENEKDLRWHIIYFANDNEWLENYARSNWSVTDEQIEQLKKISFKQDYASLSRKAINNILPFLKKGYTYSTAVVLGGVRNFFGEDRYLKFDTNQSDTIEKTVLDILQNTKKKEAVIDVIRDYLKKQFNHTDKDLQKLYHHSDLDAVTQKQIKTELPKPPNVRNPIVQQALYELRSLTNAIAKEFGSPDEIKVELAREMKVPKSVREEIHWKQKEREGENNEAKKVLDEYGLRHSRQNIQKYLLWKECKHQCPYTGTEISIKHLFEEGFVQIEHIFPWSVSLDDSMANKTICLVKENQAKGDKTPFQFYGNDPYKWNEVKTRAYKLLPFRKYQRFIKQEIDTDFVSRQLNDTRYISREAKTYLESICKKVNVSSGGVTSELRHYWGLDTILNPRINVGNSIPEDNYWAAINADGTIAETISWTFEQKEKPVGLHKKGRVVIGYVRKGYFYITGGAKNRTDHRHHAVDALTIANTKVSFIQELSRWNRSNKTSELKDFPLPWNNFHAHAETSIKNILIAYKAKNRVTTKIKKRIRKKINGELKEFISVGVSARGALHEETVYGKRKNMFGEENDYFNVRKPLQSLTPAMIPKIIDTKIRELAYKRLIKLGLKIDKENNKPIVKTTKDKECFGKAFDKSLFLPNENGEPVPVKKVRIRVESSNMEKLKDNNNQWVEPGSNHCVSIYEKPDGSRFGLMTSFLEAVERRNQKIDVVDKNNYEGKFVMSLSKDELVLMDYDQQDINWSNPPSQIELSKKLYKVRKMTSTGKTIMITFTYHIASNVNADADPAPMVLRKVPNVLKALKVIITPTGRIEPAKQ

SEQ ID NO: 3498 - protein, 1480 aa, unidentified
  REGION 1..1480: note = Description of Unknown: Cas Enzyme sequence
MDKNFSIDLGTNSIGYAKRDIELGHNLIDQLGLFGAVMFKKGVGNGKTGEFSFAAERTKHRSSRRLYQARKYRIWKTLKVLIDPANKNKKDDDIDLDKRGIYCPLTMRQLNQWRKYDKEAGQKRQYPIDVIEFEQWVRLDFDGDGKADYSSPYELRAELATVQLDFNIEINRYKLGRALYHIAQRRGFKSSKGETLKEQEDATKEALDVTESSETEATSLKKSEEKKSQHLSDYLAKNNLPTIGCAFYQLEKEGVRIRGSIYQSVRSQYRDEVKYIFEFQKRLDVNSDFFKVIYSDKKEGSIFYKRPLRSQKGLVGKCTLEPTKYRCPISHPEFEKFRAFAFINNIQYRTTSNDAWTELTAEQKLKLFNEKFLLMKPNFKFESIREWIQKEIGKTLSWSEKKAERTINYKDKTNVSGCPISGRLKNLLRKDWENFVYKTTKQHENKTTKEIKEYDVQYNTEDIWHVCFSYDDEEHIVEFAKTQLHFNDTQTDFFVKLWMAIAQGYSMLSLKAIKNINRFLVPNINKVDYKGLIYTDAALLAKIPEILGEKLWIENEQLFLHNIDDLIEKNRSKKRILNIVNNLIANYKSLEHEEQFAYKNAQYQLDNSDLKAIEEYTKESFGAKTWETETNKKGILDDVKEKYQQFFASSKRDYFKLPKLGDTIKEYLSENFDFLRCANNGIDPETKLTCQCDACKKINKLYHPSMIEFYKPAKEKDIEHNGVTLSKKLLESPIIGAFKNPMAMRTLHELRKLINSLLLEGQIDEETRIIVETARDLNDANMRWAIEAYQRERETENKEFEKAIKELAKSNHVIGDEDIDKARLLVEQHPDYMFPKEKRNQIKDYLYKKDITKYRLWLEQGMKCIYTGKPINLTTLFSQNNLVEIEHTIPRSISFDNSLSNKTICFTHYNRFVKRNQIPTQLINYSQNTDEYSAIEPRLEAWKEKVIRLKENVEFWKLKSKTSQNQESKNNAIRQRHLWEMELDYWQNKLDRFTMTDVTSGFKNSQLNDTRLITKYAYHYLKSVFSKVDVQKGSVTADFRKMLGVQSVDEKKNRDKHSHHAIDAAILSCIPVAAKRDRMLELFYKIQEEKKLNHPTDYLERELDREKKSCNIGDITNLSKYIEENILINHVSKDQTLTPAKRKARKRGKEVFVKNENGELVTKWIKGDCIRGQLHQETFYGKIKIVKRDENDSPLRNGDGKWLFEEGEKEFRYVVRKPIGSVTKLEQIVNPELQKVIQRQLNGRSLEKALSDGVYMLDKTGQPVGNKIRHIRCWADVTKPIPIKKQTYLSDKEYKQDYYAANAENTLYGLYWDGKSKERGYECLNLYQVVQIRKLNDPQTLEEYFPSTKMLGRGKKRVNTPLYAVLKPDMKVIFYKDSRDELLEMSVNELSKRLYKMNRIFDSNTGVIQFYHHLEARDDKELMEAYPESEFGKKGKNGFSQFNYEFPCPRLLMSCGSFNFIIEGKDFIAKSDGKLEFLYK

SEQ ID NO: 3499 - protein, 1231 aa, unidentified
  REGION 1..1231: note = Description of Unknown: Cas Enzyme sequence
MKKLGIDLGTNSLGWAILEDDAVKNCGVLIFEQGIPAEKGVEVPQSPAAERTAFRAARRLKFRRRLRKYHVLKLLIENQMCPLTLPELKRWISRGVFPIDNREFIAWLNSTRESNPYYFRAKAAAEKVPPLELGRALFHIAIRRGFKSSRKDQGADEKETGKLKSKIAELKKILDASGQTLGQYLYEKFRQDVRIRSEIRCGRVEHYIPEFERICQVQGIGPELKGKLFKALFTQRPLRSQKHLVGNCILEKKSPRCLISHPLFERYRMLAFINNITVREDGAPDVRQLNSEERLFLRKLFMYKAPAFKFERLEKALTKAFFAGKPPEFNYRSDHTVGSSSLTYQLQEILQCEDLFLWRHTYTDRRGKAQIMDVQTLFDGLKYFTQDYEEEDDAFKKFARDRVGLSEENAEKLLKIKLPDGYARYSLKALRKIVRFLEMGFIERYAVYLANLPEIFGEERFAAVKEELLADFRQCVDDYSWERKNLSDRERGKCIPLSERFEELLEEKWRLSRAEIARLYAFREPSNYDSLTEAEERGIKEGRLPRVKLGMIYNPMAHRALTVLRHLVNFLRKDGQIDAGTEIRIELAREVNDKNSRMALLEFQKQNEKEREEAIKAFEEHGIKPTEEQILRWRLWMEQGYKCLYTGKTIPASEIFCPGENSAFDIEHTLPRSLGGDNSMENLTLCDSQYNRKIKIGNLPAECPNYDRPSPGYEKSIIDNLTSAKFYERLEKAEKDFAILCSKAKSAPLAARAAARQRALVQRFKVNYWRSKLRTFEMKRGETGDFSRRQLTATGVMSRHAMQFLRSVYPKVYANSGTVTAFARQAWGLQKQYELKDRSDHVHHAIDAIVVAALDRRALERIGAAFHEDELNKYNHSALQIGYPWATFPDDVHRVVESILVKHIVRRNEVKQTKKNRVHLATPIQLAGGQTLKTVRGAGDTVRGALHDLTYYGCIRDAKGGRQIVLRVPFTADSFKKMEDFESIVDKGVREAVEAQMKSLLAGGLAFKDAMSREFRMKTKSGAFDGPVIRRVRRLRPDMKNLLEIKTQTYPSKQEHKQHYYAATAKGGNFMVALYRPEGVPEGEKRYVYELVSLWDWARDHRQSGYIPPQERTDKGAFVGIIHPGVLVLFYKDSPEELKSMPRAELQKRLYRVTEFKQDGRICLRWHREARAKKDAEEVMKRKFQCQASSKLPVDETYPLLLLSQKNYQEHTLFEGIDFEINADGQIRFKE

SEQ ID NO: 3500 - protein, 1398 aa, unidentified
  REGION 1..1398: note = Description of Unknown: Cas Enzyme sequence
MKKIIGLDLGTNSIGWAIVNEKENDSEKSSIIRLGVRVNPLTVDEKTNFEKGKSITTNADRRMKRSMHRNLQRFKLRRKNLIECMLENGIITEDTPLFESGNRSTFNTYRARAKAVEEEISLEDFARVLLMINKKRGYKSNRKIKDTEEGELIDGMEIAKKMYDEHLTPGQLLLDLLKKGKKNKPVFYRSDLQSEFDKIWEVQSVYYPDVLNEEFKQRIKGFNKTQTSGAFYAIHNVSTVKNNGKGGYEQALEWRTKAIKEKLDIEIVAYVLCDINGAINNSSKRLAMISDRSKELYFNHQTVGQYLMEIINHNPNSSLKNIIFYRQDYLDEFEAIWERQAQYHPQLTPQLKKEIRDIIIFYQRDLKSCKSLISFCEFEHKDKEIVVDGKKKTIITGYKVCPKSSPLFQDFKIWQVLNNLKVSVNSRKLKRIKRNDGQLPLFDSLDDEPGNRYLDQEEKDILYKELTFKEKMSKKDVLSLLFENPQTLDLNYNEVEGNRTMAAFFKGFQDIISLTGNGEYDFSKMPADEVLATTSDIFSGLGYKTDFLQFNPLVQGKDLDKQPLYRLWHLLYSYSGDKSITGNDALLRRISEICGFEKEYASVLANISLPIDYGSLSAKAIRKILPFMMKGLEYSEACEKAGYKHSARSLTKEELQKKEYKSHLSVLRKNSLRNPVVEKILNQMINVVNQLIDTYGKPDEIRIELSRELKKSQEERASLSDAIRKNTGESDSIRKILQDEFKIQHVTRNDILRYRLYEELKLNGYKTIYSNTYIPREELFSNRFDIEHIIPKARLFDDSFSNKTLERRDINIEKADKTAYEYVADKYDEKWLSEYETRIEELFNQKAISKTKRNHLLMKAADIPTDFLSRELRDSQYIARKAREILEDIVPIVVSTTGAITSRLREDWQLVHIMQELNWNKYDQLGETETYTDKNGETKRIIKNWTKRNDHRHHAMDALTIAFTKPSIIQYLNNLNARSDKGGSIYGIEQKELNRDNKHNKLVFNAPMPLDEFRAEAKKHLESILVSIKAKNKVVTKNVNKTKKKNGIIKTNQITPRGPLHNETVYGKIKNFVAEYKIVNGQFDESTILRVCNQRYRNALLKRLSEYDYNPKKAFTGKNSLEKNPIWLNAEHSYSVPTKIKLFKVVDVFTIRKSIDSNLKIDKVIDKKIREILQQRLDENGKDANKAFSNLNDNPVWLNEEKGIAIKRVKVKAKVSSDTSVPLHIKKDLSGNVINDDEGRVVPTDYVNTASNHHIAIFVDSNGIWQEHVVSFFEATASALLGMPIVDKSYKSEEGWKFLFSMKQNEYFVFPNKETGFNPSEIDLMDESNYPIISQNLYRVQKFSSSYYVFRHHLETNVEEQNILKGTTWKRITSIKHLEGIVKVRVNHIGRIVAIGEY

SEQ ID NO: 3501 - protein, 1033 aa, unidentified
  REGION 1..1033: note = Description of Unknown: Cas Enzyme sequence
MGKKILGLDLGTNSIGWALLEETNKKPSVIIDLGVRIFQKSVEEKTPTPKNVKRRDARLARRVIQRRARRKQRMLNYLVKLDLLPKELQGHAQPEIILNRLGNPYRLRAMALDNPLKNHELGRVILHLVQRRGFLSSRKTLLGDMVDDPDVKAVLDKLEDTGESLSERAKEETLFKKDINVLRQTIKTNGHRTLGEYLASLDHHDCKRNRSREGGHLRTDRQMYHDELDLIWEMQAKFNEILTDEVKEQIEQIIFYQRPLKLSSDSVGKCSLESSRNRARMARLECQRFRYLQDINNLKYFDYYTDTWKELNQVDREKLVKLFENKANPTFKTDIRKALGLDKGTEFNLDTDNKKLKGNITACEIRSIFLEWDGLEKVKQLSLVEDLLTIKKKSVLKKRLMNHWRFDAKTAVNLCMLEFEPGHANLSIKAITKLLSYLEHGQIYSDARVSAGYNYEIEKADIVEKLGSPPEIANPIVNKALNEVRRLVNAVIKEYGKPDAIRIEMARDLEMNTKKYKAYTKQQLANTKANKEAGEKYQDMGKANPHLMLSKYPSRADKIKYRLWKNQDERCAYSGKNISLATLFSAEIDIDHILPYSQSLDDSYMNKVVCFAGENRYKGQRTPIDTWGANEEKWNQISQAVSRWSKKLTAKKNRFFITSDELQTRDFISSQLNDTRYISKVTLDYVKQLGADVSVSKGTTTSWLRHQWDLNSLLGETNEKERADHRHHAIDALVVSCVGRQFYKNLVGLATDLEKSSSQLQMRDLHIDPPWPTLRDNLNDKLQNIIVSHASRKKLSGALHEETGAGFIEGKGTVYRVDLNSEFKITQINKIIDDEVRHIVQQHLEKYENKPKEAFADDVTVYHKDVKTPIKRVRIIQAKTSRDKLIKNKFGARNKEGHVFKWMPYGNTHHVEIIKTKKTGIYSGVFVTTMEASRRARGVGVKKQPIIKTNHGDDKEFALALHINDIVSLKNGDTRKYYRVQLLEADSGRIKLRLHTAANIDNKNEEIRISIKKLMTMDLSLHAVNSIGMIRND

SEQ ID NO: 3502 - protein, 1025 aa, unidentified
  REGION 1..1025: note = Description of Unknown: Cas Enzyme sequence
MIKRVLGLDLGSNSLGWALLEEQDKTVNKFIDIGSRIFSKAVEEKTPTPKNVKRRDMRLGRRVLQRRARRKQRMLNYLVSLNLLPAELQKNTQPEIQLNKIGDPYQLRAKALDQQLTPYEFGRVLLHFVARRGFLSSKKQLAGDLVDDPDTIAYLKELDKEPTKDKEEGAFKTDIAELRNAIEKSGYRTLGEYLYNIEQGECKRNRSHEGGHLRTDRKMYQDELAEIWKQQSQYFSQLPNDFMADNKGIQQIIFYQRPLKLKQDRIGKGSLEPKSNRAATARLEVQRFRYLQDVNNLEYFEREIDQWLKLDTDKKQKLIHYFEQHKSIKISTLKKELGFDSHYKFNLEMKNLKGNVTAFEIRKVLKKIWDDYSQSQQKQLVEDLLSIKKKSALKNRLIKHWKLQTSQAVQLCLLEFEPGHSNLSLKAINKLLPYLEQGLIYSDARKEAGYDYEPEDISAQKKLSAPPETANPIVNRGLHELKRVINAIIKQYGKPDVVRIEMARDLEMNTKRYKDNEARQAKNKKENEKAVEAYRGLNLGRYPSYNDKIKYRLWQEQHHFCAYSCQTIPVNAVFTASVEIDHILPYKKSLDDSYMNKVLCFTAENRNKGDRTPKNAWGNNEEKWNQITQAIKGWKGLDAKVKRFFKTEEDLQKRDFISTQLNDTRYISKLAIEYVKQLGCDVSTSKGVTTAWLRHQWGLNNLIGETDKKERTDHRHHAIDAAVVACVDRGLYKQILNWTKNNVKELKVNSPYPDFRDELDEQLKHVIVSHDTQRKLSGGLHEETGAGYIEKHGGLVYRKNLSPDFTEKNVKKIIDDIIKKQVIEHLEKYENKPKLAFADNKTVYHKDGKTPIKRVRVLQSATTLKQLEKNKLGIKDKSGKVFKWMSYGNMHHVEIIQNKKTEKYKGEFVTMMEAHRRAMTGTKSAARRNVERESIIKEFHGGDWEFIMALHINDLVSVDKGNGERVFYRVQKLDTGSNRMVLRLHTAAKLDNKLEEIYFSFNGASFKKWNLRKHQINAIGILSDD

SEQ ID NO: 3503 - protein, 1030 aa, unidentified
  REGION 1..1030: note = Description of Unknown: Cas Enzyme sequence
MSKKVLGLDLGSNSLGWALLEETDGSVNSIVDIGSRIFTKAVEDKVPTPKNVKRRDMRLGRRVIQRRSRRKQRMLNYLVSLKLLPKELQGHTQPEIILNELGDPYELRVKALDTPLTPHEFGRILLHFVARRGFLSTKKQAAGDLIDDPDTIIFLNELDNESVGSKEEGAFKADIKEVHASIDASGSRTLGEYLHKLAQGQCKRNRQHEGGHLRTERKMYQDELALIWIEQEQYFSHLPTDFMSKDQGVLQIVFYQRPLKLKKDRVGTCSLEPKNYRAAMARLETQRFRYLQDVNNLQYFERHTDQWLSITHEDKQTLINYFEHNPKITITALKKQLGFDKLTKINLEAKNLKGNITACEIRSVLDEQWDHYTEEKQAALVEDLLSIKKKSALKTRLISHWGIDKSIAIKLCLLEFEPGHGSLSLKAIRKLLPFLQQGLIYSKKDYATGELGALQAAGYLDVEEEQANFDKLGPPAETSNPIVNKGLNELRRVVNAIIKQYGKPDIIRIEMARDLEMNTKRYKENEARQQKNRKENEKAVAAYKKLALGKYPSHDDKIKYRLWEDQGHSCAYSNKTIMLSQVFTAQVEIDHILPFKKSLDDSYMNKVLCFVSENRAKGDRTPKDVWGGDENKWLQITQAISRWKGLDSKVKRFYQTEVDLQKRDFIASQLNDTRYIAKLALDYVQQLGCDVSVTKGYVVSQMRHQWGFNDLIGETDKKERTDHRHHAIDAVVIAATSRQMYKKAVAQIERNKLNIERPYESIKDELAEQLNQTIISHASQKKLSGGLHEETGAGFIEKHGGLVYRKNLAPDFTVKNANSIVDETVRELVLAHLLKHDNEPKKAFADGFIVYHKDDKTPIKRVRVLQSKTTKEKLEQSKFGIRDRSGKIFKYMAYGNMHHVEVVQHNETGKYKGAFVTMMEASHRAKGIRSKLNPEGEAQAIVKRDHGSEWKFVMALHINDIVSIDNGEGQLFYRVQKLDSANNRFYLRAHQASTLNNKEDALAVTINQENFGRHSLKVHQINAIGIFADD

SEQ ID NO: 3504 - protein, 1033 aa, unidentified
  REGION 1..1033: note = Description of Unknown: Cas Enzyme sequence
MSKKVLGLDLGCNSLGWALLEETHGQTNNIIALGSRIFTKAIEEKVPTPKNVKRRDMRLGRRVLQRRSRRKQRMLNYLVSLNLLPRELQGHTQPESTLNKLGDPYELRAKGLDCQLAPYELGRILLHFVARRGFLSTKKQVAGDLIDDPDTVTFLAELDEKPSIDKEEGEFKADISEVRKSITEAKARTLGEYLHKLRQGECKRNRSHEGGHLRTDRQMYQDELTLLWQQQSQYFSFLPDDFMVKDKGIKQIIFYQRPLKLKQDRIGKCSLEPKNNRASIARLEVQRFRYLQDVNNLQYFERHTEQWLSINDEDKRKLTDYFEHHPKITITILKRLLGLDRTTKINLETKNLKGNITACEIRSVLDKQWDNYSCDDQLKLVEDLLSIKKKSALKTRLINHWNLDTSKSIELCLLEFEPSHSNLSLKAINNLLPFLQKGLIYSRNDNETGELGALQAAGYNDEIKEQKQQKKLGPPLITSNPIVNKGMHELKRVINAIIKQYGKPDTIRIEMARDLEMNTKRYKENEARQNKNRKENEKAVDVYKDLNLGKYPSHDDKIKYRLWEEQGRYCAYSNKAIPLNVVFTSTVEIDHVLPFKKSLDDSYMNKVLCYTVENRNKGDRTPKDAWGGNQEKWTQITQTISRWTGVDSKVKRFYQTEADLQQRDFISSQLNDTRYISKLALDYVAQLVGDENVTVTKGFVVSQIRHQWGFNDLIGEEQKKDRTDHRHHAIDAVVIAATSRSLYTKAVRQMERGKLKIEPPYPELRNELSEHLKHTIISHASQRKLSGGLHEKTGAGYIERHGGLVYRKNLSPDFTVKNAGSIVDETVRELIISHLEKYGDDSKKAFAEGVTVYHKDGKTSIKRVRVLQSKKTQKELEKSKFGIKDKSGRVFKYMSFGNMHHVEIIKNIETGKYKGEFVTMMQASHRAKGIQSKLNIEGQKQAIAKKDHGDDWQFIMALHINDLVSVGSKKNERIFYRVQKLDSGSNRFILRKNRASTLQNKDEELYVSTNYESFKKYDLKLHKINVLGIITDD

SEQ ID NO: 3505 - protein, 1027 aa, unidentified
  REGION 1..1027: note = Description of Unknown: Cas Enzyme sequence
MSKKILGLDLGSNSLGWALLEEENGNANKIIELGSRIFIKAVEEKVPTPKNVKRRNMRLGRRVLHRRARRKQRMLNYLVSLDLLPKVLHGNKQPEIVLNEIGDPYALRAKALDSKLTPHEFGRVLLHLVARRGFLSSKKQAAGDLVDDPDTVAYLDKLDEKPSEDKEEGAFKVDISLIREAIEAAGARTLGEYLFKLAQGKCKRNRSHEGGHLRTDRKMYQDELEKIWQQQAQYYSHLPDDFMVNRKGIKQIIFYQRPLKLKKDRVGKCSLEPRNYRAATARLEVQRFRYLQDINNLQYFERHSDKWLCITEEDRKKLVHYFEYHPKITITKLKTELGLDRPTKINLETKNLKGNITACEIRSVLGESWNQFSNETQLALVEDLLSVKKQSALKTRLLNHWKFEKKQAVQLCLLEFEPAHSNHSLRAINKLLPFLEQGMIYSDARIKAGYDYAPDSIEPQVKLGAPLETANPIVNKGLHELRRVINAIIKQYGKPDIIRIEMARDLEMNTKRYKENEARQTKNKKENEQAVNAYKKLKLGKYPSHDDKVKYRLWKEQNHYCAYSLKPIPDHVIFTAEVEIDHILPFKKSLDDSYMNKVLCYASENRNKGDRTPKDAWGGNEEKWNQITQAISGWKGLDSKVKHFFQTEEDLQKRDFISSQLNDTRYIAKVALEYIKQLGCDVSVTKGYVVSQIRHQWGLNDLLGETDKKERTDHRHHAIDAAVIAATSRSLYKNAVAQIQREKLKIAPPFTDFRTAVEEHLKHVIVSHATQKKLTGGLHEETGAGFIERHGGLVYRKNLAPDFTGKNANSIVDETIKNIVLDHLNKHENDPKKAFADGVNIYHKDGKTPIKRVRVLQSKTTLQELEQGKLGIKDKNGKIFKWMSYGNIHHVEILKDKNTGKYTGEFVTMMEAHRRAMTETKSAKKRNVHPEPIIRQVHDDDRIFVMALHKNDMVSVKKGENERKFYRVQKLGGGYDLTLRLHSETSTKREKVLIESKKMLENSFNNFITSFDLKLHKINVLGILDHD

SEQ ID NO: 3506 - protein, 1029 aa, unidentified
  REGION 1..1029: note = Description of Unknown: Cas Enzyme sequence
MGKKILGLDIGSNSIGWALLEEKSGEPSKIVDIGSRIFNKAVEEKTPTPKNVKRRDSRLARRVIQRRARRKMRMMNYLIKLELLPPELKDHSQPEIILNALGDPYELRAKALDKKVSPFELGRILLHLVQRRGFLSNRKNLIGDMIDDPDVQEVLAELEGGEDSSSDSAKEETAFKKDISELKKLIQERGCRTLGEYLASLDMHTCKRNRTHNGGHIRTDRQMYREELDLIWQRQDPLHDMLNIEVREQLEEIIFFQRPLKLRSDRIGKCSLEPTRKRVRIAHPAYQCFRYLQDVNNLSYFDPYSEKEVSLNDSQREAMVKYFEYNPSITFPKLKKLLGLDKKYELNLERGNKKLKGNVTVSSIREVFPKWDECSEVEKAALVEDLLTIGKKSVLKKRLIEFWKLPKEIAIELCFLEFEPDHGSLSLKAINKLIPHLEKGHIYSEARSKAGYGYESEEIEIIERLGQPPETSNPIVNKALHELRRLVNAIIAEYGKLDVVRVEMARDLEMNTKRYKAFEKQQKDNTKANDEAVDKYREVATRTPQLKLSTYPSRSDKIRYRLWKDQEERCAYSGRMIPVSTLFTAEIDIDHILPYSQSLDDSYMNKVVCYAPENRYKGQKTPVDAFSDNEEKWNQITQGISRWDRKLHAKRDRFYKTASDLSEKDFINSQLNDTRYISKLALDYVKPLGVDVTTTKGLITAWLRHQWGLDDLIGNTKEKDRVDHRHHAIDALVTACIDRSFYKSLVAAAKDHEKSHPELRIRDLHVDPPWESLRNDLNNQLKQMIVAHSPIRKLTGALHEETGVGYIEGVGNVTRKVLNPEFKQTDKIYDDAVREIVSSHLQKYGDNPKEAFADGVSVLHKDKKTKIKRVRIVQSNTTLEKLEKSKFGVRNSAGEVFKWLAYGNIHHVEIIKHKASGKYSGQYVTAMEASHRARGINIPTQAIIKTEHGTDHEFIMSLCINDLVCIEQDGMPTVYRIQKLEAPSTLNLRLHTAASLDNKSEALRKSISSLINDYKMKKYDVNVLGNIIS

SEQ ID NO: 3507 - protein, 1047 aa, unidentified
  REGION 1..1047: note = Description of Unknown: Cas Enzyme sequence
MIMSKRILGLDIGSNSIGWALLEENDSKANKVIDLGSRIFIKAVEEKTPTPKNVKRREARLARRVIQRRARRKQRMLNYLVSLNLLPKELQNHTQPEIILNNLGNPYNLRTKALDEKLSPFELGRVFLHLVQRRGFLSNRKILLGDMADDPDVQVLLNTLENEDERRALTGSAKEESVFKADIATLRQRISDNNCRTLGEYLAGIDKHSCKRNRTHNGGHLRTDRQMYQEELDLIWQEQKKHHKLNDNIKDQIDNIIFFQRPLKLKSDRVGKCSLEPTRKRIRIARIEYQHFRYLQDINNLQYLDPIQDKYISLNEEKRRKLVEVFEGKPQISFSQIHKALGLDKKNNFNLETPNKKLKGNITACEIRKVLPEWDDFSLEKQKLLLEDLLTINKKSVLKNRLIRFWKFPIEKAIKLCLLEFEPEHGSLSLKAINKLLPYLEKGQIYSTARISAGYGYKKKENNTDTLLERLGQPPEIANPIVNKALHELRRVINAIISEYGTIDVIRVEMARDLEMNTKRYKAFQKQQNDNTKANEQAIDKFREMSEKNTHLHLSKYPSRQDKLKYRLWKDQGERCAYSNESIQLSVLFSNRVEIDHILPYSESLDDSYMNKVVCYTKENRVKGQRTPIDAFIGDEDKWDQITQSISHWNKKLKSKRERFYQTASDVKDRDFLSSQLNDTRYITKIALDYLKPLGADITTSKGSITAWLRHQWGLNDLIGNRKEKDRVDHRHHAIDAAVTACVDLSFYQSLVASAKAHELSHPELQIKDLVIDSPWQSIRKDLNEKLSKMIVSYATQRKLSGALHEETGVGFIEGIGNVSRKILNSDFTKKNAEKIIDNDVRELVLNHLEKHNNKPKEAFAEGAKVFHKDGKTLIKRVRVVQSDTTLKKLQTRKFGVKNKEGEVFKWLAYGNLHHIEILKHKESNKYSGKFVTMFEAHRRAMTGTKSAQNRQITHEPIISKNHGASYEFSLALHKNDLVSIKKNGERHFYRVRKLGALNQGAQPIPILNLHIDAQDKMTELSESISNLMSKYEMKLHNINAIGKLIE

SEQ ID NO: 3508 - protein, 1032 aa, unidentified
  REGION 1..1032: note = Description of Unknown: Cas Enzyme sequence
MSKKILGLDLGSNSIGWALLEEKDGKPSGIIDLGSRIFTKAVEEKTPTPKNMKRRDARLARRVVQRRARRKSRMLNYLISLNLLPKELQGNTQPEVILNELGDPYQLRARALDHALTPHELGRVLLHLVQRRGFLSNRKTLLGDMIDDPDVLDILNELDENDEKPVGEEGEFKQDIAILRQSIQDNNCRTLGEYLSKFDHHECKRNRARDGGHKRTDRQMYHEELDYIWKQQKKHHTILNDDVKEQIEEIIFYQRPLKLKADRIGKCSLEPSKQRAQIAKLECQRFRYLQDINNLEFFQSQEDKFVKLTEIDRENLKDLFEYKPIVTFAQIRKTLGLDKKASFNLEQGNKKLKGNRTACEIRDVLLKWNTSPQWDEMSTDDQFNLVEDLLTIKKKSTLKKRLLNHWKYDLRVVIDLCLLEFEPSHSNLSIKAIRSLLPHLEAGQIYSDARQSAGYDYEVKEVEIVSKLGMPPEIANPIVSRALHELRRVINALIAEYGKPDIIRIEMARDLEMNTKRYKDNEARQKKNTSENDEATEKFQLMRQKSTHLGLSKYPSRDDKIRYRLWKEQNEMCVYSGIKINLSTLFSAEIDIDHIIPYSQSLDNSYMNKVVCLAGENRFKGQRTPIDAFGGNEDKWNQITQRIYRWHGGLKSKKDRFYKTAKEVQERDFISSQLNDTRYISRVANDYLKQLGTDINVTKGIMTGWLRHQWQLNNLIGFDRTAKDRVDHRHHTIDAVVTACIDRRFYQTLVAQSKSLEQKSPELHMRDIHFDEPWPTLRDDLDASLNEMIVAHTPQRKITGALHEETGAGYIKGVGTVYRANLNPDFKTTQVKKIIDEDVKKIVSEHLDKYNNKPKQAFAEGIVVYHKDGKTPIKRVRIVQAKTTLKKLEESKLGIKDKEGKVFRWMAYGNLHHVEILYNKKIDKFTGEFVTALEASHRAKGIGKPKQPIIKKDHGEGIEFVMALHINDLVQANDKIYRVQKLESDSSGLTIRQHTTAVINNDAEKIRKSINTLMKDYGMQKLTVNAIGKIIE

SEQ ID NO: 3509 - protein, 1023 aa, unidentified
  REGION 1..1023: note = Description of Unknown: Cas Enzyme sequence
MSKKILGLDLGSNSLGWALLEEVDGQASSIVDIGSRIFTKAVEEKVPTPKNQKRRDMRLGRRVIQRRVRRRQRMLNYLVSLDLLSNELQRNFQPEIILNALGDPYYLRARALDHQLTRYEFGRVLLHLVARRGFLSTKKQVAGDLIDDPDTLAYLDQIDDVSSTDKEEGAFKADISELRKAIETSGARTLGEYLHKLEGGMCKRNRSHDGGHLRTDRAMYKDELNLIWEKQKQYFSDLPSDFMSDNKGIKQIIFYQRPLKLKKDRVGKCSLEAQKYRAPMARIEVQRFRYFQDINNLQYFERHSEQWLPIGNEDKQKLVGYFENNLKVTVTGLKKKLGLDKLTKINLETKNLKGNITACELRGVLGEQWDNYTNQEQHSLVEDLLTIKKKSALKTRLLNHWNLDSNQVIQLCLIEFEPGHSSHSLKAINKLLPHLEEGFLYSEARARAGYGYEVEQIEPKGVLGAPIETSNPIVNKGLHELKRVVNAVIKQYGKPSAIRIEMARDLEMNTKRYKENEKRQGKNKKANEGAVDAYKGLKLGNYPSHDDKIKYRLWEEQSHRCVYSNKTIPLNTVFTAEVEIDHILPFKKSLDDSYMNKVLCYTAENRIKGDRTPIDAWRGNTEKWNQMTQSIGKWKGLESKVNRFYQTEEDLQKRDFISSQLNDTRYIAKLAQEYVKQLGCDVLVTKGFVVSQIRHQWGLNDLLGETNKKERTDHRHHAIDAVVIAATSRGLYKKAVSQIQRNKLNIPVPYSNLREELQESLKHMVVSHASQRKLSGALHEETGAGYIERHGGLVYRKNLTPDFTVKNALSIVDSVVQGIVLSHLEKHGNDPKKAFADGKTVLHKDGITPIKRVRVLQSKTTLKKLEQNKVGIKDKEGNVFKYMSYGNMHHVEIIANKKTGKYKGEFVTMMQASHRAKGIQSKLNPEGRKQPLVYTQHGNEWQFVMSLHINDLVSLASTNGERVFYRVQKLEAPSGLTLRLNTASTLGNKNESIRSSISSLMHGGLLRHQMNAIGVLSGDKTNN

SEQ ID NO: 3510 - protein, 1026 aa, unidentified
  REGION 1..1026: note = Description of Unknown: Cas Enzyme sequence
MSKRVFGLDLGSNSLGWALLEEQDGTVNRFIDIGSRIFSKAVEEKTPTPKNVKRRDMRLGRRVLQRRARRKQRMLNYLVSLNLLPAELQGHLQPEILLNKIGDPYQLRTKALDHPLTPHEFGRVLLHFVARRGFLSSKKQLAGDLVDDPDTVAYLNELDKKPEKDKEEGAFKTDIAEVRNAIQESGYRTLGEYLHHQESACKRNRHHEGGHLRTDRQMYQDELAEIWKQQKQYFDNLPDDFMAEHKGIKQIIFYQRPLKLKKDRIGKCSLEPKNNRAATARLEVQRFRYLQKTNDLKYFDRYTDKEVPLNPEDRQKLNDYFERHEKIGIKALRALLGFDSKTTFNLEMKDLKGNITACEIRSVLKDKWDNYSSKQQSSLVEDLLSIKKKSALKNRLIKHWNFTPSQAIQLCLLEFEPGHSSHSLKAINKLLPYMEQGLMYSDARIEAGYGYEVKEIEIQDKLSAPPETANPIVNKGLHELKRVINAIIKHYGKPDIIRIEMARDLEMNTKRYKENKNRQDKNRKANEKAVETYRELNPGKYPSHDDKIKYRLWQEQKHFCAYSCKSIPLNAVFTANVEIDHILPYKKSLDDSYMNKVLCYTAENRNKGDRTPKDAWGSNEEKWNQITHAISGWKGLDSKARRFFQTESDLQQRDFISSQLNDTRYISKLAIEYVKQLGCDVSVTKGHVVSQIRHQWGLNDLIGETDKKERTDHRHHAIDAAVIAATSRSLYRSAVVQIQHNKLKITPPYHNFRDELDEHLKHVIVSHDTQRKLSGSLHEETGAGYIEKHGGLVYRKNLTSDFSEKNAKSIIDETVKNQVLDHLTKYENNPKKAFSDDVTVFHKDGNTPIKRVRILQSKTTLKKLEQNKLGIKDKSGKVFKWMAYGNMHHVEIVKHKKTGKYKGKFITMMEAHRRAMTGTKSAKKHNIEREQIIQKNHGDDWEFVMALHINDLVSVDKGNNERAFYRVQKLGGGYDLTLRLHTETSTKREKWLIESKRMLENSFGAFISDLDLKLHRINAIGILSHD

SEQ ID NO: 3511 - protein, 1036 aa, unidentified
  REGION 1..1036: note = Description of Unknown: Cas Enzyme sequence
MSKQKILGLDLGSNSIGWALLGADNGKPNKIIDLGSRIFIKAVEDKTPTPKNVKRRDARLARRVVQRRARRKQRMLNYLIKLGLLPKELQGHAQPEILLNSLGDPYQLRAKGLDHPLSPHEMGRVLLHLVQRRGFLSNRKTLLGDMVDDPDVLEILAEREDEEDNSSERAKEETAFKKDISELRTIIQTARYRTLGEYLASLDHHDCKRNRSREGGHLRTDRQMYRDELDLIWRQQKNSNSILGPDVKKEIEHIIFHQRPIRLRSDRIGKCSLEPQRNRARIARLESQRFRYLQDINHLKYFNSYRDEWIPLNQDDRKKLVELLERKANPTFKTDVRNVLGLDKKTEFNLDNENKKLKGNITACEIRTVYPEWDNLDAKKQDALVEDLLTIQKKSVLKKRLVTCWNIDKRIAINLCMLEFEPGHSNHSAKAINKLLPFLGQGQRYDEARVSAGYGYKVKDIDVVERLGMPPEIANPIVQKALHELRRLINAIIAEYGKPDIIRIEMARDLEMNTKKYKAFEKQQKLNTLANDKAIDEYRTVGIKNPHLHLGKYPDKTDKIKYRLWVDQDKHCAYSNKPIMPAALFSAEIEIDHILPYSESLDDSYMNKVVCFAGENRYKAKRTPIDAFGGDNAKWEQITQSVNRWPKGLKSKRDRFYQTDTDAKKRDFINSQLNDTRYISKVALGYLAQLGADITTCKGATTSWVRHQWGLNNLIGEDNQKDRSDHRHHAIDAVVIACIDRFFYKTLVGLAKDLERRQSAINIKDIVFDPVWEGLRDELKVRLDGITIAHVPQRKLSGALHEDTGVGYIDGVGAVYRTNLDGSFKITRLKKIIDSDVREIITRHLECYNDNPKLAFSEDVKVLHKDGKTSIKRVRIVQSETTLIKLEKTKFGVVNHKGKVFKWLAYGNLHHVEIIKNIESGKYSSRFVTTMEAHHRVKGIGTPEQPIIQVNHGSEYEFIMALHINDLVSIDMEGQRYFYRVQVLDAPNKRIKLRLHTASTLSNSHETLLDRNSTISALMDANMQLHKTNAIGKMIS

SEQ ID NO: 3512 - protein, 1032 aa, unidentified
  REGION 1..1032: note = Description of Unknown: Cas Enzyme sequence
MSKNILGLDLGSNSIGWALLKEKDGKPSEIINIGSRIFSKAVEEKTPTPKNVKRRNARLSRRVTQRRARRKLRMLNYLIKLNLLPQELTGNPAPEILLNELGNPYPLRTKALDNSLTKFELGRVLLHLVQRRGFLSNRKTLLGDMADDPDVLDVLSELEGEDDNSTERAKEETAFKTDISQLKKTIAELGFRTLGEYLASLDHHDCKRNRSRDGGHLRTDRQMYRDELNLIWKQQKLYHEVLTDTVKHQIEEIIFKQRPLKLNADRIGKCSLEPTRKRAKTARLECQRFRYLQDINNLQYFDYYTEKSVSLDESAKQKLVQLFETTANVSFAGIRKTLGFDKTIEFNLENGNKKLKGNITACEIRKQLPEWDSFEDSKQQDLVEDLLTINKKSVLKNRLTGHWGFCVNTAVQLCLLEFEPGHSNHSIKAIGKMLPFLQQGKIYSDARVSAGYGYEVTTINVADKLGVPPETANPIVNKALHELRRLINAIIAEYGKPDAIRIEMARDLEMNTKRYQDFIKQQSKNTKANDEAVSQYQEMGLKNPHLALSKYPSKTDKLKYRLWQDQKQCCAYSGNPISKSELFSGTIEIDHILPYSESLDDSYMNKVVCYTSENRFKGQKTPIDAFGGNADKWNQITHAINKWERSLKSKKARFFTTFADLQKRDFISTQLNDTRYIGQLAQTYLAELGADISVSKGITTAWLRHQWGLNSLIGETDKKERTDHRHHAIDALVVACVDRRLYQALVNTAKDLERSQSELNMKDIHLDPPWHNLRDDLEQALGKVIIAHVPQLKLTGELHETTGAGFIEGLGNVNRKNLDGNFTQVKKIIDPTVQGLIEQHLANFDNNPKKAFAEGVTIFHKNGTTPIKRVRILQSKTTLEKLEKTKFGVKDKHGKVFKWLAFGNMHHVEILKHRKTGNYSGQFVTTMEATHRVKGIKMPQQPIIKTDHGADYEFIMALHINDLVSIEKSGQRVYYRVQVLDSPNKRISLRLNTASTLKIDSETLPDRDSTVPALMHSGLQKHSINAIGKLIE

SEQ ID NO: 3513 - protein, 1014 aa, unidentified
  REGION 1..1014: note = Description of Unknown: Cas Enzyme sequence
MQQTVLGLDLGSNSIGWALLKQEKAEVSEIIDLGSRIFIKAVEDKVPTPKNEKRRNMRLGRRVLQRRARRKQRMLNYLVSLNLLPVELQNNTQPEIILNELGDPYELRTKGLDAQLSPHQFGRILLHFVARRGFLSTKKQTAGDLIDDPDTLALLNALDDKPTKDKEEGQFKADIAEVYKEIKSSGARTLGEYLFSLETGKVKRNRSHDGGHLRTDRAMYQDELSQIWNNQSGYFEHLLTDFMTQIDKIIFYQRPLKLKKDRVGQCSLEPKHRRANFARLEVQKFRYLQDINHLKFFDRYSDQWISLSDEQKAKLKIYFEHNAKITITKLKAELGLDRPTKINLEAKNLKGNITACDIRSVIGGCWDKYSGKKQQDLFEDLFTIKKKLALKARLITHWDFDKKTAVQLCLLEFEPSHSNHSLKAINKLLPFLEQGMIYSEARESAGYDYKAEEIEVQETLGMPPETSNPIVNKGMHELRRVINTIIKQYGKPDIVRIEMARDLEMNTKRYKENEARQKKNQKANEEAQEAFEGLNLGKRYASRDDKIRYRLWQDQDHRCAYSGDSIGLNQVFSSECEVDHILPFRKSLDDSYMNKVICFVRENRDKSDKTPIDAWGGDNDKWNQITQAISHWDDSLKSKVSRFFTKEADLQKRDFISSQLNDTRYMSKLAQDYVLQLGCKVNVTKGFVVSKIRHQWGFNSLLGDKNAKERTDHRHHTIDAVVIASTSHSLYTQAVRQIKQDKLNIAPPYPHIREELEEKLKHTIVSHAVQRKLSGALHEETGAGYIAKHGGLVYRKTLNQEFTIKNAMGIVDEQVKIKVLEHIENHANSKEAFNSENLKQLKLGKNPIKRVRVLQSKTNEKKLAETKFGVKDKSGNVFKYMSYGNTHHVEIIQNKKTGKIKGDFVTMMLASHRAKGIGIPKQAIIKTDHGQEWRFIMALYINDTVSVEKDDGERVFYRVQKFMIKQDFLVLRLITASTLKNKNEEIQMSINRLFTELNLQNHAMNVIGHFILHD

SEQ ID NO: 3514 - protein, 1574 aa, unidentified
  REGION 1..1574: note = Description of Unknown: Cas Enzyme sequence
MKKILGLDLGTNSIGWAVVNADEATRKDNTKYLKPNSISCAGSRIIPISADILGDFDKGNSISQTAERTRLRMMRRLLERNHLRRERLLRVLKVMDFLPEHYNSKISRYGKFIDDSEPKLPWRKSKDGKMEFLFQESFDEMLAEFKQHHPQLLANGKKVPYDWTIYYLRKKALTQRITKEELAWILLQFNQKRGYYQLRGEEEEEKANETIEIISAKILSVEKKEKDKKYEKYWYEMHLENGMTYRATFYNDVTSWEGETKDFVLKRTTLKDGTPKNELSFLPTPEEIDLMDAQRKAKMYAKIKLRTEKEIENSHKTVGSYIYDSLLQNPNQKIIGKLVRTVERKFYKDELKKILEVQQELIPELKDEALYQRCIEELYAANEAHRRSLSKPDYVNLFLNDILFYQRPLKSKKSLIDDCPYEYHVSKDGEQHPIKCIAKSNPYFQEFRLWQFVQNLRIYQRERTVTDGQLDLFTNTTTNKLQTDVDVTSEILKTEEDYVKLFNWLNDRSSIKQDTLLSSYFKAKKEKGKDKYPYRWNYVEDKDYPCNETRATILSGLAKCNISADFLTHENEMSLWHILYSIEDKAELYKALKKFAHRHQLEENFPEVLSKTKPFKKDYGSYSEKAIKKLLPLMRMGNYWNEEQIDAKTRERIEKIIDGEYDENIKNRVREKAISLTDIQHFRGLPVWLACYIVYDRHSEAKVVEKWEKPEDIDYYLKNFKQHSLRNPIVEQVITETLRTVRDIWKQEGQIDEIHVELGREMKNPADKRRQMTERIQQNENTNLRIKAMLMEFMNPDMGIENVRPHSPSQQDILRIYEENALDNLSKEDKDYDFVSKISKVAQPSKSDIIRYKCWLEQKYQSPYTGKMIPLSKLFTPAYEIEHVIPQSRYFDDSFSNKVICEAEVNKLKDRQLGFEFIKNHAGEIVQLSQGGTVTIMSVEAYERFVKDYYSNNRTKMKKLLMDDIPDGFIERQMNDSRYISKVVKGLLSNIVREKQEDGEYQSSREYEQEAVSKNVISCTGSITDRLKKDWGMNDVWNNIVLPRFKRLNEVTGKDCFTTYSREGHEIPNMPLELQKGFNKKRIDHRHHAMDAIVIACATRDHVNLLNNEAAHSKHNVNRYQLQHKLRRFATIKINGKEREIAQEFLKPWESFTTDAWQVLSNIIVSFKQNLRIINKTTNRYQHCEDGGKKGFEKQHKGESWAVRKSMHKDTVFGEVNLRLKKTVSLNEAIKKPENIVNKEFKKKVIELLDHGRDAKFIKKYIDDNKDVWSDINPAKIEIFYFSKDEKKRNGEPKERYFATRKSLDTTFDEKKIKESVTDTGIQKILLAHLTTKENNPEQAFSPDGIEEMNRNITALNNGKFHQPILKVRVYEKADKFAVGQTGNKTKKFVEAAKGTNLFFAFFGTEKEIKSNGRKEIVRSFMTIPLNVMIDCQKKYGIQWRNNIEDYLRGKDMIDADAKLLFILSPNDLVYLPRENDRKEDIMPLDKQRIYKFIDPAQDKGNFVQYSVAKAIFSAKFTDQKKQGISYPIQDEFGLGSQQTKSPRAITGEMIKETCIPIKVDRLGNVIEINGSPL

SEQ ID NO: 3515 - protein, 1566 aa, unidentified
  REGION 1..1566: note = Description of Unknown: Cas Enzyme sequence
MKKILGLDLGTNSIGWAVVNAEEETYDNNKSCLKPVGISSAGSRIIPMSADILGDFDKGNSISQTSERTRLRMVRRLRERNLLRRERLLRTLKTMGFLPEYFALKIDETGKFIDDSEPKLAWRKTKEGNSVFLFQKSFEEMLADFAQHQPQFVADGRKVPYDWTIYYLRKKALTERITKEELAWILLQFNQKRGYYQLRGEEEEEKANETIEIISATILSVERREKDKKYDKYWYEMTLDNGMVYRATFYNDVSDWKGETKDFVLKSTILKDGSTKHDLSFLPTTDEIEGMPPQRKAKMYAKIKLRTEKEIENSKKTVGCYIYDSLLQKPDQKIIGKLVRTVERKFYKDELTRILKVQQELISELQDEALYNKCIEELYPSNEAHRHNMAKPDFVNLFVNDILFYQRPLKSKKSLIDNCPYEFHFDKDGNAHPLKCIAKSNPLFQEFRLWQFVQNLRIYQREKLVSDGQLDLFSSAPTGKLQTDVDVTDEFLKSEEDYVRLFDWLNCRASIKQDTLLNSFFKIKKERGKEKYPYRWNYVEDKEYPCNKTRADILSGLAKSNISPDFLTHEKEMALWHVLYSVEDKIEIGKAIRTFAAKNNLGEDFAEVFSKLKPFEKEYGSYSEKAIRKLLPLMRMGKYWSAGRIDTKTLDRIDKIITGEYDESIKNRVREKAIRLTETTHFKGLPVWLACYIVYDRHSEAKEIEKWEKPEDIDRYLSGFKQHSLRNPIVEQVITETLRVVRDIWKKEGHIDEIHVELGREMKNPADKRRQMTERIQQNENTNLRIKAMLMEFANPDMKIENVRPYSPSQQDILRIYEENALDNLTREDEEYDFVSKVSKMAQPSKSDIVRYKCWLEQKYQSPYTGRMIPLSKLFTSAYEIEHIIPQSRYFDDSFSNKVICEAEVNKLKDRQLGYEFIKNHAGEKVPVSLGEPVEILSVEKYERLVRERYATNRTKMKKLLMDDIPDGFIERQMNDSRYISKVVKSLLSNIVREKLDNGEYEQEAVSKNLISCNGSITDRLKKDWGMNDVWNRIILPRFQRLNQLTGKSCFTTLNREGHEIPSMPIELQKGFSKKRIDHRHHAMDAIVIACATRDHVNLLNNEAAHSKHNANRYQLQRKLRRFETIVVDGKEREVAREFILPWPSFATDAWQTLQNIIVSFKQNLRVINKTTNFYLHYDESGKKKLCKQVKGDSWAVRKSMHKDTVFGEVNLRKKKTVSLNDAIKKPTCIVNKEFKKKVIELLNDGRDAKFIKKYVDENKDVWSDINTAKIEVYYFTKDEKKRNGEPKERYFATRKPLDSSYDQKRIQESVTDTGIQKILLAHLEAKDNNPEQAFSPDGIEEMNRNIVALNNGKFHQPILKVRVYEKADKFAVGQTGNKAKKFVEAAKGTNLFWAILGSEKTNKETGDTEIVRSYLTIPLNVMVDCQKKYGAKWKDNVEAYLKEKELIESETQLLFILSPNDLVYLPTEEDPHNVSIDRQRIYKFIDPNLNKGNFVPYSSANVIFSVKFTDQKKVGLSYPIQDEFGIGSQASKSPRAITGEMIKETCVPIKVDRLGNVIELNGLKV

SEQ ID NO: 3516 - protein, 1528 aa, unidentified
  REGION 1..1528: note = Description of Unknown: Cas Enzyme sequence
MKKILGLDLGTNSIGWAVVEKEDNCGRIIKSGSRIIPMDAATLGDFANGNTKSQTAERTAKRAARKMRERFLMRRERLHRILHILGFLPKHYEECIGWNLDNDSKHYGTFLEGKEPKIAWRKNENGIYDFLFKDSFYEMLEEFKKRHSIPAHEKIPYDWTLYYLRKKALSEPIEKEELAWIILNFNQKRGYNQLRDEVLVDSTNKREEFVCLTVESVKADETSKDKNVWYEIRFKESDIIYRRKSLYPLNWVGKKRNLIVTTKLDSNGNPKLKKDGSIDYSVKSPNEDDWALQKIKTEQDLEASHLTVGQYIYNALLSNLSEKIRGGLVKTIERKYYKEELKKILQVQEQFHPELRNKKLYEQCVEELYRNNIAHKKAIMKNGFEYLLLDDVLFYQRPLKSKKSLIDNCPYESHKGVDKRTGEICIYPIKCIAKSNPYFQEFRIWKFLSNLHIIANSKAVNGHIVTDVDVTEDFIPNDDIRCKLFEWLNDKDYIQESDLLTFFGIKKKEQKKYRWNYVSDKRYPMNSTRHSLLRKMQKGEVLSRETEQILWHLLYSTKSKSEIDKSLSPKKDGIFNYLIKTGLSEETIEKIKSVKLPDEGYGAYSEKAIKHLLPLMRCGKFWTVNNIQAKTKQRINSYLLGNALNLFSVNVRNRISTLTDITMYKGLPEWLACYIVYGRHSEGNNITKWRTPDDIDIFLNNFKQHSLRNPIVECVVLESLRVVRDIWKRFGDFDEIHVELGRDIKNPSEKRAKLTQQILKNEKANLRIKYLLAEMAKEEYGIQSVRPYSPNQQDLLRIYEEEVLENNEPDKEIQEIINDLSNPSSQPKKSQILRYKCWLDQKYCSPYTGQPVPLSRLFTSDYEIEHIIPQSRFFDDSFSNKVICESEVNQLKGNQLAYVFIKKHHGQTVMLASGRMVRILEVSQYERLVNDTYIKNKRKKLLLDDIPLEFTNRQLNDSRYISNIIRGFLSNIVRDVDSEGTLEREAISKNLVTCNGTITSRLKRDWGMNEIWKEIVLPRFLRLNDLTKRELFTSTNSQGKIIPAMPLELQKGFSIKRIDHRHHALDAIVIACASKEHVNLLSNEYSSPDKKNIKYSLSHKLRKVKEEVVNGRKYNFFKEFIMPWPSFKTDVKVSLQGIIVSFKQNLRVLNQATNLYTKYEDGQKRYIAQHSIEHFAIRKSLHKDTVYGHVNLQRITTVKLKEALKNPSRIVDKKLKKTVKSLIKLHYNEEQLLVYFKNHAYEWKQLDFQKIRIFYFTDEKEMMVATRFCNDLINLFSGKVNKKDIESTINQITDTGIQRILYNYLNANINQLEFAFSAEGLEKMNEDILLYNNGKRHKPIYKVRLFQPKGNKFQIGIRGNNKMKYVVADAGTNLYFAVYQTKEGTRKYRTIPLEEVIERLKQHLHPVNEKDENGNTLLFSISPNDLVYLPNQDESKGNIYLKDINPERIYRFVDSSGSTANFVKASIANVIYHLKKEEAKLFCIGDVIQDELGVGSPQSKNQKAMSGEMIKEICIPLSVNRIGEIVMR

SEQ ID NO: 3517 - protein, 1505 aa, unidentified
  REGION 1..1505: note = Description of Unknown: Cas Enzyme sequence
LKKLTTKKSPPLKDGGLTVKDDDLMFSQRNNPYCDLLKISGAKINFFSENTKCFKRFLYFCGIITKNTINMKRILGFDLGTNSIGWALVNEKENEDEKSSIIRLGVRVTPLTIDEISNFERGKSITTNAERTLKRGMRRNLQRYKLRRDLLIQVLKNNGFIDDDTILSEHGNNTTFETYRLRAKAATEEISITEFARVLLLINKKRGYKSSRKAKSTEEGQLIDGMEIAKKLYDEGLTPGQLSLQLLESGKKYLPDFYRSDLAEEFNKVWNCQHQYYPGILTNHLKEELVGKNKKQTWAICSKPFNIVGIKRDTKGYEQKKENYLWRVKALTQKLDLEELAIVLQEINGQLSNASGYLGNISDRSKMLYFNKQTVGQYQMAELRKNPNYSLKNQVFYRQDYLNEFETIWETQAQYHHELTEELKKEIRDIVIFYQRPLKSQKGLISFCEFESKLVTVEIDGKKKTKAFGSRVCPKSSPLFQEFKIWQRLNDVLVSGNVVPVKELDLFGNVSSFKQGKRPLFQEEKERLFEELNYKESLSKAEVLKILFDKPKEYDLNFKSLDGNTTQSELFKAYQTIIEMSGHGSYDFTKMESHEALRIVKEIFNGLGFNTGILSFDSTLEGHDLEQQPLYRLWHLLYSFEGDKSVMGNELLVKKISELFGFDMEYASVIANVAFKPDYASLSAKAIRKILPHLKDGNEYSVACEYAGYHHSKRSLTKEEIKEKVLKDQLDLLPRNSLRNPVVEKILNQMINVVNGIIETYGKPDEIRIELARELKKSAKEREEMTKSINSVTKLHEEYVEILKGEPFKLSHVSRNDIIRYKLYMELKENGFKTLYSDTYIPKEKLFTKEFEIEHIIPKAKLFDDSLSNKTLEVRQVNLDKRDMTAFDFVSNYFGDSYASQYTSRIENLYNEKVISKTKRDKLLMKEADIPSGFINRDLRDSQYIAKKAREILEELVRVVVPTTGSVTDRLREDWQLVDVMQELNWNKYDKLGLTEIEIGRDGQRIPRIKDWTKRNDHRHHAMDALTIAFTKHNYIQYLNNLNSRVQKSVDEYIDLDMVELSELDKEQRSSVMYAIEKKELQRDRHGRLRFIPPMPLDEFRAEAKRQLENILISNKAKNKVITHNINKIRKKTGFDKKTQPTPRGQLHLETIYGSSKRPVMKEEKINASFNYLKIQTVVKKAYRDALIARLEQFNNDPKKAFTGKNSLEKNPVWIDPNHTWKVPEKVMTRTYETIYTIRKEITPDLKIDKVIDNKIKSILQNRLDEYGGDAKKAFSNLDENPIWLNQEKGISIKRVTITGINNAVALHDKRDKDGKLILDKDGNTQPVDFVNTGNNHHVAIYRKPKLDKDGQVVFDEDGQPIYELDEKVVSFYEATSRAVLGYPIIDKDYKKDEGWQFLFTMKQNEYFVFPQYDENGKMIFNPLDFDEEWYCNPKNYAMISPNLFRVQKIATKNYFFRHHLETTVVEPKELKGITYKPQLGLNGIVGIVKVRVNHIGQIVSIGEY

SEQ ID NO: 3518 - protein, 1547 aa, unidentified
  REGION 1..1547: note = Description of Unknown: Cas Enzyme sequence
MKKILGLDLGTNSIGWAVVNAEEVTRENNSKYLKPDSISSAGSRIIPMSADILGDFDKGNSISQTAERTRLRMVRRLLERNHLRRERLLRVLKVIGFLPEHYDAKVNRYGKFIDDSEPKLPWRKNEQGKMDFIFQASFKEMLADFNLHQPQLLKDGKKIPYDWTIYYLRKKALSQKITKEELAWILLQFNQKRGYYQLRGEEEEEKTNETTEIISAEIISVERKEKDKKYDKYWYEMYLGNGMTYRASFYNDVSSWKGETKDFVLKRTILKDGSTKEELSFLPTTDEIEQMDAQRKAKMYAKIKLRTEKEIEKSDKTVGCFIYDSLLNNPHQKIIGKLVRTVERKFYKEELIKILETQQALLPELKDENLYQRCIEELYTNNEAHRKTLSKPDFTNLFVNDILFYQRPLKSKKSLIDNCPYEYHIDKDGNQHPIKCIAKSNPYFQEFRLWQFVQNLRIYQRERMISDGQQDLFTNKTSGKLQTDVDITSEILQSEEDYVKLFKWLNDRSSIKQDTLLNSYFKIKKEKGKDKYPYRWNYVEEKEYPCNETRAAILTGLSKCNIEADFLTHEKEMYLWHILYSIEDKTELYKALKKFAQKHQLDDSFADVLCKTKPFKKEYGSYSEKAIKKLLPLMRMGSYWNEKLIDSNTHVRIEKIINGEYDEKIKNRVREKTIKLTDIQNFRGLPTWLACYIVYDRHSETKEIEKWEKPEDIDQFLKSFKQHSLRNPIVEQVITETLRTVRDIWKQEGRIDEIHVELGREMKNPADKRRKMTERIQQNENTNLRIKAMLMEFMNPEMGIENVRPYSPSQQDILRIYEENALENLNKEDKDYDFVSKISKVAQPSKSDIIRYKCWLEQKYMSPYTGKMISLSKLFTSAYEIEHIIPQSRYFDDSFSNKVICESEVNKLKDKQLGFEFIKKHAGEIVQLNQGGTVQIMSIEAYERFVKNYYANNPIKKKKLMLEDIPDDFIERQLNDSRYISKVVKGLLSNIVREKLEDGEYEQEAVSKNLISCNGNITDVLKEDWGMKRVWNSIILPRFKRLNQLTGKNCFTTVNKEGHEIPQVPFELQRGFNKKRIDHRHHAMDAIVIACTTRDHVNLLNNEAAHSKHNANRYQLQKKLRRFEKAITAYGKEIEVAKEFIKPWPSFTTDAEQILLNIIVSFKQNLRVINKTSNFYQHFDADKKKSFDRQLKGDSWAIRKSMHKDTVFGEVNLRLKKTVSLNEAIKKPDNIVNKDFKRKVLELLDDGHDAKFIKKYIENNKDIWSDINPAKIEVYYFSKDEKKRNGEPKERYFATRKPLDTSFDEKKIKESVTDTGIQKILLAHLASKDNNPEQAFSPDGIEDMNRNIVTINNGKFHQPIFKVRLYEKADKFAVGQTGNKTKKFVEAAKGTNLFFAVFGTENENKETVRSYMTIPLNVMIDCQKKFGIQWRSSIEDYLREKDMINADAKLLFILSPNDLVYLPQKNDINIDINTLDKTRIYKMVSCTANRCFFIDEKVAKAIVDKVEFTSLNKSERAITGEMIRDTCIPIKVDRLGNIIELNETPKQ

SEQ ID NO: 3519 - protein, 1588 aa, unidentified
  REGION 1..1588: note = Description of Unknown: Cas Enzyme sequence
MYQMFQRKFVILGHNNRKTIDMKKILGLDLGTNSIGWAVVNAKETTRKDNTTYLEPNGISCAGSRIIPMSADILGDFDKGNSISQTAERTRLRMMRRLLERNHLRRERLLRVLKVMEFLPKHYDTKVSRYGKFTDNSEPKLPWTKDEGGKMEFLFQEAFDEMLADFRQHHPQILADGKKVPYDWTIYYLRKKALTQRITKEELAWILLQFNQKRGYYQLRGEEEEEKTNETIDIISAKILSVERKEKDKKYERYWYEMHLDNGMTYRATFYNDVKNWEGETKDFVLKKTILKDGSTKDELSFLPTIEEIDRMDAQRKARMYAKIKLRTEKEIENSHKTVGSYIYDCLLQNPNQKIIGKLVRTVERKFYKDELIKILAVQQELIPELKDKVLYQRCIEELYAANEAHRKSLSKPDFINLFVNDILFYQRPLKSKKSLIDDCPYEIHVGKDGKEYPIKCIAKSNPLFQEFRLWQFIQNLRIYQRERTVTDGQLNLFANTTTGKLQTDVDVTSEILRTEDDYVKLFNWLNDRGSIKQDTLLSSYFKVKKEKGKDKYPYRWNYVEDKEYPCNETRASILSGLAKCNISADILTHEAEMSLWHILYSIEDKAELYKALKKFARKHQLEESFAETLSKTKPFKKDYGSYSEKAIKKLLPLMRMGSYWNEERIDTHVRERVEKIINGEFDENIKNRVREKAINLTNVRDFRGLPVWLACYIVYDRHSEAKGIEKWEKPEDIDHYLRNFKQHSLRNPIVEQVITETLRTVRDIWKQEGRIDEIHVELGREMKNPADKRRQMTERIQQNENTNLRIKAMLTEFMNPDMGIENVRPHSPSQQDILRIYEENALDNLSREDKDYDFVSKISKTAQPSKSDIIRYKCWLEQKYQSPYTGRMIPLSRLFTPAYEIEHVIPQSRYFDDSFSNKVICEAEVNKLKDRQLGFEFIKNHAGEMVQLSQGGTVTIMSVEAYEKFVKDYYSNNRTKMKKLLMDDIPDGFIERQMNDSRYISKVVKGLLSNIVREKQETGEYEQEAVSKNVISCTGSITDRLKKDWGMNDVWNNIVLPRFKRLNELTGKDCFTTYNREGHEIPNMPLELQKGFNKKRIDHRHHAMDAIVIACATRDHINLLNNEAAHSKHNANRYQLQRKLRRFATITINGKEREIAQEFLKPWDTFTSDAWQVLSNIIVSFKQNLRVINKTTNHYQHYEASGKKIFEKQQKGDSWAVRKSMHKDTVYGEVNLRLKKTISLNEAIKNPENIANKEFKKKVIEMLGHGRDAKSIRKYVEDNKDIWSDINPAKIEVYYFSKDEKKRNGEPKERYFATRKPLDTTFDEKKIKESVTDTGIQKILLAHLSAKDNKPEQAFSPDGIEEMNRNITALNNGKFHQPILKVRVYEKADKFAVGQTGNKAKKFVEAAKGTNLFFAFLGTEKENRQNGKKEVVRSYMTIPLNVMIDCQKKYGAQWRINIEDYLREKDMIDADAKLLFILSPNDLVYLPKGDDKECTMPLDGQRIYKFIDPGMNTGNFIPFTIAKTIFSTKFMDQKKIGISFPIQDEIGIGSQGSKSPRASTGEMIKETCIPIKVDRLGNVTEINSSPL

SEQ ID NO: 3520 - protein, 1731 aa, unidentified
  REGION 1..1731: note = Description of Unknown: Cas Enzyme sequence
MKKILGLDLGTNSIGWAVVEIDNEAKLVRIIALGARILPMDAGEISKFENGGKLKSSASERTDSKSIRKNKARYLLRRDRLHCILNLLEMLPEHYKLDIEFINEKGKRSGKIKKGREPKLAYYIDERGKRKFLFKEAYEEMEKEFKSTQPQLFDISSPHHKIKRLPYDWTLYYLRKKGLTQELTKEELAWVTMSFLTKRGYEKVMGQDEKEQKEGELSETINAKVSSIELRGKNANSGLNIYHIKLSDEFGNIVFEYDEESAFQVTYLNELKQIDRVSKFEKNSDERIKSIDVIINEIKPLVISDIINTHERRKENTVFKLLLSSGWEYEYNSKYAPKGKGTSKDFIVSTIFNEKGLMKKRSIKMPNEDDWQLEKLKIETAIQNFNSQKKTIGVASYIYDALLHNPNIKIKAGLVSTIERNYYKEELKAILNAQKIFHPELRDEQKYKDALFLLYPNNKTHRNSLAKQDFSSLLGDDIIFYQRDLKPKKSLIANCKYEYTTYSKDGVQVKVPLKCISKSNPLYQEFRLWQFIKRLRIIQLEAKNSQGEEVVNTDVTERYLSRPIKESLFTYLNNKKEITQDALLKKLSLSPDKYKWNFEEGHKEPCNETRYDFALRLRRIKGFDWEQFLNAKAKVHANKNSSPDLLQDSCSNEYLLWHFFYSVKKKEERVKGLPKLIEKLLTNAGIEASYKNKVVEMLSSITTYPNEYGTYSEKAIKKLLPFMRIGKYWNQKDIERIKTIDIIKPEVLAKENIQGEVTDLQGLWVSSACYIVYGRYSEVSDAKRWTQPDDITNYLQNDFEQNSFNNPVVEKVLRETLLVVRDIWTTYGDIEGTYINDNNKECTSYRKFFDQINIEIGTSLKNNSKKKEKESKRNQENRLANERAIAMLKELKSVYSHAGIEEKSVYQQERMRLLEAGAIESIVYDKDDTRYAYKVPSDEKVLSKKEIKELQKKEIAKISQSEITRYRLWLEQRYISPYTGKPISLSNAFDRTKYQIDHIFPQERITLNSLSNKVLCESYINQAKKAMTGYEFILNCNGKVRYNGKEYAVLQPNEYVENVYKTISDENKREILLSKTIPNKFGNNQLNNSRYVAKLAMGLLSNIVREEGEDEYKSKNVLVISGAVTTKLKKDWQLDDTWNELIKPRFIHLNDLLNTEEFIEHRLIDGHIIEIPNIPNKDINKKRVDHRHHALDALIVALATNSHVNYINNISALDINTDRKKERKDLKAKYMVNKTDEAHPDRQCFLPPMQYKEGGEVISYTYAYSKCSPQMVFKNVVLEALQHTLVTFKQKNRIMRQRMNKIEHPEYPDGRKEEYINLKKNYAVRQSLHKATFYGVRDIMPKAIEEAITKPERIIESRIKLRIQQCISEGKTKDEIITELKKSDSVVYVYEKCATTQWSHEIGYLSGIKEKAEGTDKKKAKSGKSAITREIECIADISIQNILKKHLSKYDSVRIPISEAVNYYDDIIDETQRSLVDEYMKKGTNSKENIDVFIHEKNTDGRIISQNPQIAFSTDGINAMNENIVELNNGKPHKPIYKVKVIQALGKMFPVSEYEPEKIETVKNKQYVISDSGSNNYCGIYKSKENETKIYVPSLRTTIETIRRGDTLFPIRHPDNPDFQFAFTLSPLDLVYIPTEDEIINHYIGDEIDYSRIYVVNDFNDAGIIYFRPYSHATAVTDKEVDLRYDKEGDKIIGSFSDKTAIFDGLTIRDYCIPVKTNRLGMILQIGDKVL

SEQ ID NO: 3521 - protein, 1731 aa, unidentified
  REGION 1..1731: note = Description of Unknown: Cas Enzyme sequence
MKKILGLDLGTNSIGWAVVEIDDEKRIVRIIALGSRIIPMKSDEISEYESGGKLKSSAANRTDDKGRRKNISRALLRRDRLHCVLNLLNMLPKHYKIDIEFVNEKGKRSGKIIKGREPKLAYYTDDTGQNRFLFEQAYKEMEAEFKAIHPEMFYKKGKRTTQIPYDWTLYYLRKKALHFPLTKEQLAWVIMSFLQKRGYEKVMGIEDKEEQKNKKEEKEGELYEEFNAKVSAVELLSKNSANGICTYHIELKDEYGNNIFAYNEDATYQVTKLNEYKKVEKITKLDSEGNVDNTKTIISEIKNIEIVSVTDKNELKSGKRVFEAMLKTGWKFDITSRYAPKIAGTERDFVITTEYNQTGIFHSRSIKMPEKDSKELAKLKTETSLQAFNSDKKTKGVASYIYDALLHNPAQKIKAGLIETIERDYYKQEFHAILECQKLYHSELRNEQNYLKALQLLYPNNEVHRNSLEDKNFSYLLGDDIIFYQRDLKSKKSLIADCKYEYVKFRKEGVEVKKFLKCLPVSNPFFQEFRLWKFIKSLRIIQKEAENEQGEKLINLDVTDEKLTIEKKELLFEKFNNRKEISKSSLLNLLELNSDEYTWNYEESHIQPCNETHYDFVRRLKRIKGFDWATFLSSKSKIHTAKKESGNAELIDGPSNEYLLWHFFYSVKKKEERITGLPNLVEKLLHNAAMEASYKDKIVEMLCTISTYKNGYGRYSEKAIKKLLPFMRLGRFWNQQEVETVKTVGLTKPEILEKLNLSGEISELQDLDESTACLIVYGRYSEASDASHWTQPNDIKNYLLNEFKHNSINNPVVEKVVRETLMVVHDIWTTFGCQDGFIDEEENIPTYKKFFDQINVEIGTSLKKNKKQREAESEQNAENRKANQRAYKMLEELKTVYKQAGIDEKSTYQRDKFKILEEGVIDAISHDKDSTIYDYKVETDVKPLSKKEIMAIINKEASGISNSDIIRYRLWLEQRYICPYTGGIIKLSELFDRTKYQIDHVFPQERITLNSMSNKVICKALANQAKGAMTGYEFILRANGKAYYNGQIVNLLSPTDYVKNIEDNIKDPKKKEIMLSKTIPAKFGNNQLSNSQYIAKLAMGLLSNIVREEGEEEYKSKNILVISGAVTAKLKRDWQLDETWNELILPRFLNVNSLVEESKANYVENRKVDGHDVLIPVIPDNHVDKKRIDHRHHALDALIVALATSNHVNYINNMSALSDVNSSERIKERKDLKAKYMTIKKRADGTKKKFFLPPMQEKKGEAIITYKYAYKDVFENNIFKKVALVALQNTLVTFKQNNRLMRQRMNYIQHPEHSNNLIQAELNEKKNYSIRQSLHKETYYGLREFRPIAIEEAVKKPDNIIEGKIRHLIQQLKELGKSRDEIVNHLKTQHPVVYVHEECLTTQWQEQLVNLAKVKDKENDKKLQKTGKTPIIRKIECIADIVIQNILKRHLAKYDSVSVPVAEAVNCYDDIIDEGQKAIVDEYRTKGSSKETHVDVYVKGKDTKGKPIHHNPQIAFSTDGIIDMNKHIEELNNNKKHKPIYQVKVTQAKGNAFIVSEPEEVGKLLTAKNKQYVITDADSNRYCGIYKDKDGHTKIYVPSLRETITALREGKELMPQYHPNNVNYKFKFCLSPLDMVYMPTKEDIENGQIIDKDIDISRIYVVNDFKGGTIYFRPYYYATAIIKNEIDLRLDDKGNTIGSCADKTAICEGMQIRDYCIPIKTDRLGNILRIG

SEQ ID NO: 3522 - protein, 993 aa, unidentified
  REGION 1..993: note = Description of Unknown: Cas Enzyme sequence
FHHGKRLLYQEEKEQLFRELNYKEKLSKTDVLKILFDDPQNYDLNFKTIDGNTTQAELFKAYQTIIELSGQGNYDFAKMESHKALQIVTEKFNNLGINTSILSFDSTIEGHQLEQQSMYRLWHMLYSFEGDKSIMGNEILINKVSELFGFKKEYATILANLVFESDYASLSSKAIRKILPHLKDGNGYSVACEYAGYRHSKKSLTKEEIKKKELKDHLELLPRNSLRNPVVEKILNQMINVVNGISSTYGKPDEIRIELARELKKSAQEREEMTKNINSVTKLHEEYVKILKAEPFNLPHVSRNDIIRYKLYIELEKNGFKTLYSNTYIRKEKLFSKEFEIEHIIPKAKLFDDSLSNKTLEVRQVNLDKKDMTAYDFVSTNYDDNYILQYTNRVENLFNEKVISKTKRDKLLMREEEIPSGFINRDLRDSQYIAKKAREILEEFVPVVVPTTGSVTDRLREDWQLVDVMQELNWNKYNKLGLTEIITGRDGQRIPRIKEWTKRNDHRHHAMDALTIAFTKHSYIQYLNNLNARIQKGVDDYIDLDMVELSQLNKEQRSSVMYAIEKKELERDKHGKLRFIPPMPLVEFREEAKRQLESIIISNKVKNKVVTKNINITRKRSGTNECVQLTPRGQLHMETVYGKKMRPIVKEEKVNATFDFQKIATIANETYRNALLTRLQQFSNDPQKAFTGRNSLDKNPIWLDFCHTKRVPEKVKTVTYETIYTIRKEITPDLKIDKVIDMRIKAILQERLKEFRGDAKKAFSNLDNNPIWLNEEKGVSVKRVTITGISHAVALHDKRNKNGEIILDKKGQKQPIDFVNTGNNHHVAIYRKQKLDKNGQPQYSEEGEPIYELDEKVVSFYEATSRAMLGYPIIDKEYRKEDGWEFLFTMKQNEYFVFPRYDDNGDIIFNPLDYDEEWYCNPNNYALISPNLYRVQKIATKNYFFRHHLETTVLEPKELKGITYKPQLGLNGIIGIVKIRVNHIGQIVSVGEY

SEQ ID NO: 3523 - protein, 1535 aa, unidentified
  REGION 1..1535: note = Description of Unknown: Cas Enzyme sequence
MKKILGLDLGTNSIGWAVVNADESIRENETIYLKPTGISAAGSRIIPMSADILGDFEAGNSVSQTEKRTGFRGVRRLHERNLLRRERLLRVLKVMGFLPEHFACQIDNYGKFINHGEPKIAWQKGEDGNYHFVFKDSFEEMLEDFAEHQPQLVADGKKVPYDWTIYYLRKKALTQRLKNEELAWLLLQFNQKRGYYQLRGEDEEEQHDKLVEFIAQKVVRVEATDEKKGDDVWYNVYLENGMVYRRTSKMPLDWEGKVKEFIVTTDLEKDGTCKKDKDGNIKRSFRAPKEDDWTLLKKKTEFDIDNSHKTVGCYIYDSLLQKPNQKIIGKLVRTVERKYYKEELRQILETQVALIPELKDSTLYNKCIEELYPNNEAHRNNIAKPNFANLFINDILFYQRPLKSKKSLISDCPYESHFDKDGNEHPVKCIAKSNPLLQEFRLWQFVQNLRIYQRERTVSDGQLDLFGNQSAGKLLTDVDVTKELLKTEDDYVKLFDWLNDRASIKQDTLLNSYFKFKKEKGKDQYPYRWNYVEDKDYPCNETRATMLGGLTKCSIDAGFLTRENEMSLWHILYSVEDKTEIGKALKKYAEKNNLPESFAEVFAKVKPFKKDYGSYSEKAIKKLLPLMRMGKYWSAEAIDDRTKERIDKILTGEYDENIKNRVREKAINLTDINHFRALPVWLACYIVYDRHSEAKEIGKWEKPEDIDRYLKEFKQHSLRNPIVEQVVTETLRTVRDIWKQEGQIDEIHLELGREMKNPADKRKRMTENILQNENTNLRIKAMLMEFLNDPEIENVRPYSPSQQDILRIYEENALDNLTKDDKDFDFVSKISKTAQPSKADITRYKCWLEQKYRSPYTGEMIPLAKLFTSAYEIEHVIPQSRYFDDSFSNKVICEAEVNKLKDRQLGFEFIKNHKGEKVQISQGKVVEILSVEAYEKFVKDHYANNRTKMKKLLMDDIPDGFIERQLNDSRYISKLVKGLLSNIVREKLENEEYEQEAVSKNLISCNGSITDRLKKDWGMNDVWNSIILPRFQRLNALTGKDCFTTINAEGHEIPAMPLELQKGFSKKRIDHRHHAMDAIVIACATRDHVNLLNNEAAHSKHNANRYQLQRKLRRFEKIVIDGKEKEIAKEFIKPWDSFTTDAKQTLENIIVSFKQNLRIINKTTNNYQHYDENGKKVMKKQVKGDSWAIRKSMHKDTVFGEINLRFVKQVSLNEALKNPKRIVNKEFKAKVLELLKENRDAKYIKKYVEDNRDVWSDIDIKKIEVYYYTKETKDRYFATRKPLDTSFNRKKIEESVTDTGIQKILLAHLDAKGGDPEFAFSPDGIDEMNRNIVALNKGTFHQPILKVRVYEKADKFAVGQNGNKAAKFVEAAKGTNLFFAIFGTEKENNGTGETEIVRSYLTIPLNVMIDCQKKYGSQWRNNIETYLKEQQLVADDAKLMFILSPNDLVYLPTKEELKEGIKVIDNKRIYKFVSCTGNRLYVISYSVAKVVVDKVEFTSLNKYEFTDDKTSIKETCIPIKVDRLGNIIELNGKKQ

SEQ ID NO: 3524 - protein, 1395 aa, unidentified
  REGION 1..1395: note = Description of Unknown: Cas Enzyme sequence
MKKILGLDLGTTSIGWALVNEKENDKEKSEIIRLGVRVNPLTVDEKTNFEKGKSITTNADRRMKRSMHRNLQRYKLRRKNLIECLLEHHIISDETLLYEQGNNTTFQTYRARAKAVTEEISLEDFARVLLMINKKRGYKSSRKVKDGEEGELIDGMEIAKRLYEENMTPGQLLLDLYNKGKKNRPTFYRSDLQAEFDKIWNTQSAFYPNILTDDFKSSIHGFNKTQTAGAFYGVHQITTAKNAGKEGYAQALSWRTDALNRQLGIEEVAYILADINGAINNSSKRLAMISDRSKELYFNHQTIGQFLMKRLDENPNNSLTNIIFYRQDYMDEFEVIWEKQAQYHPELTSELKKEIRDIIIFYQRDLKSCKNLVSYCELEHTEREITIGSKEKTILTGCKVCPKSSLLFQDFKIWQILNNLQVSVVGRQRKKIKKDNTQPSLFDDVETSALTRFLTQEEKDILYNELSIKDKMSKKEVLKLLFDNHNSLDLNYKEIEGNRTMAALFKAYQDIISLTGNGEYDFAKMPTDEVMNVTTEIFRGLGYKTDFLTFDPLLEGKSLEQQHAYRLWHLLYSYTGDNSATGNEALLNKIKELCGFEKEYAVILSNIPLALDYGSLSAKAIRKILPHMMKGYEYSEACKMAGYNHSARSLTKEELAKKEYKSCLDEIRRNSLRNPVVEKILNQMINVVNEIVKTYGKPEEIRIEMARELKKSQEERELLDAAIRKNTAESEKLRKELEDEFGIQHVTRNDILRYKLYNELKLNGYKTLYSNTYIPREDLFSKRFDIEHIIPQSRLFDDSFSNKTLEVRDINIEKGNMTAYDYVAGKFDEKYLVDYESRIEELYTQKAISKTKRNNLLMKEENIPSDFLERDLRDSQYIARKAREILEELVPFVVTTTGAVTSRLREDWQLVNLMQELNWDKYEALGLTERYTDKNGNIVKRIKDWTKRNDHRHHAMDALTIAFTKRSIVQYLSNLNARSDKSSSIYGIEQKELHRDEKDHKLVFNAPMPLNEFRAETKKHLESILVSIKAKNKVVTKNINKSKTKDGHQNKIQLTPRGALHNETVYGKIRNYEAEYRKVDGKFTEDIILRVSSQKHREALLKRLAEFDNDPKKAFTGKNSLEKNPIWLNEDHSHAVPLKVKLYKIVDVFTIKKAVDKDLKLDKVIDDKVRTILQQRLDEFGGDAAKAFSNLDENPIWLNKEKGIAIKRVKIRGIANGEPIRVKRDVMGNIIKDENGNPIPNDFVNTGNNHHVAVFRDASGKLQEHVVSFYEATTRAILGYPIVDKEYNRSEGWEFLFSMKQNEFFVFPNEKTGFSPQETDLMDANNWSTISPNLYRVQKFTTGDYGFRHHLETNVESENVLRDITWKRIRSVQGLDGVVKVRLNHLGEIVAIGEY

SEQ ID NO: 3525 - protein, 1398 aa, unidentified
  REGION 1..1398: note = Description of Unknown: Cas Enzyme sequence
MKKILGLDLGTTSIGWALVNEKESESEQSSIIRLGVRVNPLTVDEKSNFEKGKSITTNSDRRMKRSMHRNLQRYKLRRKNLIECLIEHHIINKDTPLFELGNGITFKTYRARAKAVTEEISLEDFARVLLMINKKRGYKSSRKVKDNEEGELIDGMEIAKRLYDENLTPGQLLLELHEKGKRTRPVFYRSDLQAELDKIWKIQSTYYPNILTDDFKTSIRGFNKTQTSGAFYGAYKIYTAKNSGKEGYIQSLKWRTEALSHKIGIEEVAYILADINGAINNSSKRLAMISDRSKELYFSRQTIGQYLMQHLDENPNASLTNIIFYRQDYMDEFEAIWEKQAQYHPELTAELKKEIRDIIIFYQRDLKSCKNLVSYCELEHQEREVVIDGKKKMIFTGCKVCPKSSPLYQDFKIWQILNNLQVSVIGYQKKKIKKEASQLSLFDDIETGSLNRFLSQEEKDILYHELSIKEKMGKKDVLKLLFDNPKDLDLNYKEVEGNRTIALLFKAFQDIISMTGNGEYDFSKMPTDDALSITTEIFRGLGYKTDYLTFDSLLEGKALEQQPSYRLWHLLYSYTGDKSTTGNVALLERIKDICGFEKEYANILANVSLPLDYGSLSAKAIRKILPHMMKGYEYSEACRKAGYNHSARSLTKEELATKNYKTHLDEIKRNSLRNPVVEKILNQMINVINEVVTTYGKPDEIRIEMARELKKSQEERQLLEEAIRKNTTESEKLRQELETEFDIQHVTRNDILRYKLYNELKLNGYKTLYSNTYIPREELFSKRFDIEHIIPKARLFDDSFSNKTLEVRDINIEKGNMTAFDYVAGKYDEKYLSDYESRIEELYSQKVISRTKRNNLLMKESEIPSDFLERDLRDSQYIARKAREILEEMVPHVVTTTGAVTSRLREDWQLVNLMQELNWDKYENLGMTERYTDKNGNIVKRIKDWTKRNDHRHHAMDALTIAFTKRSIVQYLSNLNARSDKSKSIYGIEQKELHRDEKDHKLVFNAPMPLNEFRAEAKKHLESILVSIKAKNKVVTKNINRFKNKEGQQQKIQLTPRGALHNETVYGKIQNYEAEYRKVDGKFTEEVILRVSNQKYRHALLERLAAFGNDPKKAFTGKNSLEKNPIWLNANHSHCVPAKVKLYKIVDVFTIKKAVDKDLKIDKVIDGRIRQILQERLNEFGGDASKAFSNLDENPIWLNQEKGISIKRVKIRAKVSSDTSVPLHIKKDMYGNIMKNKDGQPIPIDYVNTANNHHVAIFIDEDGNWHEHVVSFYEATASALLGLPIVDKDYKREEGWKFLFSMKQNEYFVFPNEKSGFVPSEIDLTAPENYHLISPNLYRVQKFSSSFYVFRHHLETNVDESNELKDLTWKRITSIKNLEGIVKVRVNHIGQIVTVGEY

SEQ ID NO: 3526 - protein, 1533 aa, unidentified
  REGION 1..1533: note = Description of Unknown: Cas Enzyme sequence
MKKILGLDLGTNSIGWAIIEKDADNGRIIKTGSRIIPMDAATLGDFANGNTKSQTKERTSKRAMRRIRERFLLRRERLHRLLHILGYLPKHYEERIGWDIEQDTKHYGTFLEGEEPKIAWKKNNENKFEFLFQNSFNEMLVDFIKYHPDFNTEEKKIPYDWTLYYLRQKALTQPITKEELAWIILNFNQKRGYNQQRDEILESSDGKKEEYLCLTVSSVTPDSDAKGKDIWYNIRFENSDIIYRRKSRFPLNWVGKKRDIIVTTKLDEDGNPKLKKDGTIDYSVKSPNEDDWALLKIKTEQDLNASHQTVGQYIYASLLANPAEKIRGGLVRTIERDYYKDELKKILEKQREFHKELSDRTLYEQCINELYRNNETHRKNIAKNDFTFLILEDVLFYQRPLKRKKSLIDNCPYESHKGVDKETGEICTYPVKCIAKSNPYFQEYRIWKFMSDLRIIENTKEINGHIQTDIDITSELLPDFDSWSNLFIWLNDKGYVTQSDLLAYLGIKKKEQSKFRWNFVTDKHYPMNSTRHAILSRMKEGEVLNRELEQAIWHLLYSTKSKAEIDKSLSAYNKTSTIFNKLIESGISIESIEKIKSIKLPDEGYGSYSEKAIKKLLPLMRCGQQWNENNISPTTCQRIKDFMQGKCQEQFSDNVWNLISSMRDIRQYQKLPEWLACYIVYGKHSEASEIIKWSSPDDINIYLNNFKQHSLRNPIVESVILETLRVVRDIWKRFGDIDEIHIEMGRDLKNPSDKRAQITQRVLQNENTNIRIKALLAEFLAKEYKIDNVRPYSPSQQDLLRIYEEDVLAHHEPDEEIQEIINTLSNPTKQPSRSQVLKYKCWLDQKYCSPYTGQPIPISRLFTSDYEIEHIIPQSRYFDDSLSNKVICEAEVNKLKDNQLGYEFIKQHHGQTVQLASGRIVRVLEVDQYERLVKDNFSHIKRRKLLMDDIPTEYIQRQLNDSRYISKVVKGLLSNIVRATDEEGNLEREAISKNVITCNGSVTSRLKRDWGLGEIWNKIVLPRFKRLNEITGRDCFTATNTHGQEIPAVPLELQKGFSIKRIDHRHHALDAIVIACTTREHVNLLNNESALPENQANKHALSRKLRICEDIVINGKKRTVYKEFTMPWRNFKTDTLKSLQEIVISFKQNLRVLNKATNIYSKYENGEKTLAVQHSHNHFAIRKSLHKDTIYGHVNLQRTTTVSLKEALKDVNHIVDKPLKKKIKELISAHFNEKQLQAYFKDYAYEWKGYDFKRVEVFYFTDEKEKMVATRFCNDLVSIFSGKNKKQDVEKVIEQITDTGIQKILTNYLNANLENIEKAFSAEGFEKLNEDISLYNNGKHHKPIYKVRLFQPKGNKFVIGTTGNNNKKYVVADSGTNLFFAVYKTPEGNRKYKTIPLEEVITRMKQKASIVNNIDEEGNLLLFYISPNDLVYLPTPDEIADGHSQFDNIDVNRIYRFVDSSGTTANFVQASIADVIYHLKKDQAELFCNGDIIQDELGKGSPQSKNQKAITGEMIKDYCVPLAVNRIGEIKLK

SEQ ID NO: 3527 - protein, 1533 aa, unidentified
  REGION 1..1533: note = Description of Unknown: Cas Enzyme sequence
MKKILGLDLGTNSIGWAVVEKDDNNGRIIKSGSRIIPMDAATLGDFASGNTKSQTAERTAKRSARRMRERFLLRRERLHRLLHILGFLPKHYEEKIGWDMENDSKHYGSFLENEEPKIAWMKNEENKYEFIFQSSFHEMLEDFKKYHPDILSDGKKIPYDWTLYYLRQKALSQPIGKEELAWIILNFNQKRGYNQQRDEELETSDDKKEEYMCLTVLSVTPDEDAKGKDIWYNIRFENSDIVYRRKSKYPLNWVGKKRNIIVTTKLDEDGNPKLKKDGSIDYSVKSPNDDDWALQKIKTEQDLKASRQTVGQFIYAALLANPSEKIRGGIVRTIERDFYKDELEDILQKQSEFHAELKDRSLYEQCINELYRNNEAHRNNIAKNGFTFLILEDVLFYQRPLKSKKSLIEDCPYESHQGIDKETGEICTYPLKCIAKSNPYFQEYRVWKFLSDLRIIANTKEINGHIHTDVDVTSEFLPDNESWSNLYIWLNDKGHVNQSDILAYLGIKKKEQSKYRWNFVADKHYPMNATRHAILNRIKDDEVLTREQEQAIWHLLYSTTSKAEIDKSLSSSDNPSNIYTKLIEGGFTQESIEKIKTIKLPDEGYGAYSEKAIKKLLPLMRCGKLWDEKGIHPSTLQRIDAFSKGEGMDAFSENVNLRLSSMSGIDSFQRLPEWLACYVVYGKHSEANDIVKWKSPDDINIYLNNFKQHSLRNPIVESVILETLRIVRDLWKRYGDIDEIHIEMGRELKNPSDKRAQITKRVLENENTNIRLKTLLAEFLAEEYKIENVRPHSPSQQDLLRIYEEDVLAHNEPDDEIKDIINSLSNPTKQPTRTQVLRYKCWLDQKYCSPYTGQPIPLSRLFTSDYEIEHIIPQSRYFDDSFSNKVICESEVNKLKDNQLGYEFIKQHHGQTVQLASGKMVRVLEVDHYEQLVKDNFAQSKRRKLLMDDIPAEFIQRQLNDSRYISKVVKGLLSNIVRTTDEDGNLEREAISKNVITCNGSVTTRLKRDWGLGEVWNFIILPRFQRLNELTGRNCFTTFNTHGNEIPAMPLELQKGFSFKRIDHRHHALDAIVIACTTREHVNLLNNEAALPNHQEMKHALSHKLRRCEEIVINGKKRRIFKEFIMPWASFKNDTLLSLQQIVVSFKQNLRVLNQATNLYTKYENGQKTLSAQHSSDHFAIRKSLHKDTVFGHVNLQRRTTIKLKDALKDVNRIVDKRLKRKIKELRAKHYNDKQLLVYFKDYAYEWKGYDFNKVEVFYFTDDKEPMVATRFCNDLVSIFSGKNKKQDIEKVIAQITDTGIQKILTNYLNKNLDKIEYAFSAEGLEQMNENIDQYNNGKKHKPIFVVRLFQPKGNKFQVGQSGNNNKKYVVADAGTNLFFAVYQTIENIRKYKTIPLEEVIARMKQKLHPVNDSDEDGNKLLFCISPNDLVYLPTLDELSDGHINYENIDTDRIYRFVDSSGTTANFVPSRIANIIYHLKKDVAEHFCKDDVIQDELGLGSPQSKNQKSITGEMVKDICIPLVVNRIGEIKFK

SEQ ID NO: 3528 - protein, 1349 aa, unidentified
  REGION 1..1349: note = Description of Unknown: Cas Enzyme sequence
YSQFNETSKKWDFIFKKSYLEMVDDFRKNQPKLFFTKANGEESKIPYDWTIYYLRKKALSQKIEKEELAWVLLHFNQKRGYYQLRGEDEQKQEDNFEIISQKIISVTQGEKDKKYNKFEYTCELNNGMLYKASFYSSIEHWIGQTREFILTYNTKKDPKTKSETKVPSLSFLPTVEEIEAMDATKKAKMYGKIKIKTEKEIKDSQKPVGSFIYDTLLQQPNQKIKGKLVRTIERNFYREELKQIIATQVNFHSELQDRNYYKKCCDALYENNEMYKKSIANKDFNYLIVDDILFYQRPLKSKKSEISDCSLEFRKYKLNGEEKIQAIKCIAKSHPLFQEFRLWQWIRDVRIFERNQAADIPVTDQFLSDEKAYEKLFEFLNERKEIDQNGFLKYILEPQKLKGKALNEMVAKYRWNYIDNNEKTYPCNETHNNFKNRLNKVDNVPESFFTQENEIKLWHILYSVRDKHDIIKALKSFIIKYNETNSAQINHEQFVENFQKYPLIKSEYGSYSEKAIKKLLPLMRLGKYWNETDVINNIATYQKNIEAVLAIINKRENTNSKVKEELLQFDGTLDLYKGLRKEIATYLVYQIHSENTDTYKWETANDIAWYLDNKNPKGFKQHSLRNPIVEQVITETLRVVKDIWVKYGAGKKDFFNEIHIELGREMKNNAADRKAITEMNLRNENTNLRIRAILAEFQNMGVERVMPHSPYQLDAFKIFEDGIIKSYSETDLKNEKLEGLDTSILEMSKKSNPTAQEILKYKLWLEQKYRSPYTGAIIPLSKLFTSAYEIEHIIPKSIYFDDSFSNKIICESEVNKAKGNMFGLEYIKNPGLQKVQLSGGNFVTIHTEEQYRKFIETHYANNKAKAKKLLLEEVPEKMIERQLNDTRYISKIVKNLLSKMVRDDNDDDGVTSKNVISTNGTITSILKQDWGLNDVWNDLMFPRFERLNELTKTNHFTYYNEKHQKLLPTVPDELRKAFQLKRIDHRHHAMDALVIACTTRSHINYLNNQTALDKGKNKNEKQISREDLKRKLCFKTKPDANGNYNWQFYKPWDTFTQDAKGNLEKVIISFKQNLRVINKTVNKYYSYKDESGNLRLDKNGSPKKELIKQIKGDNWAVRKPLHTPMPYARKEYQFDILKIDENVGKKELIIDDRIRLQIIDLLAENGNSIGKVQAILKKYPLLDENKLEIIETAFGVKNIKYRKRKSINDLANRSAKGGITTIKQMLKILNKVVDFKLRKDLLNHLNDNQSDIDIAFSLEGIDKFNEKRKVPVYKLPIAESSSSKFKLGDSIGTNHKYAEAETGTNLYFAVYQDKNGKRRYDTIALNLVIERLKQKLSPVPCYFGFRPMI

SEQ ID NO: 3529 - protein, 1670 aa, unidentified
  REGION 1..1670: note = Description of Unknown: Cas Enzyme sequence
MKKILGLDLGTNSIGWALIEIDHENKIVKILGLGSRILTMDAAEIAKFESGAKTESGAAKRTTLRSPRKLNERYLLRRDRLHCVLNLLNALPEHYKLSIEFESAKGKRSGKFKKGTEEKLAYCKDDSGKFQFLFKDAYHQMENDFRKKYPEMFYQKRNGNQTQIPYDWTLYYLRHKAVTDENFELTKEQLAWITLSFNQKRGYEKVIGQDEKVQKEGELTEPFVGKVKFINKVENEDAYEIVLVDNNNDAIELFRYKEETKIPITEIGDLKEVEIVSKYDDEGTIDSKKTEYIINEVREFSIVDVRNTGKKIKENFVFEIELETGWIKEQQSKFTPKWKDTKRDFIIKTKYDESGNRILKGADKGRNINIPKEEDWTLMKLKTETSLTSFNTKNKTKGVASFVYYNLLQNPKQKIKADLITVIERDYYREELDIIYKNQEKFHPELKNRNLYEQAIQLLYPNNNSHQKTIKELDFNHLIKEDILLYQRDLKSKKSLIADCVYEKENYERTDEKTGKKYKNALKAIHKANPLYQEFRLWQFIKRLKIIKKEDIVNDEIKINIDVTSQLLTNNIKEELYAFLNDKENVTEKDILGFLNKKHKDLDINAEKYKWNFASEKEPCNPTRYNFILRTKRIKGFDYRAFLTPENEYSLWHFFYSVKKKDEFNKGLNNIINRLLEKSGLSKEFHAELVKNFSSFGGYTNDYGTYSEKAIKKILPFLRLGKYWNEKEVENVLSKANQEVKQKVLDKEEINGELKDFQGLWVSSACYLVYGRYSEVGEVQFWQSPYDIENYLKNEFRQHSLNNPTVEKILVETLHVVKDIWKYYGEEIGTDEEGRVIYNKLFDRIHIELGREMKKNNKQKEKDDKNNKENRKANERIVELLRELKKSNSSLQEKSPFQQEKLRILEEGLLSSIEYDKDTTEYKLSNGKITKKEIKDITSKELSKISRSDFERYKLWLDQRYQSPYTGKFIKLSDLFDRKKYEIEHVFPQERITLNALYNKVICETEINGAKKAFTGYAFIANAKSKSVFCSAHDAQVEILSIDSYEELVKSNFIGKKRDILLSKEIPEEFTNSQLNNSQYISKMAMKLLSNIVREENDDDNYRSKNVLATNGTITSTLKRHWQLNDAWNEIISPRFKRLNELTNSNLFGDYREINGHQVFINTVPEEANKNFDPKRIDHRHHALDALIIALTTENHVQYLNNISSQEENDEEKLKTRKGIKFQLTNSRKGFNDEKEWYFLPPAQIKNKDGIDVFEYQFGETKSKVFKDIAQKALENTIASFKQKNRVIRQRWNKYLKPIDGKIKIETQEGLKEVVNYNVRKRLHEDTFYGKVKLQNRIITISLEKALIEKFDLVDAAITKEIENLIQNEGTSTQKIIEALKIKYPKVNVYEKYVATRFGNDLESFASIPTDKITKAIHSITDTGIQRILENHLNNYREIIDGKTKFDTENAFSSDGVKELNNNIVKLNNGKFHHPIYKVRTSDAMGTKFSVSEEGQKNTKYVVTAAGSNAFCGFYQKGTDRKYYIPTLRESVESLKQGLEPCPTTHPEDPDYKLIFVLNPSDLVYVPTEEEIDNPNVVDFSKMKKEQINRIYKFTDGSGTTMNFIPVNIANLLFNMSNKEQEKAGFNLPIQNEVGVGSQGSKNQNTFEGIQIKSVCWKLKTDRLGNLSKA

SEQ ID NO: 3530 - protein, 1393 aa, unidentified
  REGION 1..1393: note = Description of Unknown: Cas Enzyme sequence
MKKILGLDLGTTSIGWAFVTEAENEKEKSSIIKLGVRVNPLTVDEQTNFEKGKAITTNADRTLKRTVRRNLQRYKLRRENLISLLKKEGFITEDSVLCEKGNNTTFETRRLRAKAVTEEISLEELARVLIMLNKKRGYKSSRKANSGEEGNLIDGMTVARKLYDEHLTPGQYTYQLLCKGKKYIPDFYPSDLIAEFEAVWNCQKQFYTDMLTDELREALRDKNEKQTWAICAAPLGLKGIKRNGTVADQRVENYRWRTEALTKQLPLEQVVIVLQKINSQIRGTSGYLGAISDRSKELYFNHLTVGQFQMKQLSENPNISLKNQVFYRQDYLDEFERIWEKQAKFHKELTEELKHELRDIIIFYQRPLKSQKSLISYCEFESSQKEVVVDGKKKTITIGLRVCPKSSPLFQCFKIWQSINNLQITGNVIPKQQLDLFGDTTEFDHGTRILTEEEKLDLYRELSIKESLSEAEIIKLLFGGKKGLSLNFHKVEGNRTMATFIKACHTILVINGYNDYDFSKISYDKTIAIITQVFDALGFKSGFLNFNPTLEGKGYERQDAYRLWHLLYSYSDDNSATGNEKLVERIGNLLNMDKESAAAFASITYESDYGSLSSKAMRRILPHMMDGLEYSVACEYAGYRHSRRSLTKEEIMSKPLVNTIPLLPRNSLRNPVVEKILNQMINVVNAVSESYGKPDEIRIEMARELKKSATEREQMTRDIARANIENDKYRKVLQEKFNIQNVSRNDIIRYRLYLELEANGFKTLYTQTYIPREKLFSKEFDIEHIIPQARLFDDSFSNKTLEARSANIEKGSTTAYDYVLAKYGEHGSNGAIAYKERIDHLYKDGIISKTKHDKLLMTTDDIPDGFINRDLRDTQYIARKAREILESTVRVVVPTTGSVTDRLREDWQLVDVMKELNWDKYDQLGLTEIVKDHDGRQIRRIKDWTKRNDHRHHAMDALTIAFTRHSYIQYLNNLNARSDKGGSIYAIEKKELYRDKNNKLRFIPPMPLGEFRVEARRHLENVLISIKAKNKVVTRNVNITRGSDGKTHRTVQLTPRGQLHNETVYGHRCQCIVKEEKVCSAFNMEKINTVSNPQFREALLRRYAEFGDAKKAFTGKNSLDKNPIYLNDDHTKQVPQKVKTVTFEEVFTIRKPIDKDLNIDKVVDAHIREILQQRLSEYGDDAKKAFANLDENPIWLNRERGIAIKRVTIYGVSNAIALHDRRDMQGNKILKSNRTPTPADYVSTSNNHHVAIFLDEKGNLQEHVVSFFEATERSRQHLPIVDREYNKHLEWKFLFTMKRNEYFVFPNEKTGFNPNEIDLLDPNNAAEISKNLFRVQKLATKNYFFRHHLETNVDTPKELSGITYKSQLGLKGIVGIVKVRINHLGQIVAVGEY

SEQ ID NO: 3531 - protein, 1423 aa, unidentified
  REGION 1..1423: note = Description of Unknown: Cas Enzyme sequence
MNKILGIDLGTGSIGVSLRNPNLGSNLFEQLEYFSSDIFQSGVGKDKSGEYSLAAERSSHRQSRRLKASRRRRLWATLELLIEYGLCPLDSLLLKDWETYDKSKALFRSYPNSDKAFSSWIMMDFDCDGIPDYSSPYQLRRELATVQLDFAKAENKRKLGRALYHIAQRRGFKSSKGETMSAQENDNKESFDLSDKDIALEMQKSESKLSQDLKQYMAEHQCHTVGEAFACLEDEGVRVRNSRYAAVRTQYEDEIRFIFDFQNGLSLDSDLFKRLISKKKGVGTIFYRKPLRSQKWLVGKCTLETNKTRCPISHPEYEKFRAFCLLNNIKIRTDYLSDWHPLTVETKRLLFDQIFTKRVKADFPFKDIREKLQILLHQRFDGDCAKERRTINYKDKVSIAGCPVIARLRNLLGDEWEQFHAMGQKQRTSHSKHHIGRHCVEYSAYDIWHICYETDDPEYLTEFALQKLNWDEDQAKKLVRLWSTQAQGYAMLSLKAITNINRFLEMGLIYSDAVLLAKIPDIIPMTNDDIKNLVNVYTDTIKDSITQEKTCNTIVNSLIANYKAMDVTHQFAFHNTSYTLDEADRREVERQIVETIGIKTWGLMDVDEQRQIYDTVERKYQEFFSSTQRDYFKLPKLSDALIEYLTGKYPNIPLRQWKKLYHPSQISLYNVDKVTDSGSEVLRLGSPSIGAMRNPVARKTLNILRRKINAMLDAGLIDVDDTRIVVETTRQFNDSNMRWAIETYQRERENENQEIRKLLEELLPGRKMSESDITAARIAFEQQGVDKYKEKGRVFGIDVSKYRLWKEQGGICMYTGKLISISNLFKEGCFDVEHTIPRSLSFDSSDMNLTMCDTYYNRSIKQNRIPTELPNFEHDAEINGVLYTAIKPRLEAWENRVERLRDNVNFWKAQSRKAFEKSRKDYCIRQRHLWKMELNYWQGKVSRFTMTEVTDGFRNSQLVDTGIITKYATLYLKSLFHNVEVQKGSATAEFRKMLGIQAMDEKKNRSLHSHHAIDATVLTLIPVAAKRQKMLKLYYEIEELKELGLNSDDKKAMLRHEIEECEFEKDVSLIPSYIEEHIVAKHHSEDRTFDHSKRRPDKNNHVAGGDSVRGRLHKDTYYGAIKLPQEIGTGIDRMPMVKDGKFVYLANDAITMVMNVEITSFTSEKDFSIIIDPRVRMSIAKAVEKRLGEGLSFKEAINQPFWLLNDDGIEIKEDKNGKPISPIRHVRCKVKAGRGFMTAEKALEIRQHNFVSTKSNVNVPNKDYKRKVYAQNDTNYLYLLYEGIKKGKVDRKSRIVNLWEATLLKKNYSHQTIDTIIRETSDYNHITEKNVEYRLSAIIRVGDYVLLWKDSPDELRGMDVAHLSTRLYIVVKFNTTGADLLYLKAHLSAKIETDVQLVANNVNCLIEHRDFEIDTLGFITFKD

SEQ ID NO: 3532 - protein, 1525 aa, unidentified
  REGION 1..1525: note = Description of Unknown: Cas Enzyme sequence
MKRILGLDLGTNSIGWAVINQPEPEDNNTDFKRIHSAGSRIIPMDAALIGDFERGNKVSQTADRTQARSVRRLYERAKLRRDRLHRILRLMGWLPAHYAQSLTRYGQFKDDRECKLAWAPGADGKPTFLFQSAFEEMLAEFRQAQPDLVADGKRIPYDWTLYYLRRKALTAPVSPQELAWILLSFNQKRGYSLSRSADDPDAADEDKAPTTRQYFETQRIESIIDTGQTYKENKIFRVRLANGLEGKVFKRTLPDWEGQEKTVIVTIDLDRDGNERYEDDGSLRCRFQVPTEQEWDSKWALVKQKTEKDLADRHLTPGAYIYNTLLATPSQKIIGKLVRVIDRTYYRDELQRILACQAEFHPEFSDRKLYEACTSELYERNDPYRNSIASRNLVYLLSDDILFYQRPLKSKKSLIDNCPYEERAYIDVEGHRQAAPLKCIAKSHPLYQEFRLWQFVANLRIYEREVVDKVNQRFLTDVDVTDQFLPTEASRADLFGWLADKAEITQEALLRYPAFKLDKKQQSLYRWNYVEDKTYPMGETRAPLLKALKQANVDSAFLTAEAEEALWQILYAIDSRAELRTALTTFAQRHNQSAELVDALCKVKPFKKEYGAYSAKAIKKLLPLMRMGRYWSAEAIDPATQARINHIIDGEVDESIRDRVREKSLHLGSLAEFRGLPTWLACYIVYDRHSEARETLRWQCPEDIDAYLSTFRQHSLRNPIVEQIVSETLRLVRDVWREVGRIDEIHIEIGRNMKQTAEQRRRDSERILQNETTNQRIKNLLYELQNSDLQVENLRPFSPSQQDLMRIYEEGAWDNYAGKLDKDTERQLEELRDIKKRLTNDKKKPTPSEVKRYALWLEQNYRSPYTGRVIPLSKLFTPAYEIEHVIPKALYFDDSMNNKVICEAEVNKLKDRMLAHDFIKHNEGRIVTLPYGETVTILSLGSYEKLVKKTYAGNRRKLANLMADEVPAEFTSRQLNDTRYISKFIRTLLSNIVREEGEQEAVSKHIVTCVGSITDRAKKDWGLGDVWNRIVLPRFERMNEITSSTDYTTNTANGHLIPSMPLDKQEGFNKKRIDHRHHAMDAIVIACIDRNIVNYLNNVSASSSGETTRQDLKHLVCVKHKLNEKDYEWILRKPWAEFTEDTYRQLRNIVVSFKQNLRVINKTSNRIQHFDADGKKRTLLQTKGDSWAIRKPLHKETVFGEVNLRQIKSVKLSEAIKNPKRIVEKDLKRQVLKLLAEGYDDKRIKAYFDENQELWRETNLNKIDVYIFTNETKDRYYASRKAIDTTFDVKRITDSVTDTGIQKILLRHLEANGNDSAVAFSPEGIEEMNRNILSLNDGKPHQPIYKVRCYEKANKYAVGQRGNKGSKFVEAAKGTNLFFAIYETQTLDKKTGELVTTRSYDTIPFREVVARFKEGLPAAPCKDGVAPKYVISPNGLVYLPTEAEVKSGKVELPLDRERIYKFVSSAGSQSFFVKEDVSGLVVNNVEFSPLNKMERAITGEMIKETCIPIKVDRLGNVVEIGGEKV

SEQ ID NO: 3533 - protein, 1524 aa, unidentified
  REGION 1..1524: note = Description of Unknown: Cas Enzyme sequence
MKRILGLDLGTNSIGWALIDSDENRIMGIGSRIIPMDAAALSNFDNGNSKSQTSERTRFRGVRRLKERHLLRRERLHRVLSLLNFLPPQYKENIDFDKHPGKFKNGTEPKLAWTKNSSGAYDFLFQESFSEMLNNFAVSQPSLLKGNKKIPYDWTIYYLRKKALREKIEKEELAWLLLNFNQKRGYYQLRGEEEDENPNKIANFYALKVVSVEPTDEKKGKDIWYNIHLENGWIYRRASSIPLDWEGKTKEFIVTTDLDENGKPKLDRDGNEKRSFRAPNEDDWMLIKKKTEADIIQSNKTIGCYIYDTLLQKPDQKIKGKLVRTVERKFYKDELRAILQKQSEFHPELQNKDLFTVCITELYPNNAAYRSSISNNDFTYLFLDDIIFYQRPLKSKKSLISNCPFEERKYLDRNTGEIRIVSVKCIAKSHPLYQEFRLWQFISNLRIYEREKNVDGKLWADVDVTKEFLKDENDYTALFEWLNERKEIKQDSFLKYPNFGLKKNAARYRWNYVEDKPYPCNETRELMLSRLKKTQNVPDDFLSQDVGEKLWHILYSVEDKHEIESALRKFAARYGLANDFVDNFRKIPPFKKDYGSYSAKAIKKLLPLMRAGRYWEEAAIDINTRVRIEKMIDGEFDDTIQDRIREKTKDLNKITDFKLLPVWLACYIVYGRHSEAKETTKWETPNDIDTYLKTFRQHSLRNPIVEQVVTETLRVVRDIWKKYGDISEIHIELGREMKNPAEERKRITKQISENENTNIRIKRLLMEFIDPVYGIDNVRPYSPAQQEILRIFEDGVLNSGVEIPEEISGILKKFKETDSQKQPSKSDLLRYKLWLEQKYRSPYTNEMIPLGKLFTPAYQIEHIIPQSRFFDDSFSNKVICEAEINQLKDSDLGYEFIKKHHGEKVVLSFGRDVEVLSVDAYEKFVKDNYSGSRGKMKRLLMDEIPDQFIERQLNDSRYISRVIKNLLSNVVRENEEAEVTSKNVIPCNGSITDRLKKDWGLNDVWNDIIYPRFERLNQITNSSQFGQWESKNGKQIFQIQIPIEFQKGFSKKRIDHRHHAMDALVIACATRNHINYLNNEAAKPNASGTRYDLRRQLRRIETIQREKIINGQRVLQSIEVAKEFHKPWPTFTQDARLALDKVIVSFKQNLRIINKTSNHYQRFDSSGEKIVDRQMKGDSWAIRKSMHKDTFFGKVNLKRVREVSLVAALDDVNLIVDKKLKSKIQYLTSVGYDKIRIQKYFKENTSSWGKLAKVGVYYLTDELKEKLVAVRKPLDDTFTVKKIEEKVTDAAIRKILLRHLEIYSNDPKAAFSPDGIDKMNRNILALNDGKYHQPICKVRLAETLGNKFQVGNTGNKMNTYVESDKGTNLFFAIYQTDEGKRTFETIPLNIVIDRQKRGQGAVPETNQDGDRLLFWLSPEDLVYLPTKEEVDSEIETDKLKMERVYKMVSCTENEGHFIPVFVANGIVPTLELGSNNKAQRAWTGEMIKDKCIPFKVNRLGEVIKIDGIELWKKSYSSLSDSTLV

SEQ ID NO: 3534 - protein, 1387 aa, unidentified
  REGION 1..1387: note = Description of Unknown: Cas Enzyme sequence
MASYKILGLDLGTNSIGWAIRDMSVQEGNQIIDYGVTIFRKGVGDGKSGEYSLAAERRKNRGRRRLYNAKRYRKWELLKVLIENNMCPLTMQELRLWSVGNWKTIDGKKKNSGRIYPLQNENFQKWLAFDPAYFGEKASSEKGRSERKNPYDLRYELIRYKEKNEAAGKLKIGRALYHLVQRRGFRSNRKNGKSVYAENEELQHLKSEDEHFHIATLAKQMIDAGKRFRASGVIQRKYFEEEFYAICKMQDLPSGLTDKLYGAMYYVRPLRSQKGLVGNCTLESKKPRIPVSHPKFEEFRALSFINNIKWREAGSGAYEPLPMPLKKRIFEELFFRRLESGKNKGKVTSDNYFRFEEIINRYSEGGKYEFNYKNKPSVATCPTIADLMNVFDEEWQNKFIEDDDKYGINWHGLTVNYAVKYGNPGKIGKLRRLRMNEIWHILFDYIQTKDQQEELVKFAMDVLGFDNKKAKDFSEIDIQQGYGSFSYNAIDKILPYLQDGTLYSDAVMLANLKKVLGNSYEAQKAKAKALMIEAIKETDSVKEERNIVNGLIQQYLAEFGTRVKGLDDHIREEAARETNAKLIEYFGEAEWCRKSKEEQERLKNNVLHLYLKFLDGRQEPDEKISNGSGNKPPVGYYKLPRIDDVIKYKLKNVLNVDDESLKHLYHHSDIEMYPKSKSDVLVWIQNTNLSVRQLESPQPPSKGLKNPMAMRTLHELRKLLNYLLRIGKIDPHTRVVVEMARELNDANKRWAIETYQRYREEENKEFAKAIVAIAREKYSNLNENDIENINKVRLWWEQIENNEELYREVKALKEDIEKYRLWKEQECLCIYTGKMISLTNLFDSALTNFEHTLPLSRSFDNSLANRTVCNEYYNTKVKIDEIPTKLANYSHDADGYSAIEPNLKKWKDKVSHLKELIDDNRARSRKAQDVEFKKSLIQKRHLLQLQYDYWKKKLDAFLVTEIPNTWKNSQLVDTQIISKYARAYLKTVFGQVEVQKGTIVNEFKKIFQIKGDEQKDRSKHSHHALDAATLTLIPGSAKRELILKKYYIAIENNSKFYDAPYEGFQPEHFLEIENNIIINHISNDRTLLETRKRARQQGSKTNWIATGDTIRGRLHKETFFGAIKALERDNNGHLIKEHGVYKKIKNAKTGEDEIWIVARKPVKDIKVEKGQIKDAIVDELLKRHIQKQLNSGIALSEVVDFNNKPVRHLRVRVKAGAGYLSKEKAITVKMHTYPSKQQHKQWMLTQNEENYLFLIYEGVDERGKVVRAHKILNLFEVAQLRARSLRQIKSEPGFQTMIKGRTTLELKRILRAGDRVILLNNDRDEIGGRHDLKTRLFTLFKFNEPAPGTAYLYLQSHLEARPDNELGKEEKVFIANTNPGLRLRWIK

SEQ ID NO: 3535 - protein, 1507 aa, unidentified
  REGION 1..1507: note = Description of Unknown: Cas Enzyme sequence
MKKILGLDLGTNSIGWAVINSFIDSEGKESLQGIASAGSRIIPMDAAVLSDFNKGNSKSQTAERTRFRGIRRLLERRLLRRSRLLRVLRIMGFLPEHYAAQLDRYGKFLSGAEPKLAWKKDAAGKYEFLFQVAFNEMLAEFQQSCPDLLKDGKKIPYDWTLYYLRKKALSAPVGKEELAWILLNFNQKRGYYQLRSEEEVEDTKKQVEYHALRVVSVEATGESKGKDKWYNVYLENGWICPKASSMPLDWVGKVKEFVVTTELDDQGNPKLNKNGEVKRTFRTPQENDWGLLKARTQNLIDSSGKTVGTYIYDSLLTNPGLKVRGKLVSTIERKYYKDELYQILNKQAEFHPELKDSALLTECLLELYPQNEPHRNVRSSSDFVHFLIEDILFYQRPLKSQKSQIEDCPYESRVYRKADGTLCRIPLKCVSKSHPLFQEFRLWQFIANLRIYEREKIVNGSLKTDVDVTSEFLKDEADYVALFDSLSKKAEITQKTFLAEPVLNLDKKRRDAYRWNYVEDKTYPCNTTHADMAARLRKAGISEDVLTADMELSLWHILYSISDKKELTKALTKFASQRHLGDAFVAEFEKMPPYASDYASYSLKAIRKLLPLMRMGHYWQEEAIDPLTRNRIEKLLTGEWDEKIHLRVREKSMHLTELSSFRGLPLWLACYIVYDRHAEAREITRWENPGAIDDFLAEFRQHSLRNPIVEQVIMETLRVVRDVWKQEGRIDEIHVEMGREMKNPADKRKKMTAQALENEYTNLRIKALLTEFLNPEFGIENVRPYSPAQQEILRIYEEGVLAETSDKDLPSDIADILKKFKEERIEKRPSRSEVQRYKMWLEQKYRSPYTGKPIPLGKLFTPAYEIEHVIPQSRYFDDSYTNKVICEAAVNKLKGNLLGYEFIKRHHGEVVELGGGESVSIFSVAAYEQFVKEHYANNRLKKEKLLMEDIPDGFIERQLNDSRYISRVIKSLLSNIVREEGEQESTSKNVIVCTGGVTDRLKKDWGMGDVWNQIILPRFRRMNKLTDSKDYTAISLNGNLIPAVPLELQKGFSKKRIDHRHHAMDAIVIACANRNIVNYLNNASALSEARTARTDLQRLLCDKKKTDANGNYQWLIRKPWDTFTQDAYQVLQDIVVSFKQNLRVINRTTNYYQRYDESGKKVFVPQTGGDSWAIRKPLHKDTVYGEVNLRREKTVALKDVLKMPERIVDKSFKYKLKELLAQQYGVKEISAYFEKNKSDWPDIDLKKIKVYYFTGETKDRFFATRKPLEDSFDQKKIENGVTDTGIQKILVNHLLQNGNNAELAFSPDGIEAMNLHIASLNGGKPHQPIYKVRVYEKGDKFAVGDKGNKYKKFVEAAKGTNLFFAVYEYPQIDKETGQVSRKRSFASVPLNQVIDRLKRGLSPAPEDEKGNAPAFVLSPNDLVYLPTKEEREKGVIESVLDKSRIYKMVSCTGNEGYFIPCNISSPIAPVIELGSNNKAQRSWTDDMIKEVCIPIGVDRLGNILLHK

SEQ ID NO: 3536 - protein, 1393 aa, unidentified
  REGION 1..1393: note = Description of Unknown: Cas Enzyme sequence
MKKILGLDLGTTSIGWALVNEKEKDNEKSSIIRLGVRVNPLTVDEKSNFEKGKSITTNADRRMKRSMHRNLQRYKLRRQHLIECLKEHGIINDTTPLFELGNHSTFKTYRARAKAVDEEISLEEFARVLLMINKKRGYKSNRKIKDTEEGELVDGMEIAKRLYDENLTPGQLLLDLYQKGKKTRPAFYRSDLQAELDRIWEVQSVFYPEILNNDFKKHISGFNKTQTTGAFYAIYSISTTKNSGKEAYAQSLRWRCDALKNQLNIETVAYVLCDINGAINNSSKRLAMISDRSKELYFNHQTVGQYLVQCIDHNPNASLKNIIFYRQDYLDEFETIWERQAQYHQELTPELKKEVRDIIIFYQRNLKSCKNLINYCEFEHTEKEILVEGKKKTIMIGCKVCPKSSPLFQCFKIWQVLNNLQVSVVGHQRKRIKKDDFQLALFADTEGEPLQRFLDQEEKDILFKELTIRDKMSKKEILKLLFDNPQKLDLNYKEVEGNNTMATIIKACQEIISLTGNGDFNFSKMPADDVLAVTTEIFSGLGYKTDFLTFNPLLEGKAMEEQPFYQLWHLLYSYAGDNSISGNEALIKKIHDLCGFEKEYATVLANVSMPLDYGNLSAKAIRKILPFMMKGYEYSKACELAGYRHSARSLTRDELSKREYTSHLSELKRNSLRNPVVEKILNQMINVVNEIVATYGKPDEIRIELARELKNSKEEREQMDIAIRKNTADSEKYRKILEEEFGIQHATRNDIIRYKLYNELKQNGYKTLYSNTYIPREELFSKRFDIEHIIPKARIFDDSFSNKTLEVRDINIEKGDMTAYDFVAGKYDEKGVLDYEKRVEELVTNNAISKTKRNNLLMKEADIPSDFLQRDLRDSQYIAKKAREILEQMVPFVVTTTGSITKRLREDWQLVGVMQELNWQKYDSLGLTETYFDKNGNVVRHIKNWTKRNDHRHHAMDALTIAFTKRSIVQYLNNMNARSDKSSSIYGIEQKELNRDNKDHKLVFNAPMPLNEFRAEAKKHLDSILVSIKAKNKVVTKNINRAKTKDGHQHKIQLTPRGALHNETVYGKIKNFEAEYRKVDGKFTEDTVFRVSNRRYREALAQRLAAFGNDPKKAFTGKNSLEKNPIWLNADHSYSVPLKVKLYKIVDVFTIKKAVDKDLKIDKVIDGRIRELLQQRLNEFNGDAAKAFSNLDDNPIWLNKEKGIAIKRVKIRGIASGEPIRVKRDAKGEIMNDEHGNPIPNDYVNTANNHHVAVFRDASGNLHERVVSFYEATTRAMMGYPIIDKDYKQAEGWQFLFSMKQNEYFVFPSDGFNPSEIDLTDPQNYSLISPNLYRVQKFSEGDYFFRHHLETTVETDNSLKNITWKRINSVKSLEGIVKVRVDHIGRIVSVGEY

SEQ ID NO: 3537 - protein, 1226 aa, unidentified
  REGION 1..1226: note = Description of Unknown: Cas Enzyme sequence
MKKILGLDLGTTSIGWALISTDDNNDPFDIYGIGSRIIPMSIDDATQFSTGNAITKNQDRTIKRTQRKGYDRYQLRKKTLTNELFKLNMQPDEKLIKLPVMELWQLRADAATKGKKLTLREIGRILYHLNQKRGYKHARSDEDGDKKQKDYVQNINNRFSALKEEGKTIGQHFAYELKKSGIQTEKGILYTYRIKNQVFPRKAYVEEYDQIMACQKEFYPEILTDSVIEEIRDEIIYYQRGLKSCKHLVSICDFEKRTYINKDGKTVIDGPKVAPRTSPLFQVCKIWESINNISLNNRSGKPYDILPEQKQALFVHMDNNEKLVLADLYRILGISKQDGWWGGKAIGKGLQGNTTKMQLKKALQSCKSAESLLQFNLQNMDSTLVDESTGEIVPIIDPNYQNQPLYKLWHTIYSIKEREELAIVLKKKFGIDDNETMDKLCHIDFIKPGFGNKSTKAIRKILPHLEQGKMYSEACKCAGFRHSESLTTAENQARSLLQHIPQIQKNELKQPIVEKILNQMINLVNRIIDEYGSIDEIRVELARELKQSKDERNATDKNIRKREKENANYASLIEELNVRTSKSRIQKYRLWDESEHKCFYCGQAVNLNEFLAGFDVEIEHIIPKSLLFDDSYSNKVCSCRKCNADKSNKTAYDFMKSKSEDDFAHYLHRIEKYFNENRINRVKRERLLTPIDKIPTDFIDRQLRETQYIARKSKEILQQVCRDVTATSGSVTDFVRRCWGWDEVIHDLNFERYKEAGLTEIKTFNHKDQTHDVEKIIGWNKRLDHRHHAIDALTIACTRQSFIQRLNHLNTERDAIFAEVEKQRDTWKNDYSLLEQWIRERPHFSTQKVRQEINKICISFKSGKKVASTGKRVKYVNGKKVVLQKGVIIPRGALSEESVYGKIKALDVKKSLKFIFENPELIVKQHIKLLIEKRLSKFDGDTKKALASLKKDPIYLDSDKKVLLEYATCFKDEYVLKYPVGSIKAKDVPYIVDMKLRDIIERRLKDHGNNEKEAFKDLANNPIFLDKNKLYPVKTVRCYTGLSAVEAVMYNEDKKAIGFVKPGNNHHIAIYTDKQGNKVEHSVTFWHAVERKKYGIPVVITDPLKTWDDIQEKELPQSFLKNLPFVDWTFNISFQQNEMFLLGMNEDTYRDAIISKDYNALSKYLYRVQKITTGDYFFRHHLETNLDDSASSKEMNRFYRVNSMKSLTSLNPHKIKIDLLGKMVIP

SEQ ID NO: 3538 - protein, 1543 aa, unidentified
  REGION 1..1543: note = Description of Unknown: Cas Enzyme sequence
MKKILGLDLGTNSIGWAVVNAEEKLRDNETSYLQPIGISSAGSRIIPMDEGVLGDFDKGNTKSQTKDRTDKRGTRRLLERYLLRRERLLRVLKLMKFLPEHFASHINEYGKFIDDSEPKIAWRKGSDGKFEFIFKDSFNEMLADFSKNQPQLLAGGKKVPYDWTIYYLRKKALSQRLTKEELAWILLQFNQKRGYYQLRGEEEEEVQDKKVEFMAQKVVRVETTDEKKGDDVWYNVYLENGMIYRRSSRISLDWEGKIKEFIVTTDLEKDGLPKKDKEGNIKRSFRAPKEDDWTLLKKKTEFDIDNSNKTVGCYIYDALLQNPNQKIVGKLVRTVERKYYKDELRQILDIQRALMPELQDENLYKACIEELYPNNEANRNNIAKPDFANLFINDILFYQRPLKSKKSLISDCPYESHFDKDGIEHPIKCIAKSNPLFQEFRLWQFVQNLRIYQRERTISDGELDLFGNASSGKLETDVDVTAELLKTEDDYVALFDWLNDRATIKQDTLLNSYFKFKKEKGKDQYPYRWNYVEDKEYPCNETRAEILKGLGKCGVDVNFLTKEQEMQLWHILYSVEDKIEIGKALKKYAEKNSLPESFADVFAKIKPFKKEYGSYSEKAIKKLLPLMRMGKYWSADAIDANTKDRISKIITGEYDEKIKNRVREKAINLTDENHFRGLPVWLACYIVYDRHSEIANNKPWEKPEDIDKYLKDFKQHSLRNPIVEQVVTETLRTVRDIWKQEGNIDEIHVELGREMKNPADKRKRMTETIQQNENTNLRIKAMLMEFMNPEMGIENVRPYSPSQQDILRIYEENALDNLTKDDKEFEFVSKISKTAQPSKSDIVRYKCWLEQKYCSPYTGEMIPLAKLFTSSYEIEHVIPQSRYFDDSFSNKVICEAEVNKLKDRQLGFEFIKAHKGEKVQLSQGKTVEILSVEAYEDFVKKHYANNRTKMKKLLMDDIPDGFIERQLNDSRYISKLVKGLLSNIVREKLPNGDYEQEAVSKNLISCNGSITDRLKKDWGMNEVWNGIILPRFRRLNELTGKDVFTAISAEGHEIPAMPLELQKGFNKKRIDHRHHAMDAITIACATRDHVNLLNNEAAHSKHNANRYQLQRKLRRFEKTVIDGKEREVAKEFLKPWDSFTTDAKRALENIIVSFKQNLRVINKTTNHYQHFDESGKKVLKKQEKGDSWAIRKSMHKDTVFGELNLRFTKEVSLNDALKNPKTIVNKEFKHKVQELLAQGRDAKSIKQYVEDNKDVWSDIDIKKIKVYYYTQDIKDENGIVKERYFATRKPLDSSFNKKKIEESVTDTGIQKILLAHLEAKGGDSEFAFSPDGIDEMNRNIVVLNNGKFHQPIQKVRVYEKADKFAVGQNGNKSAKFVEAAKGTNLFFAIFSSEKLNKETGEMESVRSYLTIPLNVMIDCQKKFGSQWRNNIEAYLKENNLVSSDVKLLFILSPNDLVYLPTKEEMKDGIKAVDKTRIYKMVSSSGNQCFFINDKVAKTIVDKVEFTSLNKAERAITIEMIKEVCVPLKVDRLGNIVELNGQKL

SEQ ID NO: 3539 - protein, 1258 aa, unidentified
  REGION 1..1258: note = Description of Unknown: Cas Enzyme sequence
MKNILGLDLGTTSVGWALIKVDDKNNPIDIQDMGVRIVPLAENEGDKFTKGQDITVNADRTRARGQRRNYDRFQLRRQALTEKLRSLNMLPDEHLIKLPIMELWQLRANAVTQKVSLNELGRILYHLNQKRGYKHSRTDAKDSKQRAYVKEINNRYGELIKSGMTIGQFFAKKLSETAVTVEGKTFYVYRIKDQIFPRKAYEEEYDSIMKCQQTFYQEILTNDVIDEIRNRIIYYQRDLRSCKHLVSVCEFEKRCFYDAEGNVKRNKKGEIIYDGPKVVPRTSPLFQIFKNWQSINNLRFHNRKNEYLYITKEQKQQIANIMDIHKVLKLEDVQNVLDITSESGWYCDKAIKAGIKGNTTKHAILSVLSSLPQSKITELTRFNLETEATNLVDEETGEVLVRIKSTYQEEPLYRLWHIIYSIKNEDERFNAISNLLKEFCIEDDSIASALKDLDFVTPGYANLSAKAISKILPYMMEGIDYSESCAYVGYNHSDSITKEENKRRELLDQIPALKKNELRQPTVEKILNQTINIFNQINTNLKKNGERIDEVRIELARELKQSKDERKETENGIRKQQKMNDEYANILKEEGIRPTRNRVLKYRLWRESNETCFYCERPINFNEFLKFSDIEREHIIPKKLIFDDSFANQVCSCRKCNKEKGGRTALDYMQTTPNLQMYLDKVDKMFQEHKISGKKHLHLLASYEDYLIRKKEGKETKDDIKIWETPIERQLRLSQYISRKAQELLRTACRDVIATSGSITDLIRHTWGYDTILHELNFDCYKKAGLTEFIKDEKTGKIREVIQDWTKRLDHRHHAIDALAVACTSRSIIQRINTLHASREDIRKEIKSTRKEWQENDLLQQWIKEKMPFDRKYVLHKVASILVSMKAGKKATVPGKRKIYKNGKPTIIQSGMRIPRGQLHEQTVYGAITQFSKNNKGKVFQTKEIVTRYKMGVGSMGYVFSGKETCDVINDKKNKSLVIIDGIEKAINYIVDRHIRDVVRNRLNEAFPENETYRSEAEKALAEGKKYDGKERCQKALDQLRKLSEKPLYADKNKNIIIKSARCYTGLSAVQPLRYNNNHEPISYVLTKNNHHVALYKDENGKFQECIYTFWQVVERSKFKLPLIITDTKALWNEIQQRENKGDTFPDSLIQSLPLPNWTFIESLQLNDMFVMDINDDDFEHYIATNNYEELGKKLYRIQNISSFDYSFRLHTDTTSKTTSDAALSKRYIRIKSIKAYIEHNPHKVKISLLGKIIRNTE

SEQ ID NO: 3540 - protein, 1392 aa, unidentified
  REGION 1..1392: note = Description of Unknown: Cas Enzyme sequence
MKKILGLDLGTSSIGWAMVNEKENEGEQSSIIKLGVRVNPLTVDEQCNFEAGKPITTNADRTLKRSMRRNLQRYKLRRESLLEILRGNHFITDETILAEDGNRTTFETYRLRAKAAVEEISLEELARVLLMINKKRGYKSSRKVNADDDGKIIDGMGIARKLYDEDLTPGQYVLNLMRTGKRYVPDFYRSDLIAEFYKIWNFQKQFYPGILTDELREELKNKNKKQTWAICAKSFSLVGIKRETKGSELKKENYQWRVESISKQTDLERLTIILQEINGQISSSSGYLGEISDRSKELYFKRQTIGQYLMERLDTNPNYSLKNKVFYRQDYLDEFERIWETQAKFHAELTNKLKREIRDVVIFYQRPLKSQKGLISFCEFENKQIEVTVDGKKKRKTIGMRVCPKSSPLFQEFKVWQILNNIQVSGKIIPVQNTDLFGTTSCMEQGKRVLYQEEKETLFYELNIKEKMSKNEVLKLLFKNYKELDLNYKEIEGNRTMAALIKACQTIIDMSGHGEYDFSKMQTKDVMHIIETVFRGLGFNTDILHFDASVEGKAFDKQPAYMLWHLLYSFAGDNSTSGNEKLINKISELYGFDKDYAQIIAGINLQQDYGSLSSKAMRKILPHMKEGLEYSVACGYAGYRHSSDSLTREELDNKVLKDRLELLPRNSLRNPVVEKILNQMINVVNSVVEEYGKPDEIRIELARELKKSASEREELTKAINKTTKEHEEYKKILQREFGIVNVSRNDIIRYKLYMELKDNGFKTLYSNTYIPQEKLFSKEFDIEHIIPQAKLFDDSFSNKTIESRAINIEKSNATAYDFVCSKYDAEEIKRYEVRIEELFRKGIISKTKRDKLMMKEADIPDGFIERDLRDSQYIAKKAREILCDIAREVVTTTGSVTSRLREDWQLVDVMKELNWDKYDRLGLTEIIEDKDGRKIRRITDWTKRNDHRHHAMDALTIAFTKRSYIQYLNNMNARSDKSSSIYAIEKNELYRDNGKLKFCPPIPLDVFRAEAKHHLDNILVSIKAKNKVVTRNLNVTKTRNGKNKKMQLTPRGQLHNETIYGKIKQYVTKEEKVNASFTEDKIATVANQKYRMALFERLKRYNGNSKKAFTGSNTLQKNPIFLDDMHTMTVPEKVTTVTFEDVYTIRKEISPDLKIDKVIDVHVREILKVRLAEYGNDPKKAFVNLKDNPIWLNKEKGIDIKRVTIRGVSNAVALHDKHDNKGHFVLDNDGGKQPTDFVSTGNNHHVAIYRDAEGNLQDTIVSFYEATMRANMGIPVVDKDYKKSEGWQFLFTMKQNEYFVFPNQETGFNPNEIDLLNPNNYAEISKNLFRVQKLFKAIGREYVFRHHLETSVDDNNKLQEITWKRINSLNKLKDIVKVRVNHIGQIVAVGEY

SEQ ID NO: 3541 - protein, 1244 aa, unidentified
  REGION 1..1244: note = Description of Unknown: Cas Enzyme sequence
MKRILGLDLGTTSIGWAVINVDDNLKPVSIESMGSRIVPLSSDDTNEFTKGNAISKNQSRTERRTSRKRYDRYQLRRKYLTAELRKLKMLPDERLIKLPTLELWELRANAASKGHQLTLPELGRVLYHINQKRGYKHAKSDDSSDTKQKAYVAEVNARYSMIKEKNQTIGQYFAEKLKESEVVTPKGKFYTYRTKEQVFPRKAYEAEFDQIMECQKVFYPNLLTEKEISKLRNEIIFYQRNLKSCKHLVSVCDFEKKEYKNKEGKIVFGGPKVAPKSSPLFQICKIWEEVNNLTLKNRKNEELYISLEQRQAMVDFLDTHEKMTLNDMYTILGISKKDGWWGGKAIGRGLQGNTTKIALMNALGNSENVKSLFQFNLHKIDSQLVDEVTGEIIQIIDPKLEKEPLYDLWHTIYSISDKEEFAKALKKKYNITDETIINGLYSIDFVKPGFGNKSAKSIRRILPYLQEGLKYSDACEYAGFRHSESLSKAENETRTLLDELPHINKNELRQPIVEKILNQMINVVNALMNEYGKFDSIRVELARELKQSKDERNTTFLQNEAMQRLNESIAKRLVSENINPTKRIIDKYKFIFPTKGCFDKRTGKFITKNFESLSTVNRCIYCGQSFSLSEALNGDGYEIEHILPRDLICDNSQNNKVLSCRKCNSIKSNKTAFDYMRTQDKNAFEAYLERVESWYKDGIISPAKRERLLLSHEDYLERKRIGKETDEDKKYWEEFVSRQAGETQYISRESIRILKQCCRNVNATSGSITATLRHLWGYDEVLHQLNFERFKNAGLTETVTWESNHGKNKHSKEQIIDWSKRVDHRHHAIDALVVACTQQGFIQRINTLNADETKDLMKRQIETVGVKYDEKKILLDKYLTSLAPFKTQTVANAASNILVSFKPGKKTATTGKRIEYRNGKKHVVQKGIIIPRGALHEEGVYGEIEINGKKHIVKKYKLGKGAQGFVFTGKETYTEKINKKTGEIQIEDKIKNVLDSIVDGSIRAKVLQRLNQGFEEGKDYRNDVKKALENLNDLDKNPIYADDNNTIPIRTVRCITGLSAIVPIKYNDQGKSIGFVKPGNNHHIAIYQDNEGNLREHSVTFWHAVERKKYGVPVIIDNPIQVWDSIKDRQLPESFLEKLPEVNWTYKISLQQNEMFILGMEDDAYDYAIRNQDYSTLGQYLYKVQNVSEKQYRFSLHNMTKFDIKRMNKADKCFYNIQSIDALFRLHPHKVHISLIGKIKEIQE

SEQ ID NO: 3542 - protein, 1487 aa, unidentified
  REGION 1..1487: note = Description of Unknown: Cas Enzyme sequence
MTKTILGLDLGTNSIGWALIDQDFENKNGIIHGIGSRIIPMTQDVLGKFESGVSISQTAERTGFRGIRRLRERHLLRRERLHRIFNLLGFLPTHYANQIDFEKRLGQFKTNTEPKLVYDETNQFIFKKSFEEMLAEFKTAQPQLFYTKANGKETKIPYDWTIYYLRKKALTKKIEKEELAWLLLNFNQKRGYFQLRGEEEEGDKKETEFEIINQKVISVKKGEKDKKYDKYEYVVELENGLIYRASFYSSIEHWVGTYREFTYQTTQLKDGTTKVSLSFLPSFDEIDKMDATKKGKFYKKIKIKTENEIDISGKTVGQYIYDTLMQNPTQKINGKLVRVIERKFYKKELEQILKTQQSFHAELQDKNLYNYCLEVLYEYNEAHRNSIANRDFVHLFLNDIIFYQRPLKSKKSLISDCKFESRTFIKDGKKETEALKCIAKSHPLFQEFRLWQWIKNLHIFSIDNNETPITHQFLKSEDDYVNLFEFLNDRKEIDQEALIKFLLTPLKLKPKELKTELEKYRWNYVQGKPYPCNSTRNLMLTKLDKCKNIPSNFLSKEIVEHLWHILYSVNDPEEVKKALQKFAIKHGLENDFVEQFLKHPPYKNEYGSYSYKAIKKLIPLMRMGKYWYEEDIHPQTKNRIEKIITGEFDENIKNRVREKAINITDINQFKGLPLWLVSYIVYDRHAEETNLEKWNAPQDIEAYLKNFKQHSLRNPIVEQIITETLRVVKDIWKHYGNSKENFFDEIHVELGREMKNDKKERERLTKVVTENENTNLRIKALLAELMHDSKVENVRPHSPMQQEILKIYEDGVLNSGIEIEEDILKISKTPQPTKSDLIKYKLWLEQKYRSPYTGAVIPLNKLFTPAYEIEHIIPQSRYFDDSFSNKVICESEVNKEKDNMLAYEFIQNNEGKKIELSGGQFVTLFTAHQYEEFIKNNYAKNNGKAKKLMLLDIPEKMIERQMNDTRYISKEVKNLLSKIVRQQNEKDQGTTANNLISTNGAITSILKQDWGLNDVWNDLMLPRFERLNELTDTTNFTYFNEKHQKNMPTVPDELSKGFNKKRIDHRHHALDALIIACASRDHVNLLNNQSAKSDTKRYDLQHKLRHTEKWTDKSGTVRDKFTEFKKPWETFTKDAKDQLETTIISFKQNLRVINKTVNKYQRWENVNGKMEKVIATQTKGDSWAIRKALHKDTVSGKVELPRVKVAKNKILTATRKLLDTSFDLKTLESDCITDTGIQKILINYLKAKGGDPEIAFTPESIEEMNNNISNYNNGKMHKPIYKVRVWEESSRFQIGAKGNKKDKYVVSADGTFLFFGIYQNQNCERKYYSPTINEVIENQKLGSLEKKKPNNSSLPLILIDEKTQDTYTLKFQLSPNDLVYIPTQDEINNPSSFNLNCLSKVQINRIYKFVDGSGTTANFVPYFYSSVILNMNKKEQTKRNLNFLIQNELGVGSPQSKNQNTIDGIQIKSCCWKLEVDRLGNIIKIIQ

SEQ ID NO: 3543 - protein, 1410 aa, unidentified
  REGION 1..1410: note = Description of Unknown: Cas Enzyme sequence
MRKYLGLDIGVSSVGWALIEHNYGEDTEKREGNIIAAGSRIIPMAEDEINNFNKGTTITKAAERRQSRMARRLLQRYRLRRTRLIWVLKHLQWLPESFPLTFKGLEKYNINDFLPVSDQSYQEALQYFNTKSVSQDWLVYFLKKKSLTEKLTKEELARILYHYNQRRGYKSTRKERRLGEEAEKKADKEIAYLTIQSITEVEKTKKGATIFEVKANHPTQGLITGSYAKNTKPDWENKVIELEVTTKTLKDGSITFSLREPEKSEWQELKTAFETILTKSGFTVSEFFLNEIRQNHDYVIKNHIFDRKFYIQEFRRVLECQTQYYPELTDLNTSKSIAPLLYKHNVQKQQLLSSTPLKDILESDIIYFQRSLKSQKHSIANCTFEVKEGQVTVSNEKVFFGVKVAPKSTPLFQEFRIWQFINNLKIYKESEIDAKGRVKTKVDYTAKLFTVEIKESIFDYCDERKEVEINKLYKIIGVSDKEYTFNYPNELKIKGNETKHFFKSSFDKFKFDGTHLLSNQTAITEMWHLCYSVDEEATIARILKQKYHLPEDVAIHISNKALPLDSQYASVSTKALKKILPLMRIGKYWDKSELPNCALSRFNRVLTGETIEGEDPKDAIENILKLEITSESQLRGMQTHVACYVVYGRHSERLNTEKYESYEQIQVLKSGTLRNPVVEQITNETLRVVKDIWRIYGRPDFINIELARELKKNTDERKKIFDRQSKNKRENERIVQILEEYTSAYKTDPNSISQANKLKIWKDTSPQEAPDKKDITSYKNWEDQAHISPYTGKPIPLSKLFTPDYEIEHIIPRSRFFDNSFSNKTICETEINKLKGDRTAFEFIQEFGGTTQNLGGKAFRILTMEEYLNHIETYVRPKNKRRFELLRMEDIPHDFVERQLNDTRYITRTVASLLYPIATDSIIFTSGEITSELKEKWGLHKAWKDILLPRFQELEKVTGKKFIEKLPNNDYKFTVEHKRIDHRHHCLDAIIIALTSRSIIQYFNTLNATDKNAYFRKKYLLNNSQRKLVLPWATLVPDVKQVLSEVIVAHKITNKVLIKRTNKYEKWVLDETTQTYKKAIQRQNGVTYGLRFSLFKEPLGIVKIAEKKSVKLDKAIETQLNFILSGAIPTNSRIAERDIRKVVSEVLKNTGFVLEETKKYFKENPLLDIDGNALKSIDIIEFNEWAAKRTFLNEKFGLKQINKIPYAYHSKLALALKNHLQMFDNDSKKAFEGEGLEQFHTSYGKKLTKVVTMESIGRKIKSSDGTKLAEPDKGANNYFIINCDSNKNKRNYYTPNILDVINSFKDDTPLIEKESRNNFVLSPGNLVKVVNDANNQADIKSDNIYKVVRVTKSECYFVKHTFSFPIDRTITDEDKKEKEREKTADGVVIKNNCLKLNVDRLGRIISVLKE

SEQ ID NO: 3544 - protein, 1490 aa, unidentified
  REGION 1..1490: note = Description of Unknown: Cas Enzyme sequence
MKRILGLDLGPNSIGFATVIIDGENSHIELANSRIIPMDAAKLSDFEKGAPQSQTHDRTMWRGIRRLFEREKLRRERALLILNHLGWLPEHFAKGIDFSGKGAKLDYDTEPKIAWQPCADNKYEFFYQEAFQEMLHDLRSTNPAAFPLDKKVPYDWTIYYLRKKALTRKASKYELAWIILNFNQKRGYNELRGELDNDSSKQEEYYALKVINVEAAEKGKGNNIWYNLTLENGWVYKRQSAIPLFDWKDTVREFIVSTDLDKDGTPKLDKEGNVKRSFRAPKDDDWALKKKRTESEIQKSGKTVGAYIYDALANNPSQKIKGKLVSVVERKFYRQELLQILQKQAEFHPELTDKRVYEECVRILYKSNEQYRQSIAGKDLIYLFTENILFHQRPLKSKKSLIADCPLEHYSFIKDGKEISAPIKCIAKSNPLFQEFRLWQFVDYLKIIKREGNINGKLSLNIDVTPEYIPDGNKKAELFELLNDKKEIDQKGFLRLLKLNDKEYRWNYVEDKKYPCNETRGQLLPLLGKAGIGNSFLTKTAEMELWHILYSNETKEDSTKALSSYARKNALPEQFVETFSNAKPFKKDYGSFSKKAIKRLLPLMRSGKYWDEKAIDPKTRERIEKIINGEADDSISERTREQASKANLKSIDDFSSLPTYLASYVVYDRHSESADATKWNSPDDIDRYLRQFKQHSLRNPIVEQVILETLRTVRDIWRQTGDFDEIHVELGRDMKNTAEKRKSIMQKALENENTNLRIKALLTEFLNPDCGIENVRPQSPSQQEKLRIYEEGVLSEEAGNIPDDIAAIIRNFNESDIKKRPSHSDVIRYKCWLEQKYRSPYTGRIIPLGKLFTPEYEIEHIIPQALYFDDSLSNKVICETAVNKDKGKRLAYNYIKECGGKIISLGENRNAEILKLDKYEELVKNGYPENKKKKLLATEIPDTFSERQLNDTRYISRFVMQLLSNIVRTTDENGTYEQESTSKNVIPCSGKITDMLKRQWGINDVWNRIIAPRFQRLNELHGDSSFGEWCNEEGKRFFRINVPFHLKRGFSTKRIDHRHHAMDAIIIACANRNIINYLNNVEAKSENKRIDLRNLICHKETDSDGNYKFVINKPWATFTEDVQSTINKMTVSFKNNIRIINRTKNRYQKFVNGEKQFVEQEKGDQWAIRKPLHKDSYYGLINVRKEKDVNLPIAVAKPEMIIDKQLKSVIKSLKAEGKDDKRIISILKNTYGDKVKKVRIYYFTNDSNEPLVAIRKPLDASFDRKKINTSVSDAGVRKILLNHLAANSDDPQIAFSPEGISSMNENIITLNDGKPHQPIYKVRYSEPLGLKFQIGTKGKFVEAAKGTNLYFAIYKSFSGERSYQTIPLNMVIERLKQGLPPVPEQDEKGNILLFTLSPNDFVYVPTSDELESGIISEPIDNSRIYKMVSATEKRCYFIPAQIAYPIENGIEFNALNKLEFALTGESIKSICIPIKIDRLGNISLLTNKTL

SEQ ID NO: 3545 - protein, 1266 aa, unidentified
  REGION 1..1266: note = Description of Unknown: Cas Enzyme sequence
MKTILGLDLGSTSIGWALIEAEKDEKQTPVRIISMGSRIIPLSSDDRDQFQKGQAITKNQDRTRARTQRKGYDRKQLKKRWLNKVLKEHDIFPSDALMKLPMLDLWKLRSDAADPGKDISAEQLGRILYMLNQKRGYKSARSEANADKKDTDYVQAVKGRYKQLKDRNQTIGQYFYEQLASAHNNNTYFRIKEKVYPREAYMEEFDTIINAQKAKHDFLTEETISRLRDEIIYFQRKLKSQKGLVSICELAGLEKTVFDKEKNCEKTVFIGPRVAPKTSPIFQLCKIWETVNNLSLKVKNPEGSKYKWRDYIPTIEEKEAIASHLSQNLILTYSDLLKILKLRKDDVFANKQVQKGIQGNITYHEIHKILGDSELLQFEISVIESDEQALLADKKTGEILYERQRLIVDKSFESEPLYQLWHTIYSIKDLDECKKALIKRFELNEEVADKLSKIDFNKQAFGNKSAKAIRKILPYLMQGFDYSQACSLAGYNHSNSLTKDEQEQRETKDRLTLLAKNSLRQPIVEKIINQMINVVNAIIDEYGKPDEIRLELARELKQSKDERDEADKMNSNNKKLNEMISKRLEVMGIPATRKYIQKYKFIFPAKDKKWREANVVNQCIYCGEHFNLAEALTGDNFDVDHIVPKALLFDDSQTNKVLVHRHCNSNKLDKTAYDYISKQGDLKLEEYIQRIDDWFAKGILSYGKMQRLKVSFEEYLDRKKQKKETEADKKLWESFIDRQLRESQYIARKSRQILEQICKKVTVTEGTVTAKLRKVWGWDDVLMNLQLSKYREIGQTQIKEWTSDHGKRKHQKEEISNWTKRDDHRHHAIDALVIACTKQGYIQRINTLNASDVRNEMLKEIEDSKIKYNEKLSLLDKYLVAEKPFTTSQVASEADKILVSFKPGKKVATITKFKATGKNKEKGVIVPRGALHEQSVYGKIKVIEQDKPLKYLLEHTDKIIDPRVKALVTARIAEHGNNIRLALSSLKKSPIYLDEQKTEILEKASCYNDATVLKYKLQSLKASQVDDIVDERVKALVKERLNEYGGKEKEAFKDVLWFNEEKQIPIRTVRLFAKPDANNLQPIAKDANGKDIGFVLTGNNHHIAIYEDKDGKLMQHRCTFWHAVERKKYKLPVVITDTSELWNNLLGENYPETFLSKLPADNLKLKFSMQQNEMFILGLSQEEFEDALSTNNKPLLSKCLYLVWRLADNDYYFRHHLETKNSELEKIKEAKESKRYYRVQSLKVLTSLNPIKVQLNHLGEIINVWR

SEQ ID NO: 3546 - protein, 1811 aa, unidentified
  REGION 1..1811: note = Description of Unknown: Cas Enzyme sequence
MKKILGLDLGTNSIGWALIEKDEEKNEGKILGMNSRIISLGEDKTNFEQGKGLTRNANRREKRGSRRLNKRYKQRRNKLIYVLYQLDVLPENQFEFSVDEKYKGTDKIFPMPEKLQHLSITSKRNPEKETNKWKQLTAVELYKLRKDATKDAIDEKDFGRLIYLFNQLRGYAGGGEDDNKEKVNEKQDSDNESSSKKDNIIKEVKTVTIQSIAPKQKYVEKKNNGQIIEVPLFNIEIEDVETKEKYKGECYKEFTGIEETVYDIEIIEKSNTKEQPFFNFDKSICEWQKTKPKKGGETKNIKAKILKCEKPQEFSNKNWIFNLELLDGRKGTISLKSTNEATNYKTNTEKELLITTKIENGITSYEFAPIRKSNWRKQMEDFNKLKAEKEKELNRTVYLGEIFYDILTKDNKSKWERIRNRVILRKHYKEEFKKIWETQISKNTALQNKINDKVLLKKIVEYIYPGKSVSQEKYRKEILEHENGFFHLIFDHIIYYQRPLKPQFRLIGQCQFEKKFKVVPQSHPLHQEEKIWKGINSLSIVTYYDDEKGLRKKRIQPISTEQKEKLYEELLNKPTLTFTQTYSQLGLKEKEQWLEGLNPKATLKGNETRIAIMNAMGKDFFEKAKLYETQNLIDLWRILYNWVKKEYDIIEIDINDYESNPSKYHEYDLTDDDEYNIESERCKALKAFFDNRHIDISDNQILSIAKVRFKRAYSSLSSNALSKIITLVRAGKYFTDEKNVIPDEAKNNFQLLKDNAADMLDRIDEGMNVDYDKEFLKKINDGLLDNVFTKGEMIYSDAVSLFYKRHTATEYTPEHPDYIKNYHHIKTLFRRKNPTLFGDKIGNENDQNNNLRNPVVEQITDEVLQLFVSLCKQYNFKTNENPDEEIEVRIELARELKNNAEARQQMWDAVIAGEKENNWVRKRLRELKNSEPLENTVEIENPEQPSLSNIEKYKLWKKQIKKENEPDKNKPGSEPDKKDSEKYKNWLEQHHISPYTLKAIPLSRLFSKDYEIDHIIPKGRFFDDSLTNKVVCEAIINKEKSNRTPFEYLNAGSVHEEVINWNSFNKFVNDVFKGQKRKNLLMEDIPEDFVERQKKETQYVTLKVKEEIGKIVGTKNVKITTGSITDYLRHEWKLDRMFKEITKPRYELMALQANKPNMVRYEKDDKDRPILKIDLWSKRNDHRHHAIDALVVACTEPKHVFRLNNLNKNLQSWFGEFGLWLNENRIEELNAIKDKEPKEILIALSKLPEDRKRLLFKNIFNAFTEKQKKHVKGKTDFDKWFGTYNALSKEERQEIEKYMPGFRQIEFPWATFCKDVSDGKWIEKMIVSHKPNNKLQIQQRENNKKEKVDFLRIKGRLHEDTYYGKGETYRLPLSKLKEKTDAKKFIETKVKSNFLKKHLTTHLSNYNGKASEAFSDKGIEAFNNYMVEKGFHPVTAIKVDYRENKTDEALQRINRLGYKDGDILVKTGSNYCFAVCEKVLSDGKKERVFDEISLFDAAKKIKESLKGGNNNAAEIIRKYFEEENDKTKGSTLLFTLTINDMVYLPDENEKVPIKKEDEGYAEFWKNADAKKIYRVVKMTKGECYFIPQTFANELNYTPPPKSDVIEDEEENQTEEKKSKEKSIAEFVDGNCTRYVHNESKIKNLLSGRRKKEIKKKLIETLNALIIEINQTADNQEKQDELKSTLIELVMNNIDQDLISEIKKYSPELADFTKQIIYEQKQKEMDDLIVKIQNSDETKPEFENQLVQLLIDFEKFSLKSYLNKKDRDIYIRISTLIEEKNQKLNNEKFKNIRIQDYCIKINVDRLGNISLT

SEQ ID NO: 3547 - protein, 1425 aa, unidentified
  REGION 1..1425: note = Description of Unknown: Cas Enzyme sequence
MAKKNILGLDLGVSSIGFAHILEDEKLKNSEINQIGVRIISLTVDEQTNFEKGKSFSINKERTLKRGARRNLDRFKIRRKNLIEALVNANIINNNSILNEDGKQTTFSTWMLRSKAAYEKIDKDELARVFLAINKKRGYKSSRKAKNEDEGQAIDGMAVAKRLYDEQITPGQLVYQLLKEGKKSIPDFYRSDLQAEFDKVWDFQRQFYPEILTDEFYKELKGKGQRATSTLFWTKYQFNTAENKGTREEKKIQAYKWRSEAISKQLEKDEVAFVLTEINNNLNNSSGYLGAISDRSKELYFSKQTVGQYLYQQIKENRHTRLKNQVFYRQDYLDEFEKIWEVQSNYHSELTEELKTEIRDIIIFYQRKLKSQKGLISFCEFESKEVELNGKKKTIGLRVAPKSSPLFQEFKIWQNLNNILIRKKGSKKRTAKQDNQDSLFEEEKEIFTLDLETKQHLFDELNFKGNLKANKIIELLGYKPTDWEINYSELEGNRTNKALYEAYLKILDIEGYDVKDLLKVKSNKDEVELDDLNVPAIEIKKMVRDIFQTLEIDTKILEFDAELDGTAFEEQLSYQLWHLLYSYEGDNSQSGNEKLYELLEKKFGFKKEHSQILANISLSDDYGNLSSKAMRKVYPFIKENNYSTACELAGYRHSKHSLTKEEIDNRPLEDKLELLKKNSLRQPVVEKILNQMVNVVNTLIEKNRKGNPDFRFDEIRIELARELKKNAQERAEMTTNINAAKLENDKIRAIIKRDFPSVQNPTKNDIIRYKLYEELAFNAYKDLYTNTKIDYHKLFGKEYDIDHIIPQSRLFDDSFSNKVLVPRQANLDKGNKTAFDYMSTKGEGDFSKYESVVEILYMEKKISKAKYQKLFKKESEIGDGFIERDLRETQYIAKKAKEMLFKITRSVVSTSGSITDRLREDWDLVNVMKELNLPKYRSLGLTEMQERKFGKQVEVIKDWTKRNDHRHHAMDALTVAFTKHNHIQYLNYLNARKNENHKLHSNIVAIENLETEIKVDNDGNKKRVFKEPIPNFRQVAKEHLENVLISHKAKNKVVTKNKNKISGKDKAQETLTPRGQLHKETVYGKYHYYESKEEKVSTKFDVETINKVANPLYRKFLLQRLSENGNDPMKVFAGKNALSKNPIYLDEAKSKALPEIVKLVWLTEDFSIRKDITPENFKDDKLIGKIVDEGIKTIMRNRLKEYGGDPKKAFSDLDKNPIWLNKEKGISIKRVTISGVSNAEPLHYKKDHFGNFMLDENGMKIPVDYVSTGNNHHVAVYRDEKGNLQENVVSFYEAVARSNQGLPIIDKTYNQHLGWQFLFTLKQNEMFVFPNEKTGFNPNEIDLLDPKNKKEISQNLFRVQKFSKLIYGNSAVREYVFRHHLETTIDDRKELKDITFKNIKSLPNFEGIVKVRINHLGDIVSIGEY

SEQ ID NO: 3548 - protein, 1242 aa, unidentified
  REGION 1..1242: note = Description of Unknown: Cas Enzyme sequence
MAKKILGLDLGTNSIGWALIEESENNRKIIAMGSRIIPLSTDDKEEFTKGNAISKNQKRTEKRTQRKGYDRYQLRRKALTEVLLANNMFDPELFKLKQLELWGLRAKAVNEQVSLTELGRILYHLNQKRGYKSPTKASTLEKKETEYVQEVKNRYQLIKEQNLTIGQKFFNELQKNPYYRIKEQVFPREAYIEEFDKIIECQKKYYPHVLTEELINKIRNEIIYYQRPLKSQKGLVSVCEFEGRRILRNGKEIFVGPKVAPKSSPIFQITKIWETINNLELKNKEGQILNISIDKKREIFNYLDSNEKLTSNELFKILNLKKDDGWYCNKQINNGIQGNITKVKILRALENCEYDTHILQLQTTIEEFNDEVYLINRKTGEIIESKNKKIVSNTIEQQPIYQLWHTIYSINDANECKQALIKKFNLSEQAAERLANIDFKTSGYGNKSVKAMRKILPYLMDGYRYSDACSFAAYNHSFSLTKDEVLQKQLKDKLDLLPKNSLRQPIVEKILNQLINVVNAIIDENRGWVTRQDRISNNFEIRIELARELTSSKEERNEAYKRQREREKQNKEIAERLEKEYGLKATRNNIIKWRLFHEISPKQEPRINAICIYCGQPFGLTDALTGNSVDIEHIIPKSLLFDDSQNNKTLSHRKCNAAKGQLTAYDYMKSLGEEQFNQYIERVNKLFKDKIITKAKRDKLLMPAEKIPQDYIDRQLRETQYIAKKAKQILGDICYNVWSTSGNVTEHLRRIWGWDDVLMELQLPKYKELGLTEMVDWEIDGQTHKKEIIKNWSKRDDQRHHAIDALVIACTKQGFIQRINNLASQTNRDEMFAEIQNQSENYREKLNLLDKYLISKRPFTTQQIKEKVANILVSYKPGKKVATYSIRKIKHKGKKIVVQQNIITPRGPLSEESIYGKIKIVEKDKNIKYLFENHELIINQHIKQLVTERLQQHQFDTNKALASLKKEPIYLDQEKKIKLEKAHCYKEEFVIKYPLKDLKLKDVDSIVDKKIRELVKQRLEQYKDKEKEAFKEPLYLDNKKTIPIKTVRCFTGLSYAEPIKKDENGNAIGFVKPGNNHHIAIYADENGEKQEHVCTFWHAVERKKYGIPIIINNPQIVWNKILNENNSLPKRFLEKLPNDQWTLLLSMQQNEMFLLGLTNEEIQQYINTNNYAKLSEHLYRVQKISQRNYVFRHHLETQINDTAEAKLSKRFLLLSSITALYDLNPTKVKIDLLGHLYFSDNI

SEQ ID NO: 3549 - protein, 1425 aa, unidentified
  REGION 1..1425: note = Description of Unknown: Cas Enzyme sequence
MTQKIFGLDLGTNSIGSSVRNPDLGSNLTEQLEFFSSDVFDNGVSKGESGREYSLAGVRSAHRRSRRLNEVRRRKLWATLALLIEKDLCPMSPESLEAWKTYDKKRGLYRRYPIGDEAFNSWILLDFNGDGKPDYSSPYQLRRELVTQQFDFTQKTERYKLGRALYHIAQHRGFKSSKGETIAAQEENDKIQITAESLDIASEMKASEEKISGGLQTYIEENGLRTVGEAFAKLEDEGIRIRNNSDYCAVRSQFKEEIKQIFKFQKGLSLESELYERLVSEKKGIGTIFYKRSLRSQRCNVGKCTLERNKPRCPVGHPEFEKFRAWSFINNIKIRSSVEDIFVYLPITLRKELYYERFLSYVKTDFKFEEIRKYLEKRLGLHFSYEDKTINYSDDTSVAGCPITVRLKKVLGDDWENFYKKGKKKKQGQGRINHEEHQVSYTWSDIWHICYNADELDSIEAFARNVLQFDENKIKDLKRLWAAIPQGYAMLSLKAIRNINRLLLLGLKYSDAVLLAKLPEIVPMSDDEILFISTEFLKLEKQLNEEKRIKAIINSLIAKYKSELEENRFADHNYEYQLDDEDEKIIVKQIEESIGKKCWALMGVEEQMEILQGVRAGYQKFFRSHERKFVELPKLGERLVNFLVNRYPNVGFEKWKQLYHPSQIAIYRPVQAKGDHSLLRLGNPNIGAIKNPVVMKVLNILRKRVNQLLDDGLISPDETRVVVETARELNDANTKWAIDNYDRNRSDERKRIEKILQEFYPNRKTISEQDIDNALYVLEQREGDCYTKDKGFYYKKDITRYKLWLEQGGLCMYTGKTINLSNLFNPNAFDIEHTIPESISFDSSDQNLTLCDAHYNRFIKQNRIPTDMPNYNKDMIIEGKEYSAIKPRLQMWEERIKRLRRKVEYWKAQACRAQDKDRKDKCIQQKHLWEMELSYWSAKLKRFTVTEVTDGFKNSQLVDTRIITRHATLYLKSIFSHVEVQRGSTTAKFRKILGIQASNEKKDRSLHSHHAIDATMLTVIPVSAKRDRMLELFYKIEEVEKAFKYYGNEGRNGLKQYLEGLHLKLTKEIKGCYIGRNVCNLEDFINDNIIVNHHYKNQAMTPAHRKLRKRGKIVGSMAHPQWQTGDSLRGKIHEDSYYGAITQFAKDIEGNVLVKDGQVQIDPTVIYVIRRTLKYKQSAQDSGFASWEDLENVIIDKNLFALMKAQFPEGTSFKEACEEGIYMIKKGKPGSEDVKMHRIKHVRCKAPKAGLKLKEQTYKSSKEYKQYFYAAVGDLYAMCSYTNGTIHIFKVYSLYDISCNRKAGIEDVPQFIIDNKGNRLSLEYKLQKGDMVLLYKDSPEELRDLDQINLKQRLYKVNRFESKGNLILLTNHLSATKERGSSLGKITSYQNLPAAIRCGISTIKFLIMGDHHDFVIRKGNIEFNR

SEQ ID NO: 3550 - protein, 1425 aa, unidentified
  REGION 1..1425: note = Description of Unknown: Cas Enzyme sequence
MTQKIFGIDLGTNSIGTSVRNTDLGNNLVDQLEFFSSDIFKASVNREGVNGGKGREYSLASSRSAKRRKRRLYEHRRYKLWATLDLLIKNNLCPMTPESLEQWRTYDKKKKLFRQYPIEDKAFHSWIILDFNSDGKPDYSSPYQLRRELVSVQLDFNQAIDRYKLGRALYHIAQHRGFKSSKGETIAEQEKQEDDSKKNKNNALIEEHVDATKASEEKHSKGLSTYMQEHNLKTVGAAFAQLEDEGIRIRNNSEYKAIRSQHQDEIKEIFKFQKGLSSQTQLLDTLISEKQGIGTIFYKRPLCSQRGNVGKCTLEPNKPRCPIGHPLFEKFRAWTFINNIKAKSPDADSAEPLPMDMRINIYNKLFLSRVKADFKFEEIRNFIEKQWRVALSKDDKTINYRDDTSVAGCPITARMIKVLGEDWEKFQVLGTKERQTQGKSNNALHQVCYTAEDIWHFCYDSEDSGKVRTFAEETLGWDEKKAAELVRLWSAIPQGYAMLSQKAIRNINRMLLFGLKYSDAVLLAKLPDILELSDEDIQTIIKKAQQLEEVVNEEKRIGNIVNSLIANYKAESLEDRFADHNYEYQLDESDEREIIKHIENNIGKQRWELMDADEQISILEGVRSGYQAFFARHKRTFVELPQLGKRLVELLSKEYPSVTEKQWERLYHPSQIAIYRPILLDKSDEKRRLGNPDIGAIKNPTVMRTLNNLRRRVNQLLDDGVLMPDETRVVVETARDLNNANEKWALEKYQEIRRKENDKIKKILEEFYPQFSNITSTDVDKARYVIEQCEEDNYTSKKESGTYSKNIQKYKYWLEQGGQCLYTGRIISLSNLFDSNAFDLEHTIPASVSFDNSDQNMTLCEAHYNRFIKKNNIPTAMPNYEEDVTIDGKLYTAIKPRLEKWKKRIKRLSKNVEYWRTQARRTQMKDHKDECTKEKLLWQMELQYWRDKLQRFTILEVTDGFKNSQLVDTRIITRHAILYLKSVFKKVEVQRGSTTAEFRKILGVQSVEEKKDRTLHSHHAIDATILTTIPTAGKRERILELFYKVQEKERRLKNCSGDAYEGLKQDLEGLQAKLKKEVVDCKLGGEISQLGNFINDKIIINHCVKDQTLTPSHKRLRRRGRIVGGKEHPIWQTGDTLRGEIHKESYYAAITQYAKDKDGNVLLNNGKPKIDPTIWYVIHRELTYFDDWKPLEKVIVDKNLYKLMKEQFPDGTSFKKACEQGFYMIKKGKDKEHNIKTHRIRHVRCYSDVKGALKIKEQTNKSTKEYKQYFYAAVGDLYTMCCYTNGKNKEYRVYRLYDIAQHRKSGIEDIPEFITDEKGNRLEWAYRLRSGDMILLYENTPEELYDMDPVNLKQRLYKVDRFESKGPTICMTHHLIANGERGKSIKDYNKMPPTARCSVNTLKFLIMGEHNDFVIKGNNIIFNHR

SEQ ID NO: 3551 - protein, 1526 aa, unidentified
  REGION 1..1526: note = Description of Unknown: Cas Enzyme sequence
MKNILGLDLGANSVGWALISVDENGNLVKDIRLGSRIIPMSQDVLGKFDSGVTVSQTAERTEYRSHRRLLERALLRRERLHRVLHLLGFLPEHYAACIGWDRNDNATYGKFLPETEPKLAWRKADDGGYRFVFMQSFEEMLDDFKASQPSLVANGKRIPLDWTLYYLRTKALTKPIAKEELAWILLNFNQKRGYYQLRGEEEEETPSKRVEYHELKVVKVEATDEGKGGNVWYNVLLENGWVYRRQSKYSLDKWLGQTLPFIVTTDLEADGITPKRDKDGNVKRSISLPKEDDWTLLKKRTEDHLEKSGLTVGAFIYQHLLANPSDKVRGQLVRTIDRKYYKRELQAIIAKQMEFHPELRDAELLKACAEELYRNNEAHRAQLLAKDFKHLLVEDVLFYQRPLKSKKSLIANCPYETRQYINKETGEIKDVNVKCIAKSNPYFQEFRLWQWISNLRLLRQADGQDVTAAYIKGNEDKERLFDMLNNQGEIKQEHILRDFLKLKKPKGGEFPLRWNYVDDKIYPANETRHAINKAIKGMAVDKEEKETLGQLFVQPAVEYMLWNLLYSITDRNELASALRRFALTHGVSFVDAFVESFLKVKPFKKEYGAYSEKATKKLLQVMRLGKYWCGDEMPEPAKRMKGNKQAVYDEMAHRGICKQTLQNISNIIEEDIDERLMGALLNPERPLTELSHFQGLSVSDACYVVYGRHSEVAEIVKWKDAGELNTFINNFKQHSMRNPIVEQCVLETLRTVRDVWKQEGQIDEIHVELGRNMKRTAEQRARDTQAIQRNENTNMRISLLLTELKNDPSISDVRPYSPSQRELLKIYEEGALENLTNQDEDIAKISRLAQPSASELRRYKLWLDQKYVSPYTGRPIPLAKLFTPAYEIEHIIPQSRYFDNSFSNKVICEAEVNKLKDNLLGMEFIKKFGGKTKGILDEDAYKLHVMTNYAHNPAKRSKLLMEDLPTDFNSRQLNDTRYISKTVMALLSNVVREEGERETRSKHVVVCTGGVTDTLKKDWGLHDVWHNLVYPRFIRLNNLTGSQDFGYWRYLNEENRKKGEDSRKVFQITLPLDLQRGFVKKRIDHRHHAMDALVIACASPDIVNYLNNQSAANPHARQDLQRLLCDRKREIRKPWPTFTQDAQKALEDLVVSFKNTVRVVNKASNTYLRYDKDGKKKRFKQEGEGLKAIRKPMHKETYYGEVNLIRKEMLPLKRALDDVNAIVDKELRACIKGLLRDGFNLQQVLANFKAKDFKFDKRDIKKVEVYVSSEKSTPMVATRKLLDTSFNAKRIADITDTGIQKILLNYLKANDNSPEQAFTPEGIAYLNEHIAEYNNGKPHQPILKVRVSEVKGAKFAVGQTGSKKTKFVEAQSGTNLYFAIYEDKEGKRNFETIALNVAAERLKTGQTPVPETNDAGLPLKFYLSPNDLVYVPTDEDRAAAHPSIDKRRIYKMVSATEGKCHFLPVSVASIIADKVEFEAMNKIGRLIDTSEYNEQNGSSAISKIMIKDVCWKLEVDRLGNITKIVR

SEQ ID NO: 3552 - protein, 1538 aa, unidentified
  REGION 1..1538: note = Description of Unknown: Cas Enzyme sequence
MKNILGLDLGTNSVGWALISVDENGNLVKDIRLGSRIIPMSQDVLGKFDSGVTVSQTAERTEYRSHRRLLERALLRRERLHRVLHLLGFLPEHYAACIGWDRNDNATYGKFLPETEPKLAWRKADDGSYRFVFMQSFEEMLDDFKASQPSLVANGKRIPLDWTLYYLRTKALTKPIAKEELAWILLNFNQKRGYYQLRGEEEEETPSKCVEYHELKVVKVEATDEGKGGNVWYNVLLENGWVYRRQSKYSLDKWLGQTLPFIVTTDLEADGVTPKCDKEGNVKRSFRSPKEDDWTLVKKRTEDHLEKSGLTVGAFIYQHLLANPSDKVRGQLVRTIDRKYYKRELQAIIAKQMEFHPELRDAQLLKACVEELYRNNEAHRAQLLAKDFKHLLVEDVLFYQRPLKSKRSLIANCPYETRQYINKETGEIKDVNVKCIAKSNPYFQEFRLWQWISNLRLLRQADGQDVTAAYIKGNEDKERLFDMLNNQGEIKHEHILRDFLKLKKPKGGEFPLRWNYVDDKIYPANETRHAMNKAIKGMAVDKEEKETLGRLLEQPAVAYMLWNLLYSITDRNELASALRRFALTHGVSSVDAFVESFLKVKPFKKEYGAYSEKATKKLLQVMRLGKYWCGDELPEPANRTKGNKQAVYDEMANRGICKQTLQNINNIIEEDIDERLMGALLNPERPLTELSHFQGLSVSDACYVVYGRHSEVADIVKWKDAGELNTFINNFKQHSMRNPIVEQCVLETLRTVRDVWEQEGQIDEIHVELGRNMKRTAEQRARDTQAIQRNENTNMRISLLLTELKNDPSISDVRPHSPSQRELLKIYEEGALENLTNQDEDIAKISRLAQPSASELRRYKLWLDQKYVSPYTGRPIPLAKLFTPAYEIEHIIPQSRYFDNSFSNKVICEADVNKLKDNLLGMEFIKQFGGKTKGILDEEAYKQHVTTNYAHNPAKRSKLLMEDLPTDFNSRQLNDTRYISKTVMALLSNVVREEGERETRSKHVVVCTGGITDTLKKDWGLQDVWHNLVYPRFIRLNNLTGSQDFGYWRYLNEENSKKGEDSKKVFQITLPPEWQRGFVKKRIDHRHHAMDALVIACASPDIVNYLNNQSAANPNSRADLRRLLCDRKREIRKPWPTFTQDAHAALKDLVVSFKNTVRVVNKASNTYLRYDKDGKKKRFKQEGEGLKAIRKPMHKETYYGEVNLIRKEMLPLKRALEDVNALVDKELRASIKGLLRDGFNLQQVLANFKAKDFKFNKRDIKKVEVYVSSTKSTPMVATRKSLDTSFNAKRIADITDTGIQKILLNYLKANDNSPEQAFTPEGIAYLNEHIAEYNNGKRHQPILKVRVSEIKGAKFAVGQTGSKKTKFVEAQSGTNLYFAIYEGNEGKRHFETIALNVAAERLKMGQTPVPETNDAGLPLKFYLSPNDLVYVPTDEDLAAARPSIDKRRIYKMVSATDRECYFLPFEVASIIADRVEFEAKNKVGRVIDALEYKDESKENSEDENKEENKPSAGNKIMIKDVCWKLEVDRLGNITKIVR

SEQ ID NO: 3553 - protein, 1527 aa, unidentified
  REGION 1..1527: note = Description of Unknown: Cas Enzyme sequence
MKNILGLDLGTNSVGWALISVDENGNLVKDIRLGSRIIPMSQDVLGKFDSGVTVSQTAERTEYRSHRRLLERALLRRERLHRVLHLLGFLPEHYAACIGWDRKDNATYGKFLPETEPKLAWRKVDDDGGYRFVFMQSFGEMLDDFSASQPSLVANGKRIPLDWTLYYLRTKALTMPIAKEELAWILLNFNQKRGYYQLRGEEEEETPSKRVEYHELKVVKVEATDEGKGGNVWYNVLLENGWVYRRQSKYSLDKWLGQTLPFIVTTDLEADGITPKCDKEGNVKRSFRSPKEDDWTLVKKRTEDHLEKSGLTVGAFIYQHLLADPSDKVRGQLVRTIDRKYYKRELQAIIAKQMEFHPELRDAELLKACAEELYRNNGEHRAQLMAKDFMHLLVEDVLFYQRPLKSKKSLISNCPYETRQYINKETGEIKDVNVKCIAKSNPYFQEFRLWQWISNLRLLRQIDGQDVTADYIKGNDDKERLFDLLNNQGEIKQEHILRDFLKLKKPKGGEFPLRWNYVDDKVYPANETRHAMNKAIKAMNAEKEEKEAISQLLVQPAVEYLLWNLLYSITDRNELTSALRRFALAHGISSVDAFVEAFLKVKPFKKEYGAYSEKATKKLLQVMRVGKYWCGDELADPAKRTKGNKQAVYDEMANRGICKQTLQNISNIIEENIDERLKGALINPQRPLTALSHFQGLSVSDACYVVYGRHSEVAEIVKWKDAGELNTFINNFKQHSMRNPIVEQCVLETLRTVRDVWKQEGQIDEIHVELGRNMKRTAEQRARDTQAIQRNENTNMRISLLLTELKNDPSISDVRPYSPSQRELLKIYEEGALENLTNEDEDIAKISRLAQPSSSELRRYKLWLDQKYVSPYTGRPIPLAKLFTPAYEIEHIIPQSRYFDNSFSNKVICESEVNKLKDNLLGMEFIKQFGGKQKGILDEDAYKLHVMTNYAHNPAKRSKLLLEDLPTDFNSRQLNDTRYISKTVMALLSNVVREEGERETRSKHVVVCTGGVTDTLKKDWGLHDVWHNLVYPRFIRLNNLTGTQNFGYWRALDEEKRRQGEDSKKVFQITLPPECQRGFVKKRIDHRHHAMDALVIACASADIVNYLNNQSAANPNSREDLRRLVCDMKRRIRKPWPTFTQDAQAALEDLVVSFKNTVRVVNKASNTYLRYDKDGKKKRFKQEGEGLKAIRKPMHKETYYGEVNLIRKEMLPLKRALEDVNAIVDKELRANIKALLHDGFNLQQVLANFKAKDFKFNKRDIKKVEVYVSSAKSTPMVATRKPLDTSFNAKRIADITDTGIQKILLNYLKANDNSPEQAFTPEGIAYLNEHIAEYNNGKPHQPILKVRVSEVMGAKFAVGQTGSKKNKFVEAQSGTNLYFAIYEGEDGKRNFETIALNVAAERLKTGQTPVPETNAAGIPLKFYLSPNDLVYVPTGEDRAAAHPSIDKRRIYKMVSATDKECHFLPVSVASIIADKVEFEAKNKVGRVIGALEYTAHYESSAINKIMIKDVCWKLEVDRLGNITKIVR

SEQ ID NO: 3554 - protein, 1517 aa, unidentified
  REGION 1..1517: note = Description of Unknown: Cas Enzyme sequence
MKNILGLDLGTNSVGWALISVDENGKLVKKIRLGSRIIPMSQDVLGKFDSGVTVSQTAERTEYRSHRRLLERALLRRERLHRVLHLLGFLPEHYAACIGWDRNDNATYGKFLPETEPKLAWRKADDGEHRFIFMQSFDEMLEDFKESHPSLLANGKRIPLDWTLYYLRNKALTKPIAKEELAWILLNFNQKRGYYQLRGEEDEEIPSKRVEYHELKVVKVEATDEGKGGNIWYNVLLENGWVYRRQSKYPLDKWLGQTLPFIVTTDLEADGVTPKRDKDGNEKRSFRSPKEDDWTLVKKRTEDHLEKSGLTVGAFIYQHLLANPSDKVRGQLVRTIDRKYYKRELQAIIAKQMEFHPELRDAELLKACAEELYRNNGEHRAQLMAKDFKHLLVEDVLFYQRPLKSKKSLISNCPYETRQYINKETGEIKDVNVKCIAKSNPYFQEFRLWQWISNLRLLCQMDGQDVTADYIKGNEDKERLFDLLNNQGEIKQEHILRDFLKLKKPKGGEFPLRWNYVDDKVYPANETRHAMNKAIKAMIAAKEEKEAIGQLLVQPAVEYMLWNLLYSITDRNELTSALRRFALAHGISSVDAFVESFLKVKPFKKEYGAYSEKATKKLLQVMRLGKYWCGDELPEPAKRTKGNKQAVYDEMANRGICKQTLQNIGNIIEENIDERLIGALINPQRPLTALSHFQGLSVSDACYVVYGRHSEVAEIVKWKDAGELNTFINNFKQHSMRNPIVEQCVLETLRTVRDVWIQEGQIDEIHVELGRNMKRTAEQRARDTQAIQRNENTNMRISLLLTELKNDPSISDVRPYSPSQRELLKIYEEGALENLTNEDEDIAKISRLAQPSSSELRRYKLWLDQKYVSPYTGRPIPLAKLFTPAYEIEHIIPQSRYFDNSFSNKVICEAEVNKLKDNLLGMEFIKQFGGKTKGILDEDAYKLHVMTNYAHNPAKRSKLLMEDLPTDFNSRQLNDTRYISKMVMALLSNVVREEGERETRSKHVVVCTGGVTDTLKKDWGLHDVWHNLVYPRFIRLNNLTGTKDFGHWESKDGKAVFQTGLPLDLQRGFVKKRIDHRHHAMDALVIACASANIVNYLNNQSAANPHIHENLQRLLCDRKRVIRKPWPTFTQDAQKALEDLVVSFKNTVRVVNKASNTYLRYDKDGKKKRFKQEGEGLKAIRKPMHKETYYGEVDLIRKEMLPLKRALEDVDAIVDKELRACIKGLLRDGFNLQQVLANFKAKDFKFNKRDIKKVEVYVSSAKSTPMVATRKSLDTSFNAKRIADITDTGIQKILLNYLKANDNSPEQAFTPEGIAYLNEHIAEYNNGKPHQPILKVRVSDVMGAKFAVGQTGAKKAQFVVAESGTNLYFAIYEDKEGKRHFETIALNVAAERLKTGQTPVPETNDAGLPLKFYLSPNDLVYVPTDEDLAAARPSIDKRRIYKMVSATDKNSFFLPFGVASIIADQVEFEAKNKVGRVIEELEYTEQYESSAISKIMIKDVCWKLEVDRLGNITKIVR

SEQ ID NO: 3555 - protein, 1517 aa, unidentified
  REGION 1..1517: note = Description of Unknown: Cas Enzyme sequence
MKNILGLDLGTNSVGWALISVDENGKLVKKIRLGSRIIPMSQDVLGKFDSGVTVSQTAERMEYRSHRRLLERALLRRERLHRVLHLLGFLPEHYAACIGWDRNDNATYAKLLPETEPKLAWRKADDGGYRFVFMRSFEEMLKDFKANLPSLVANGKRIPLDWTLYYLRTKALTMPIGKEELAWILLNFNQKRGYYQLRGEEDEEIPNKRVEYHELKVVKVEATDEGKGGNIWYNVLLENGWVYRRQSKYSLDKWLGQTLPFIVTTDLEADGITPKRDKDGNEKRSFRSPKEDDWTLVKKRTEDYLEKSGLTVGAFIYQHLLANPSDKVRGQLVRTIDRKYYKRELQAIIAKQMEFHPELRDAKLLKACAEELYRNNGEHRAQLMAKDFKHLLVEDVLFYQRPLKSKKSLISNCPYEIRQCINKETGEIKDVNVKCIAKSNPYFQEFRLWQWISNLRFLRQMDGQDVTADYIKGNDDKERLFDLLNNQGEIKQEHILRDFLKLKKPKGGDFPLRWNYVDDKVYPANETRHAMNKAIKAMIADKEEKEAIGQLLVQPAVEYMLWNLLYSITDRNELTSALRRFALARGISSVDAFAQAFLKVKPFKKEYGAYSEKATKKLLQVMRVGKYWCGDELAEPAKRTKGNKQAVYDEMANRGICKQTLQNIGNIIEENIDERLKGALINPQRPLTALSHFQGLSVSDACYVVYSRHSEVADIVKWKDAGELNTFINNFKQHSMRNPIVEQCVLETLRTVRDVWEQEGQIDEIHVELGRNMKRTAEQRARDTQAIQRNENTNMRISLLLTELKNDPSISDVRPYSPSQRELLKIYEEGALENLTSGDEDIAKISRLAQPSTSELRRYKLWLDQKYVSPYTGNPIPLAKLFTPAYEIEHIIPQSRYFDNSFSNKVICEADVNKLKDNLLGMEFIKQFGGKQKGILDEEAYKLHVTTNYAHNPAKRSKLLMEDLPTDFNSRQLNDTRYISKTVMALLSNVVREEGERETRSKHVVVCTGGVTDVLKKDWGLHDVWNNLVYPRFIRLNNLTSTKDFGCWENKDGKRVFQTALPLDLQRGFVKKRIDHRHHAMDALVIACASADIVNYLNNQSAANPNSREDLRRLLCDRKREIRKPWPTFTQDAQAALEDLVVSFKNTVRVVNKASNTYLRYDKGGKKKRFKQEGEGLKAIRKPMHKETYYGEVNLIRKEMQPLKRALEDIDAIVYKELRAHIKHLQNDGFKPEQMLAYFKDKGFKFDKRDIKKVEVYVSSTKTMPMVATRKPLDTSFTPKRIADITDTGIQKILLNYLKANDNSPEQAFTPEGIAYLNEHIAEYNNGKPHQPILKVRVSEVKGAKFAVGQTGSKKTKFVEAQSGTNLYFAIYEDKDGKRNFETIALNVAAERLKMGQTPVPETNGAGIPLKFYLSPNDLVYVPTNEDRAAAHPSIDKRRIYKMVSATDRECYFLPISAASTIYNKVEFESMNKMGRAIDIMEYSDNYESSAINKLMIKDVCWKLEVDRLGSVIKIVR

SEQ ID NO: 3556 - protein, 1534 aa, unidentified
  REGION 1..1534: note = Description of Unknown: Cas Enzyme sequence
MKNILGLDLGTNSVGWALISVDENGKLVKKIRLGSRIIPMSQDVLGKFDSGVTVSQTAERTEYRSHRRLLERALLRRERLHRVLHLLGFLPEHYAACIGWDRNDNATYGKFLPETEPKLAWRKADDGEYRFIFMQSFDEMLEDFKESQPSLLSNGKCIPLDWTLYYLRNKVLTKPIAKEELAWILLNFNQKRGYYQLRGEEDEEIPSKRVEYHELKVVKVEATDEGKGGNIWYNVLLENGWVYRRLSKYSLDKWLGQTLPFIVTTDLEADGVTPKRDKDGNEKRSFRSPKEDDWTLVKKRTEDHLEKSGLTVGAFIYQHLLANPSDKVRGQLVRTIDRKYYKRELQAIIAKQMEFHPELRDAELLKACAEELYRNNGEHRAQLMAKDFKHLLVEDVLFYQRPLKSKKSLISNCPYETRQYINKETGEIKDVNVKCIAKSNPYFQEFRLWQWISNLRLLRQIDGQDVTADYIKGNDDKERLFDLLNNQGEIKQEHILRDFLKLKKPKGGEFPLRWNYVGDKIYPANETRHAINKAIKGMAVDKEEKETLGQLFVQPAVEYMLWNLLYSITDRNELASALRRFALTHGVSSVDAFVESFLKVKPFKKEYGAYSEKATKKLLQVMRLGKYWCGDELPEPAKRTKGNKQAVYDEMANRGICKQTLQNISNIIEENIDERLMGALLNPERPLTELSHFQGLSVSDACYVVYGRHSEVAEIVKWKNVGELNTFINTFKQHSMRNPIVEQCVLETLRTVRDVWEQEGQIDEIHVELGRNMKRTAEQRARDTQAIQRNENTNMRISLLLTELKNDPSISDVRPYSPSQRELLKIYEEGALENLTNEDEDIAKISRLAQPSSSELRRYKLWLDQKYVSPYTGRPIPLAKLFTPAYEIEHIIPQSRYFDNSFSNKVICEAEVNTLKSNLLGMEFIKKFGGKTKGILDEDAYKLHVMTNYAHNPAKRSKLLMEDLPTDFNSRQLNDTRYISKTVMALLSNVVREEGERETRSKHVVACTGGVTDTLKKDWGLHDVWHNLVYPRFIRLNNLTGTQNFGYWRALDEEKRKQGEDSKKVFQITLPPECQRGFVKKRIDHRHHAMDALVIACASADIVNYLNNQSAANPNSREDLRRLVCDIKRRIRKPWPTFTQDAQAALKDLVVSFKNTVRVVNKASNTYLRYDKNGKKKRFKQEGEGLKAIRKPMHKETYYGEVNLIRKEMLPLKRALEDVDAIVDKELRACIKGLLRDGFNLQQVLANFKAKDFKFNKRDIKKVEVYVSSAKSTPMVATRKSLDTSFNAKRIADITDTGIQKILLNYLKANDNSPEQAFTPEGIAYLNEHIVEHNNGKPHQPILKVRVSEVMGAKFAVGQTGSKKNKFVEAQSGTNLYFAIYEDKEGKRHFETITLNVAAERLKMGQTPVPETNDAGLPLKFYLSPNDLVYVPTEEDCATAHPSIDKRRIYKMVSATEGKCHFLPVSVASIIADKVEFEAMNKIGRVIDALEYKEKSEEKSEEENKTSAGSKVMIKDVCWKLEVDRLGNITKIVR

SEQ ID NO: 3557 - protein, 1497 aa, unidentified
  REGION 1..1497: note = Description of Unknown: Cas Enzyme sequence
MKTILGLDLGTNSIGWAKVCIDDNGNYLRDIKLGSRIIPMSQDVLGNFDKGVTESQTSVRTGYRGIRRLRERSLLRRERLHRVLHVLGYLPPHYDCSIGWNRNEPSTYGKYLNHSEPKLAWERQEDGSMRFIFMDSFHEMMADFAKRQPSLVSDGKRIPLDWTIYYLRKKALSQAIRKDELAWILLNFNQKRGYYQLRGEEDDTNSAKCEEYYELKVISVEADEEGKGGNTWYNVKLENGWIYRRQSKISLSDWVGKTREFIVTTEYEKDGVTLKRNKDGEIKRSFRSPSEDDWGLRKKRTEERLESSKMTVGAFVYEHLLSEPSDKIRGKFIRTIERKYYKEELYAILREQSKYHEELHSEGALKKCAEELYKNNQPHRDSLLKKDLIYLLLDDLIFYQRPLKTKKSLISECPYEAYSYVDKETGEIKRQGIKCIAKSNPYYQEFRLWQFISNLRFFDKVDDKDVTADYLSTRDDYVRLFAYLNDRKDINQETLLKDFLKLKKVIINSEKEFSVRWNYIEDKEKRYPCNETRHELLLALDRAGIDRSWLDEEGREYRLWHLLYSVESKEETEGALRKLKNDDEFIKSFLKIKPFKKEYGAYSEKAIKKLLAVMRIGSLWSEADICRATRENITKILKGDIDDKLKEKISSCLSSYNQVSDFQGLPVWLACYVVYGRHSEAAEIQHWRTPKDLLVYINGFKQHSLRNPIVEQCILETLRAVHDIWKEAGHIDEIHVELGRNMKSTADQRARMSGNILRNENTNLRIKSLLLELKNDPDIKDIRPYSPMQQEKLRIYEEGALQELTKDDKDFAEIIKISTMAQPSAKELLRYKLWLDQKYCSPYTGRSISLAKLFTSAYQIEHVIPQSRYFDDSFNNKVICESEVNGLKDNMLGYEFIKECGGEIVHCTMLGDVKILSENEYKDFVNDHYAHNRRKRENLLLEDIPQEFLNRQMNDSRYISKVVKALLSNIVRAEGEEEATSKFVVSCSGGITDRLKKDWGLNDVWNKIVYPRFERLNKLTGTDSFGQWENKEGKKVFQTSVPLELQRGFNKKRIDHRHHAMDALVIACTSRSIVNYLNNESADNPKKREDLRQKLCDKNRIIRKPWDTFTQDATAALEDVVVSFKNYVRVINKATNYYEKYDKNGKKGIAEQKGQEMWAIRKPMHKETVFGHVNLRRKVTVKLKDALEDIPSICDKTLRDYVNGLVKKDFKTKHLIAHFKSLNYRLNRQHIEKVEVWQFSDKKEQLVATRKPLDTSFDNKHIDSITDTGIQKILKNYLHAKGGDPNIAFTPEGIVELNQNISLYNDGKLHQPILKVRVFEPKGAKYCVGQNGNKSAKYVEAQKGTNLYFAIYEDEEGKRSYETIPLNEVVERLKQGLSPVPEKNKAQVPLKFYLSPNDLVYVPDTGDVNEIKKEQIYKFVDSSGTTANFIPHRASDLIYNVDKKFATSFCNREVIQNEYGVGSPQSKNQKAITGEMVKAICWKLVVDRLGNIIKIIK

SEQ ID NO: 3558 - protein, 1483 aa, unidentified
  REGION 1..1483: note = Description of Unknown: Cas Enzyme sequence
MKTILGLDLGTNSIGWAKVTVDDNENYLRDIQLGSRIIPMSQDVLGKFDKGVTESQTAIRTSLRGKRRRIERTLQRRERLHRVLHTLHCLPPHYDSAIGWDRKTPTTYGKFLNHGEPKLAWERREDGTMQFLFMDDFHEMIADFAKYQPALVADGKKVPLDWTIYYLRKKALTQPIKKEELAWILLNFNQKRGYYQLRGEEDEENAAKHEEYHELKVVGVEVDEAGKGDNTWYNVKLENGWIYHRQSKIPLDDWVGKVRAFIVTTEYEKDGTTPKKDQEGNVKRSFRSPDEKDWGLRKKQTEHSLEASGTPVGAFIYDHLLKEPSDKIRGKFIHTIERKYYKQELAAILREQSKHHEELRSKDMLKACVEELYPNNPLHRESLLKKDMTYLLIEDLIFYQRPLKSKKSLIAECPYEAYSYVDKETDKKKRQGIKCIAKSNPYYQEFRLWQLIANLRLRNRADERDVTAEYLPHQEDYVRLFTYLNDRKEINQETLLKDFFKLKKVAIGGEKVFPIRWDYIEDKEKKYPCNATRHELLLALDRAGMEHDWLDDRDLTYRLWHLLYSVDSKDETERALRKLKEDDAFVESFLKIKPFEKEYGAYSEKAIKKLLPVMRRGSLWNEADLCPSTKERIANILQGTIDEKLKKKIGAFISSCQEVSDFQGLPEWLACYVVYGRHSEATDIQRWETPEQLLAYIHKFKQYSLRNPIVEQCILETLRTVYDIWKEAGQIDEIHVELGREMKKTAEQRAHLTEKVLRNENTNLRIKSLLMELKNDADMKDVRPHSPMQQEILRIYEEGALQTLSKDDAAFAEIMKISKMAQPSASELQRYRLWLEQKYRSPYTGKPISLSKLFTSAYQIEHIIPKKRYFDDSFSNKVICEAEVNREKGSMLAYEFIKKRGGDVIHCTTLGDVTILSEAEYKALVTELYANNNSKKKKLLMEDIPQEFVNRQLNDSRYISRVVMTLLSNIVRIEGEEEATSKFVIPCSGGITDKLKKDWGLNDVWNNIVYPRFERLNALTNTSDFGQWENKEGKRVFQTSVPLELQRSYQKKRIDHRHHAMDALVIACASHKIINYLNNQEANDPTKQENARKQLCIKNRIIRKPWETFTQDAYKALDNMVVSFKNYVRVINKATNYYERYNADGKKFVDKQKGEAMWAIRKPMHKDTVFGHVNLRRKAVVKLKDTLENIPAICDKTLRHYIQDLQKKHFNTKQLLAHFKSINYRLNKQAVDKVEVWQYSDDKEQLAATRKPLGPSFDAKRIAAITDTGIQKILLNYLQAKGGDPTIAFTPEGIAEMNQNIAVYNGGKQHQPILKVRIAEPMGAKYPVGETGNKGAKYVEAQKGTNLYFAIYEDEEGNRTYDTITLKIVAEQLKLGYSPVPEKSEKGVALKFYLSPNDLVYVPTADELLSKACSLDKNRIYKMVSATKSECLFIPHRVAKTIYDKVEFEALNKMGRALTGEMIKSVCWKIEVDRLGHIVNIIK

SEQ ID NO: 3559 - protein, 1494 aa, unidentified
  REGION 1..1494: note = Description of Unknown: Cas Enzyme sequence
MKTILGLDLGTNSIGWAKVCVDDNRNYTREIKLGSRIIPMSQDTLSNFDKGVTDSPTAARTGFRGIRRIRERALQRRERLHRVLHVMGFLPPHYENAIGWNREEATTYGKFLDNAEPKLAWEKQEDGSMRFLFMDSFYEMMADFANHQPGIVADGRKIPLDWTLYYLRKKALTQAVRKEELAWILLNFNQKRGYYQLRGEEDEENPTKREEYYELKVVGIEAAEEGKGGNTWYNITLENGWIYRRQSKIELNDWIGKVRPFIVTTEYEIDGVTIKKDKNGEVKRSFRAPSEDDWGLRKKRTESLLEESGKTVGTFIYDHILSEPADKIRGNFVRTIERKFYKKELEAILREQSKHHKELKDIDTLIACIKELYPNNKPHQDSLMKKDMAYLLITDLIFYQRPLKSKKSLIADCPYEYYEYVIKETGEIKRQGIKCIAKSNPYYQEFRLWQFIINLRLFDRTNDKEVTSEYLSSMEDYTRLFTYLNDRKDINQETLLKDFCKQKKVKIGMEKEFPIRWNYIEDKEKKYPCNETRHELLAALDKAGIDHSWLDDKEQYYRLWHLLYSVESKEEAEGALRKLNDNDDFVNAFLKIKPFKKEYGAYSEKAIKKLLAVMRMGDLWDETDICEQTRDRIQNIIKGHIDEKIKDRMGRTFCQISDFQGLPEWLACYVVYDRHSEATDIQRWTKPENLMAYINGFKQHSLRNPIVEQCILETLRTVHDIWKEAGHIDEIHIELGRSMKSTADQRARMAKSIMQNENTNLRIKSLLMELKNTKEFENVRPYSPMQQEILRIYEEGALQELTKEDAQYTEISKISQMAQPSANELLKYRLWLEQKYCSPYTGKPISLSKLFTSAYQIEHIIPQSRYFDDSFTNKVICEAEVNQLKSNMLGYEFIKKHGGEIVHCTMIGDVKIYDTKEYSNFVTEHYANNRRKKEKLLMEDIPQEFLNRQMNDSRYISKKVMSILSNIVRKEDEQEAKSKFVIACSGGITNRLKQDWGLNDVWNSIVYPRFERLNKLTNTENFGRWENKEGKQVFQTSLPLELQRGFSKKRIDHRHHAMDALVIACASNNIINYLNNESAKSQEKREDLRKKLCDKNRIIRKPWETFTQDAHTALEDVVVSFKNYVRVINKATNYYEKYDKNGKKGIAEQKGQDMWAIRKPMHKETVFGQVNLRRRVTVNLKDALEKIPAICDKELREYINKLVTKQFNKKQILAHFKSINYRLKMKYVNKVDVWQYSDEKEPMVATRKPIDTSFDAKRIATITDTGIQKILLNYLEAKDNNPNIAFTPEGIAEMNKHITEYNNGKRHQPILKVRVSEPKGAKYQVGETGNKMSKFVEAQKGTNLYFAIYEDKEGNRSYNTIPLNEVIERLKQGLSPVPDANEKGIPLKFHLSPNDLVYVPKRDEENEIKKGQIYKFVDSSGTTANFIPHRVSNLIYNVDKKIAEKFCNHEVIQNEYGIGSPQSKNQKSITGEMIKSVCWKLEVDRLGNIHKIIK

SEQ ID NO: 3560 - protein, 1480 aa, unidentified
  REGION 1..1480: note = Description of Unknown: Cas Enzyme sequence
MKTILGLDLGTNSIGWAKVCVDDNGNYTREIKLGSRIIPMSQDTLSNFDKGVTESPTATRTGFRSIRRIRERALQRRERLHRVLHVMGFLPPHYENAIGWNREEATTYGKFLDNAEPKLAWEKQEDGSMHFLFMDSFYEMMADFAKYQPGIVADGRKIPLDWTLYYLRKKALTQVIRKEELAWILLNFNQKRGYYQLRGEEDEENPTKREEYYELKVVGVEAAEEGKGGNRWYNITLENGWIYRRQSKIELNDWIGKVRPFIVTTEYEIDGVTIKKDKNGEVKRSFRAPSEDDWGLRKKRTESLLEESGKTVGTFIYDHILSEPADKIRGNFVRTIERKFYKKELEAILREQSKYHKELKKQDTLIACIKELYPNNKPHQDSLMKKDMAYLLITDLIFYQRPLKSKKSLIADCPYEYYKYVIKETGEIKRQGIKCIAKSNPYYQEFRLWQFIINLRLFDRANDKEVTSEYLSSMEDYTRLFTYLNDRKDINQETLLKDFCKQKKVKMGMEKEFPIRWNYIEDKEKKYPCNETRHELLAALGKAGIDHSWLDDKELFYRLWHLLYSVESKEEAEGALRKLNDNDDFVNAFLKIKPFKKEYGAYSEKAIKKLLAVMRMGDLWNETDICEQTRDRIQNIIKGDIDEKIKDRMGRTFCQISDFQGLPEWLACYVVYGRHSEATDIQRWTKPENLMAYINGFKQHSLRNPIVEQCILETLRTVHDIWKEAGHIDEIHIELGRSMKSTADQRARMSKSIIQNENTNLRIKSLLMELKNAKEFENVRPYSPMQQEILRIYEEGALQELTKEDAQYTEISKISQMAQPSANELLKYRLWLEQKYCSPYTGKPISLSKLFTSAYQIEHIIPQSRYFDDSFTNKVICETEVNQLKSNMLGYEFIKKHGGEIVHCTMIGDVKIYDAKEYSNFVTEHYANNRRKKEKLLMEDIPQEFLNRQMNDSRYISKKVMAILSYIVRGEDEQEAKSKFVIACSGGITDRLKQDWGLNDVWNSIVYPRFERLNKLTNTENFGRWENKEGKQVFQTSVPLELQKGFSKKRIDHRHHAMDALVIACASNNIINYLNNESAKSQEKREDLRKKLCDKNRIIRKPWETFTQDAHTALENIVVSFKNYIRVINKATNYYEKYDKNGKKGIAEQKGQDMWAIRKPMHKETVFGQVNLQRKVTIKLKDALEKIPAICDKKLRDYINILVAKQFNKKQILAHFKSINYRLNMKSVDKVVVWQFSNEKEPMVATRKPIDTSFDDKRIATITDTGIQNILRNYLKAKDNNPNIAFTPEGIAEMNKHITEYNNGKQHQPILKVRVSEPKGAKYQVGETGNKTSKFVEAQKGTNLYFAIYEDKEGNRSYNTIPLNEVIERLKQGLSPVEDLNKQGEKLKFYLSPNDLVYVPTEEEKLSSECKLNKEQIYKMVSSTGNKCLFVPYSVAKPIYDKFEFEAKNKMGRALTGEMIKAVCWKLEVDRLGNILKVIK

SEQ ID NO: 3561 - protein, 1502 aa, unidentified
  REGION 1..1502: note = Description of Unknown: Cas Enzyme sequence
MKNILGLDLGTNSIGWAKVSMDDEGKYLQDIVLGSRIIPMSEDVLSNFDKGITVSQTALRTGFRSVRRLRERCLLRRERLHRVLHVLGFLPEHYDKALGWDRNCATTYGKFLDDSEPKLAWKRAEDGHFRFLFMDSFKEMVADFGLHQPTLVAGGRQIPLDWTVYYLRKKALSEPILKEELAWLLLNFNQKRGYYQLRGEEEEENPTKKEEYEELKVVSVEATEERKGDAIWYHAHLENGWIYRRQSKVSLDNWVGQVKAFIVTTEFEKDGVTPKLDKNGEVKRSLRAPSEDDWALRKKRTEKQLENSGQTVGCFIYDHLLAEPSDKIRGNFVRTIERKYYKDELRAILRKQMEFHPALRDDRMLRACIAELYQKNEAHQKSLLQKDMEYLLVDDLLFYQRPLKSKKSLIANCPYERHLYKWTNQETGEIKRDQILPIKCIAKSNPYFQEFRLWQFVHNLRLFRREDQVEVTGEYLSSREDYVRLFLCLNDRKEIKMETVLKDCFGLKKPRGKDSVYPLYWNYVQDKVYPGNETRYEILSALGKAGISLDWADKEGRMYRLWHLLYSVSDRLELKEALRKLNDDDAFVEAFLKVKPFKKDYGAYSEKAVKKLLAVMRMGSLWHEEDLCAQTKAKIAAIIEGRIDSKLKEKMGTERVFTSLNDFQGLPLWLACYVVYGRHSEVSEIKKWETPEQLMTYIRGFKQHSMRNPIVEQCVLETLRTVHDLWKEVGHIDEIHVELGRSMKKTAEQRERDMRQMMRNENTNLRIKHLLMELKRDQEMADVRPYSPMQQEILRIYEEGALLRLTKEDEDYDEIMKISQQAQPSQAQLTRYKLWLEQKYVSPYTGRPISLSKLFTPAYQIEHVIPQSRFFDDSLMNKVICEAEVNLLKGAMLGYEFIKAHGGEIVHCTMLGDVRILSEPEYKELVDACYTNHQKKRERLLAEDIPEGFLARQMNDTRYISRVVMSLLSNVVREKDEEEATSKNVIPCTGGITDQLKKDWGLKDVWNTIVTPRFERLNELTKTEHFGRWENKEGKRVFQTDVPLELQQGYSKKRIDHRHHAMDALVIACASRSMINYLNNESAKKPKCREDLRIKLCDKNRVMRKPWETFTQDALAALENVVVSFKNHVRVINKATNYYERFDEKGKKVYVSQRGNALWAIRKPMHKGFVFGEVNLRRKALVPIAKALENISAICNKDLRRYIDGLVANKFNEKQLVAHFKSLHYRWNRQDVSKVEVILESKDKERMVAIRRLLDTSFDKKRIGSITDTGIQKILLCYLEAKGGDPAMAFTPDGIAEMNRDISLYNGGKRHQPILKVRVSESKGAKFQVGEKGAKVRKFVEAQKGTNLYFAIYEDREGIRSYSTEPLDEVAERLKQDQSPVPERNDNDVPLKFYLSPNDLVYVPSEEERMSEDVCMNKSRIYRFVDASGTTANFVPHTVASLIYSVDKKTAESFCQGNIIQDEFGVGSSQSKNQRAITGEMVKAVCWKLEVDRLGKILKIIR

SEQ ID NO: 3562 - protein, 1210 aa, unidentified
  REGION 1..1210: note = Description of Unknown: Cas Enzyme sequence
MKIILGLDLGVASIGWALIFTTDDGEPIKILALGERIVSIDPDNSKEFATGATCTLNQKKTKAKTIRKGYFRYVQRREALTAELRHLGMMPNEALIKLPVLDLWQLRANAATEGVKLSLGEIGRVLYHINQRRGYKHAKSDVSSDSKQKEYVKAVNARYLMIQEQQQTIGQYFALKLKETAVTSEKGVFYTFRIKDQVFPREAYEEEFDRVIECQRKFYPELLTDKVIDKLRNYIIFYQRHGKSCKHLVSVCDFERKPYKDENGKVFYNGPKVAAKSNPLYQIEKIWEEVNNISLRNKKGEELEITLAQKRELFNYLNTHEILRLTVLYKILGISKRDGWSANDSIKRGLKGNKTFVQLQKALEGIEDGEKLLRFELNNLSTVVCDEVTGELLQVVDPDCIEQPLYRLWHAIYSIKDKKQLRDTLRKNFKIEDDTTINMLYNIDFTKDGYGNKSVKVIRRLLPYLQAGLKYNEACEYIGINHSNSLTKEENMQRTLLDKLPPIRKNELRQPIVEKILNQMINVVNAIILKYGRPDTIRVELARELKQSKEERKLMSDGIAAREKEKKRDSKILEEKEIPPTKNRLERYRLWKETGERCMYCGNEINLNEFLRGGEVETEHIIPKALLFDNSYSNKTCSCRECNRKKGRRTAYEYVSSLGEERFEVYLNVVKMLYDEGKISKTKMDRLLMKSEDIPQDFINRDLRQTQYISRKAMELLKKICYDVTATSGHVTSFIRHTWGYDTILHQLNFNRYKQGGLTEIVQFEHRGSKHEREVISGWSKRLDHRHHAIDALVIAMTKQSVIQRLNTLNTCRDEMYQEVESEKKEWRDDYSLLEQWLRELKHFSVEEVQRAIAKTLVSYKVNRKITSPGTRAVYSKRKKEVVQRGILIPRGVLHEDSVYGKIKIQGDLNPSYVLKYKLGVGAVGFVFTGKETYEETIKPNKKTGLDEIKVKDDIGNTLMSIVDGNIRNRIKQRLNIGFPEGKDYRNDPKKALNNLRNLDDHPLYADDACKIPIKSVRCRTGLSAVVPLRYNEKGQAIGFVKTGNNHHVAIYRDRQGNYHEIIVTFWQAVNRKRYGIPVIIEQPSTLWEAISNGSQQQIPPSVLETFPEPEWTFVVSMQKNESFILGMEEDDYQRAMAEKDYIALGKNLYVVQNISSMVYRFCLATTTIFDSKRMNKPDKRFFNIQSFQAFFDKNPHKIKIDLLGEIVNN

SEQ ID NO: 3563 - protein, 1413 aa, unidentified
  REGION 1..1413: note = Description of Unknown: Cas Enzyme sequence
MKTILGLDLGTNSIGWAKVSVDDYGNYLHDIKLGSRIIPMSQDVLGNFDSGVTVSQTAQRTEFRSKRRLVQRNLQRRERLHRVLHVLDFLPAHYDAAIGWDRTEAVTYGKFLNHAESKLAWEELGNGKRRFLFMDSFHEMVADFARCQPALVADGKKIPLDWTIYYLRKKALTQAITKEELAWILLNFNQKRGYYQLRGEEEENPTKKEGNVKRSFRAPNENDWGLRKKRTETLLEMSGKTVGAFIYDHLLQEPADKIRGNFIRTIERHYYKAELEAILAEQCKYHIELRDKEMLEACARELYLNNLPHQRSLMKKDMTYLLLYDLIFYQRPLKSKKALIANCPYEYYEYVDKETGEIKRQNIKCIAKSNPYFQEFHLWQFVLNLRLFDRVEDKEVTANYLPTADDHARLFTYLNDRKEINQETLLKDYFKLKKVKIGNEKEYPIRWNYIEGKEKKYPCNETRYELLMALDRAGIEHKWLDDNNLEYRLWHLLYSVEVKSESETALRKLKNDDAFVNSFLKVKPFKKEYGAYSEKAIKRLLAVMRKGFLWNEQDICDETRKRIEIIIKGDVDEKVKERMGHAAYSFDRVSDFQGLPEWLACYVVYGRHSEAMDIQHWDSPEGLMAYINNFKQYSLRNPIVEQCILETLRTVHDIWKETGQIDEIHVELGREMKSTSEERARRTQNVLRNENTNLRIKSLLIELKNDTDICNVHPYSPMQQEILRIYEEGALQELNREDEDFEEISKISQMSQPSGKELNRYKLWLEQKYRSPYTGKAISLAKLFTPAYQIEHVIPQSRYFDDSFTNKVICEAEVNTLKSNLLGYEFIKKHGGEIIHCTTLGDVRIFSESEYKAFVTEHYANNKSKKDKLLMEDIPQEFLNRQMNDSGYISKVVKTLLSNIVRMEDESEATSKSVIVCTGGVTDRLKKDWGLNDVWNSIVYSRFERLNRLTGTEAFGHWENKDGKRVFQTSMPLELQRGFRKKRIDHRHHAMDALVIACASRNIVNYLNNESANNPKKREDLRRQLCDKNRVIRKPWETFTQDAYNALRNVVVSFRNYVRVINKATNRYEHYDENGKKRFVQQKGSELWAIRKPMHKETYYGHVNLRRKELVTLQKALDDIPSICDKKLRDYISALVEKHFNKRQMLAHFKSTDYYWQKQYVNKVYVWTFSDDIKPLVATRKLLDTSFDAKRIGTITDTGIQKILRNYLEAKGGNATLAFTPEGIAEMNQNISKYNDGKPHQPILKVRITEPMGAKYRVGQTGNKMAKYVKAQSGINLYFAIYEDSEGKRSYTTVPLDEVAERLKQRLSPVPEKDENDVPLKFYLSPNDLVYVPTEEELQLRECKLNKDRIYKMVSSTGNECHFIPYYVANVIYNKVEFEAKNKIGRALTGEMIKAVCWKLEIDRLGNILKVIK

SEQ ID NO: 3564 - protein, 1388 aa, unidentified
  REGION 1..1388: note = Description of Unknown: Cas Enzyme sequence
HATTYGKFLDDSESKLVWIRTEDDHYRFLFMDSFHEMLADFAQHQPQLVADGQKIPLDWTLYYLRKKALSQPILKEELAWILLNFNQKRGYYQLRGKEEGEDQKKKGEDQTKKEEYYELKVVRVEETGEPKGSPISYVIYFENGWFCTKDSITPLHVLVGQNIGVIATWKYEKDGKTLKKNKDGSEQITVKIPKEDDWGAYKKRTEKQLETSGQTVGCFIYDHLLAEPSDKIRGNFVRTIERKYYKDELRAILRKQMEFHAELRDSEMLAACAKELYQKNEAHRKNLLQKDMEYLLVDDLLFYQRPLKSKKSLIDNCPYEQHIYEFVDKETGEIKKDQIQNIKCIAKSNPYFQEFRLWQFIQNLRLYRREDDAEVTGEYLQSSEDYVRLFLYLNDKKEIKMETVLKDFLGMKKAKGKDVGYPLRWNYVEDKTFPGNETRYEILSALGKAGLPTEWAEQDNRMYRLWHLLYSVDDTQELRGALKKFKDDEVFVESFLKVKPFKKDYGAYSEKAVKKLLAVMRMGSLWHEEDICAETRTRIINIITGNIDSKLKEKIGGTRAFTTITDFQGLPVWLACYVVYGRHSEVSEIKKWETPEQLMEYIRGFKQHSMRNPIVEQCILEALRTVHDIWKEVGHIDEIHVELGRSMKKTAVERERDMRNSMRNENTNLRIRNLLIELKNDKDIADVRPYSPTQQEILRIYEEGALQQLTKENKEYDEIVKISQQAQPTSTQLKRYKLWLDQKYVSPYTGKTISLSKLFTSAYQIEHIIPQKRYFDDSFTNKVVCEAEVNQLKSDMLGYEFIKAHGGEIVHCTMLGDVKILDEASYKELVVSHYANNNAKRKKLLAEDIPEEFLARQMNDTRYISKMVMSLLSNIVREKDEEEATSKNVIPCTGGITDKLKKDWGLNDIWNTIVMSRFERLNELTKTEAFGRWENKEGKRVFQTDVPLELRRGFSKKRIDHRHHAMDALVIACASRNVINYLNNESAKDTKRREDLRVKLCDKNRIIRKPWETFTQDALVALENIIVSFKNYVRVINKATNYYERYDEKGKKVNVPQKGEALWAIRKPMHKETVFGEVNLQRKEIIPIAKALDTVPAICNKALRKYIYGLIANKFNKKQLLAHFKSINYRWNRQDVSKVEVVVESKNNEEMVATRKLLDTSFDNKRIMSITDTGIQKILLCYLDAKGGDPTVAFTPEGIAEMNGDISIYNGGKWHQPIFKVRVSEPKGAKFQVGGKGAKSRKFVEAQKGTNLYFAIYEDMERVRSYSTVPLDEVAERLKQGLSPVPEKNDNDVPLKFYLSPNDLVYVPSEEDLLTDTMVLDKDRIYKMVSATGKECLFLPYSVASIIYNKFEFESLNKMGRALTGEMIKDVCWKLEVDRLGKILRIIK

SEQ ID NO: 3565 - protein, 1210 aa, unidentified
  REGION 1..1210: note = Description of Unknown: Cas Enzyme sequence
MKLVLGLDLGVGSVGWALIFITDSGEPIKILALGERIVSMDSNNSNEFSVGATCTLNQKKTKAKSVRKGYSRYVQRRDALTAELRHIGMMPDETLIKLPVLDLWQLRANAATEGKKLSLAEIGRVLYHINQRRGYKHGKSDVSSDNKQKGYVKAVNERYCMIQERQQTIGQYFALKLKETAITTEKGTFYTFRIKDQVFPREAYEEEFDRIIECQKKFYPELLTEKVIDKLRNYIIFYQRHGKSCKHLVSVCDFERKPYKDENGKVFYNGPKVAAKSNPLYQIEKIWEEVNNISLRNKKGEELEITLVQKRELFNYLNTHEILRLTVLYKILGISKRDGWSANDAVKRGLKGNTTFVQLQKALQGVEDCEELLRFQLNNMPTVVCDEVTGESLQMVNPDCIGQPLYRLWHAIYSLKDKRQLKDTLRKNFKIEDDETIDLLYNIDFTKDGYGNKSVKVIRRLLPYLQAGLKYNEACEYIGINHSNSLTKEENAQRVLLEKLPQIGKNELRQPIVEKILNQMINVVNAIIAKYGRPDTIRVELARELKQSKEERKLMSDGIVAREREKKRDGKILEEEGIHPTKNRLERYRLWKETGERCLYCGNGINLNEFLRGGEVETEHIIPKALLFDNSYSNKTCSCRECNRKKGRRTAYEYVSSLGEERFEVYLNVVKMLYDEGKISKKKMDWLLMKSEDIPQDFINRDLRQTQYISRKAMELLQKVCYDVTATSGHVTSFIRHVWGYDTILHKLNFNRYKQGGLTEVVQFEHRGGKHEREVISGWNKRLDHRHHAIDALVIAMTKQSVIQRLNTLNTCRDEMYQEVESEKKEWRDDYSLLEQWLRELKHFSVEEVQMAIAKTLVSYKVNKKITSPGTRAVYSKRKKKVVQRGILIPRGVLHEDSVYGKIKIQGDLDPVYVIKYKLGVGAMGFVFTGKETYQETIKFNKKTGLDEVKVKDDIGNTLMSIVDGNIRNRIKQHLNIGFPEGEDYRNNPKKALENLKDLDNHPLYADDACKIPIRSVRCRTGLSAVVPLRYNREGQAIGFVKTGNNHHVAIYRDRQGAYHEIILTFWQAVNRKRYGIPVIIEQPSALWESISNGFQQQIPPSILETFPEPEWTFIVSMQKNESFILGMEEDDYQRAMDEKDHVTLGNNLYVVQNISSMVYRFCLSTTTIFDSQKMNKPDKRFLNIQSFQAFFDKNPHKIKIDLLGEIVNN

SEQ ID NO: 3566 - protein, 1401 aa, unidentified
  REGION 1..1401: note = Description of Unknown: Cas Enzyme sequence
MKKILGLDLGTTSIGWALVNEAENEFEQSEIIKLGVRVIQYDTFNKVDKMGNVSESKNPEEDFAGGKGLSPNAKRTKQRGARRNLQRYKLRRKNLMDLLTKSGIITKDTVLTEEGSFTTHETWRLRSLSASDKIEKEEFARVLLAINKKRGYKSSRKAKNEEEGCVIDGMAIAKELYDNQLTPGQYVLNILKEGRKYIPEFYRSDLKLEFDTIWNYQKQYYPDILTDELYKNLEGKNKTQTWAICQKPFDIVGIKLKGTASEKRFDRYKWRSEALNQKLDLEYLAIVLQEINNNLNQSSGYLGAISDRSKELYFKKETIGQNLYRQLQENFHGSLKNKVFYRQDYLDEFEQIWETQAQHHKELTPELKEEVRDVVIFYQRKLKSQKHLISNCEFEPKHKAIPKSSPLFQEFKIWCLVNSVELQNQKSKEQRKLDETERQLLFEELNIRGDLSHDQVLKCLELPKKEWKLNYKEGLSGNTTNQQLYGVYQLVAEYEGYGLDWAKKSAREINEELKAIFPEIGLSGDLLRFDADIHGNEFDKQAAYQLWHLIYSVEDDEKISEEDQFVYGNSAVALKKKLHKGFGFQPQYAAMLANLNLQQDYGQLSARAIKKIYPYLKEGFLYSEACEKAGYNHSHSLTAEELAKRDLNEKLNLLPKNSLRNPVVEKILNQMVNLVNQVIEVYGKPNEVRIELARELKKSADERKRMTQGINDAKKRNEEIVKILRKAPYNLTNPTRNDITKYRLYQELSEIGYKTIFTNRYISPSELFSKNIDIEHIIPKAKLFDNSFTNKTLAYREVNLEKDDSTALDFISEKYHSDLPDYKDRVESLYAAWVKTHNTKQVKGISKAKYEKLLMKEVDLPNDFIERDLRNSQYIAKKAKQMLLEVIRTVNTTSGSVTDRLREDWGLVNVMKELNLPKYKALGLTEDQERKDNKKVLVIKDWTKRNDHRHHAMDALTVAFTSHSHVQYLNNLHASRNVQSELHGIRKKITELHETKSGNSKRVFKAPMKNFRNEAKNHLEQVLISFKTKNKVVTQNVNYYKKSGETFKKVQLTPRGQLHKETVYGRIIEQGVKEEKLGAKMTFETALKVCKPKYKDAILRRLAEFGNDAKKAFTGKNAVAKNPVYTDATKQEQVPEKVKIHVAEENYTIRKEIGPDLKLDKVIDEGVKRILSARLEEFGGNAKEAFSNLDKNPIWLNEKAGIAMKRVKISGVKNAEALHDQKDHNGNLIMDAEGKTKPVDFVSTGNNHHVAIYRDHKGKLQEQVVSFYEAVARVNAGVSVIDYDYKKKEGWQFLFTMKQNEMFVFPAEGFDPNDMDLLDEKNAKVVSKHLFRVQKFTIKDYFFRHHLETNVEMNSKLKDVAYKRISLNGLEGVIKVRMNHLGEIVHVGEEVQQKKEVEMSI

SEQ ID NO: 3567 - protein, 1539 aa, unidentified
  REGION 1..1539: note = Description of Unknown: Cas Enzyme sequence
MQRILGLDLGTNSIGWAIIEKSDESGKIVDSGSRIIPMDAETLGNFAKGNTVSQTKERTQKRSVRRIRERFLLRRERLHRILKSLGYLPQHYSACIGWDIEHDKKHFGNFLEGKEPKIAWQPNEDGSYDFLFKKSFEEMLTDFRKNHPEIKKVPYDWTLYYLRQKALSEPITNEELAWIILNFNQKRGYNQLRDEVDIRPKSKKEEFVRLKVKSVVADESSKGKNTWYSISFENSDIIYRRQSKTSLDNWVGTTRGLIVSTDLDAQGNPKLRKDGSPSISIKSPSEDDWSVIKLRTEQDINQSGKTVGQFIYESLLFDPDVKIKGRLVRTIERDFYKKELKQILQKQAEFHPELRDKNLYQQCILELYPNNEAHRQNICNGDFVSLILEDAIFYQRPLKSKKSLIDNCPYEWHKGIDEGTGEIKDFPNKCIAKSNPYFQEFRIWKFLSDLRIYANTEIVDGHIKNDVDVTSQFISDDNQWDELFVWLNDKKDVEQKDLLKKLGIKDLTKYRWNYVADKRYPMNATRASILSMLKEGETFDRNLEQQIWHLLYSTQTKREIDQSLSSKNNKENGIYAKLYNAGISDSSIEKIKVLRFYDVGYGAYSEKAIKKLLPLMRKGNQWHAEDIDSQTLAKINSFLNGENPFERIPERVLHQLQSLKTLESFQGLPEYLATYIVYGKHSEVGKITKWHTPHDIDVYLNTEFKQHSLRNPIVESVVLETLRVVRDLWQVHEKFDEIHIELGRDLKNPRNVRERMTNQMRENENTNFRIKTLLVELAKFSGKDEIKPYSPSQQEKLKIFESTIISQSDPDQDISDIIKDLSNPAKTPTKSQIERYKSWLEQKYRSPYTGKIIPLSRLFTSDYEIEHVIPQSRYFDDSFSNKVICEAEVNKKKDNLLGYEFIKSHHGSIIKLATGEMVKIFEVDEYEKFVADTYAHAPAKRKKLLMDEIPSEFINRQLNDSRYISKVVKSLLSNIVREQNEDGEYEQEAISKNIIACNGRITDKLKKDWRIGEVWNHIILPRFERLNQLTESHEFTGVTIDGYTIPRVPLALSKGFQSKRIDHRHHAMDAIVIACTTREHVQLLSTEAAQSENKNIKYSLSRKLRYYKRVIIEGHSREFPTTFKLPWQNFIMDVEKALQEIVISYKQNLRILSKATNQYTAYENGKKVVRHQISGDHFAIRKPLHKDTVYGEVNLQRIRQTSLKEAIKQPNRIVNKRLKAKVKELFQKEKYNELQVLTFFKTFAHEWKDVNLKKVDVFYFTDERESMVATRFTNDLISIFSGKKKKDEVEKVIEKITDTGIQKILTNYLNQNLHRIEEAFSPEGLDDLNRNITLYNNGKRHKPIYKVRLAETKGKKFAIGQTGNKSKKFVEAQQGTNLFFAIYQNDEGKRKYETIPLETVIERKKQKLNPVPEVDTEGNKLLFTLSPNDLVYVPTEDERINGNVDIDKIDKTRIYRFVSSSSTDAFFVPNTTASLIYKVSKEQANNLFKSNTIVNEYGLGSTLDKTQRICTNNLETAGEMIKEICIPLKVNRIGKIEIK

SEQ ID NO: 3568 - protein, 1391 aa, unidentified
  REGION 1..1391: note = Description of Unknown: Cas Enzyme sequence
MKKILGLDLGTTSIGWALVNEKENNEEQSSIIRLGVRVNPLTVDEKSNFEKGKDITTNADRTKCRSARRNLQRFKLRREALADCLKRHGLMTDETPLCETNNSIIFKTYSNRAKAVCEKIALDDFVRVLFMINKKRGYKSSRKLNTDDEGTLVDGMDVAKLLYNEQITPGEYLLRLFKKGKKTRPDFYLSDLKAELERIWDFQRTFYPEILCDALKEDLKGKSRTQSSAIFYAKYKVSTAKIAGKDKRLQELTWRTDALRKQLTIDEVAYVICSINGEINGSSQRLSMISDRSKLLYFNHQTIGQYLMQRLEENPNAGLKNIIFYRQDYEDEFNDIWNSQATYHKELTPELKKEVKDIIFYQRGLKSCKWLINYCELEHEEIEVKTPEGKLRKITIGSKTCPKSSPLFQEFKIWQVLNNLQVSPLNSRRKAKRKKDEEPSLFSDEDMNTACRYLNEEEKLTLFKELSIKKELKKKDALKLLFENYKELDLNYKVISGNVTMASLYRAFQDIISLTGNGEFDFQAMPAEEAEKTVEEIFGGLGYKTAFLHFDASLHDKEFERQPAYRLWHLLYSYAGDQSKTGIEALVKRIQELCGFEPEYARILANISFIPDYGNLSSKAMRKILPYMQDGYEYSEACSKAGYRHSVSSLTKEEINKKTYKTHLDEIKRNNLRNPIVEKILNQMVNVVNSVIDTYGSIDEIRIEMARELKKSKPEREDMSFAISKATKETERIKGILEQEFKIQHVTRNDIIRYRLYEELKPNGYKTLYSNTYIPREDLFSKKFDIEHIIPKARLFDDSYSNKTLELRDINIEKGNQTAYDFVLSKYGEEGLYKYEQRVEEFKKNNEQAGTKCRKLLMREADIPSDFLNRDLNDSQYIAKKAHELLREIVPTVTATTGSITNRLREDWKLVNVMKELNWEKYDKLGLTEEYKDKDGNTVRHIKDWTKRNDHRHHAMDALTIAFTKPSFIQYLNNLNARSNKGGSIYGIEQKELERENNNLVFIPPIDPKIFRKQAKEHLSNILISIKAKNKVVTKNVNKTKSKSGTNRKVQLTPRGQLHLETVYGKIRTYKTEEIKVGTKLTEELIAKVADKKIREALMQRLSEYGGNIKKAFQNISKHPIWLNSSHTKHVPEKVKIVFFEDVFTIRKAIKPDIKIDKVIDSKIRRILQERLNEFGGEASKAFSNLDENPIWFNRDKGIAIKSVKIRGIAKGTAIRVKKDIHGKTIIGNNGYPVANDYVNTGNNHHVAIFRDKDGNLQEHIVSFYEATARAIQNLPIVDRNYNSEKDWKFLFSMKQNEYFVFPNPNTGFNPSEISLKDEKNYALISPNLFRVQKLSHQDYVFRHHLETNVDTNLQLKDITWKRIKAINNLTGVVKVRIDHLGRIVGVGEYK

SEQ ID NO: 3569 - protein, 1408 aa, unidentified
  REGION 1..1408: note = Description of Unknown: Cas Enzyme sequence
MLQYKNILMKRILGLDLGTNSIGWALVKEKENDNEQSSIKRLGVREIYLTTDEQSNFEKGKSITTNADRTLKRSMRRNLQRYKLRRDSLISVLKDEGFITADTLLNENGNRTTFETYRLRARAAAEEISLEELSRVLLMINKKRGYKSSRKAKADDESGQLIDGMEVAKKLYDDNLTPGQYVASLLRNRKNNIPDFYRSDLVAEFDKIWSFQRQFYPDVLTDSLKEELKGKGDKETWAICSKPFAIVGIKRNTKGWEQKKEDYAWRAESLQHKIDLERLAIVLQKVNGQIRNSSGYLGAISDRSKELFFNKLTVGQYQMAELDKNPNFSLKNQVFYRQDYLDEFERIWETQSKFHKELTPELKHLIRDIIIFYQRPLKSQKGLISLCELESREIEIERDGKKTKKTIGPRVCPKSSPMYQEFRIWQAINNLQVSGMVVADNQVDLFGKTIGKKFGKRFLEQEEKEILFKELNFKSKLTKKEILKLLFENYKELDLNYNEVKGNTTMAALLEACSKIIEMSGHGEYDFSKMSADEVESIVFPIFNGLGFNTDIFSFDSSVEGKAFDKQPSYMLWHLLYSYEGDKSKTGNESLISKISECYGFDKEYAAVIAGIRLEPDYGNLSVRAMHKILPYMKDGLGYSDACQYAGYRHSKRSLTKEEIEARPLKDKIDLLPRNSLRNPVVEKILNQMINVVNAVVDAYGRPDEIRVEMARELKKTKAQREETVKTIRKTTAENEKYKKELEEEFGLKNVSRNDIIKYRLYLELKDNGFKTLYSNTYIPREKLFSKEFDIEHIIPQAKLFDDSFSNKTIEARSINIEKADSTAYDYVQDKYGDEGLKKFKEKINQLYGKNIISKTKLKRLLTTEKDIPDGFINRDLNNTQYIARKACEILEEITRKVVPTTGSVTSRLREDWQLVDMMKELNWDKYDKLGLTEIIEDKDGRRIRHIKDWTKRNDQRHHAMDALTIAFTKPAFIQYLNNLNARSDKGGSIYAIERKELYRDNKGKLRFYPPMPLDEFRAEAKRHLEKILVSIKAKNKVVTRNVNITKAKKAEKGKRKKIQLTPRGQLHNETIYGRIKQYATKEEKVNASFTEDKIITVACKRYREALLVRLRQHDGDAKKAFTGKNSLAKNPLFTDNMHTEIVPEKVKTVTLAPLYTKREAVSPDLKIEKVIDIGIKRLLQKRLEQYGGDMQKAFSNLDENPIWLNEEKGISIKRVTISSVSNAEALHDKRDNRGQLILDKDGNKQPTDFVQTSGNHHVAIFRDADGNLQEHMVSFYEATARAIQHLPIINKEYNKDLGWQFLFTMKQNEYFVFPNEETGFNPKEIDLLNPKNYALISPNLFRVQTMSKVMYGNNTVRDYKFRHHLETTVTSDLKDVTYKQYKNLSFANYIVKVRINHLGQIVSIGEY

SEQ ID NO: 3570 - protein, 1525 aa, unidentified
  REGION 1..1525: note = Description of Unknown: Cas Enzyme sequence
MKRILGLDLGSNSIGWAVAIRKSDREESGVNECIEASGSRIIPMDAAIQGDFEKGNSVSQTAERTSYRGMRRLRERYLLRRERLNRVLDVMGFLPNHYAAALTRYGKFKAADGYKLAWQKDDDGKYGFVFNDSYAEMLADFKRCQSQWLGDGGLVPYDWTIYYLRRKALTQAITKQELAWILLNFNQKRGYYQLRGEEADEDKGKQEEFYALRVTDVVDTGERKGKDTWYDIKLENGMVYHRPAPTPPDWIGLVKEFIVTTQLDKDGKPKTDKDGMVKRSFRMPKEDDWTLIKKKTEADIDKSGKTVGEYIYDALLANPKQKIKGKLVRTVERKYYRKELELILEAQKNFIPELCDEALYKVCIGELYGVNDAYRHSIEGRGFTYLFVDNIIFYQRPLKSKKSLIDDCPYESHVYTDLVTGERKTVSVKCVAKSNPFYQEFRLWQFVSNLKIYQRKKVTDGVLRMDVDVTDEFLVTTDDRVKLFEWLNDRQDISQEILLGKYLNIKKPRGKDAQWPYRWNYVEDKVYPCNDTRGQMLKYLEKAGIDKDFLTADVEKSLWHILYSVEDKQELVHALGTFAGKHELGSKFAEVFSKFPPFKKEYGAYSEKAIKKLLPLMRMGNRWNEGAIDVHTRERIDKIINGECDETIRNRVREKAINLTEVTDFSGLPLWLACYVVYDRHSEARDVSKWTSPNDIDVYLKNFKQHSLRNPIVEQVVTETLRTVRDVWRQYGGFDEIHIEMGREMKQTAEQRKKTTQRITDNENANIRAKVLLTEFMNPDFEIANVRAYSPSQQELLRIYEDGALSNVGEVEDDISEIMKKLSEADVKKRPTHNEIMRYKLWLDQKYLSPYTGSPIPIARLFTTDYQIEHIIPQSRYFDDSFSNKVICESAVNALKDRMLGMEFIKEKHGQVVELGNGGTVEILSVEEYERLVTSNYKDNQLKMRKLLMDDIPDTFIERQLNDSRYISKLVKTLMSNIVREEGEEQDISKNVIATNGTITDRLKKEWGIKDVWNHIILPRFKRLNELTGSGKFTVPSASGHEIPDMPLAMQKGFNKKRIDHRHHAMDAIVIACTTREHVNLLNNESAKSENAVNRYQLSRKLRRYEQTEIIRDGERKTISVAREFIKPWPTFTADVEKVLNGIVVSFKQNLRIINKTTNRYQHYENGKKLMVSQVKGDSWAVRKPLHKETVFGEVNLRFTREVALKEALKQPKAIVDKDLKRKIVTMLELGYDDKKIKQFFEANKEVWHDFNPAKIKVYYYTKDVLDKEGNVKDRYFATRKPLDTSFTSKRIESVTDTGIRKILLRHLEACGGNAELAFSPEGIEAMNRNIVTLNNDKFHQPIYKVRVYEKADKYPVGKRGGKASKFVEAAKGTNLFFAVYESEEMDKATGEVKKKRSYATIPLYDAVRRTKAGLPLAPDDANGNKPAFVLSPNDLIYLPTKEDNERGTIGMPLDKGRVYKMVSCTGNECFFIPYSVSSAIIDKYEFSPLNKIARAITGEMIKEICVPLKVDRIGNIIEINGRKL

SEQ ID NO: 3571 - protein, 1590 aa, unidentified
  REGION 1..1590: note = Description of Unknown: Cas Enzyme sequence
MVRNGTKKPAVEGRRANLMFSQRNNPYCDLLKILSAKIVKTNLTAKVFIVFLYICKNNLVNINSMKRILGLDLGPNSIGWALVKMENESDLLVETNHIEACGSRIIPMDAAVQGNFESGNSVSQTAERTGFRGIRRLRERCLLRRERLNRILDIMGFLPEHYASALTRYGKFKDADGCKLAWRKLEAGKYEFIFKDSFNEMLADFRRSQAEWLGDSAVVPYDWTIYYLRKKALAHAITKQELAWILLNFNQKRGYYQLRGEEEEDKEDKAEEYYALKVVEIRDTGEGKGKDTWFDIVLENGMVYHRAATEAPDWIGKVKEFIVTTQLDNEGKPKLDKDGNVRRSFRMPKDDDWALLKKKTEADIDKSGKTVGAYIYDTLLTNPKQKIKGKLVRTVERKYYKAELKQILDSQKRFIPELNDDKLYEACIDELYSSNDAYRESILNRGFTWLFIDNIIFYQRPLKSKKSLIDDCPYETHTYMDKTTGEMKNAGVKCVAKSNPLYQEFRLWQFVANLRIYERMKKVDGVLRTDVDVTDEFLGTTDDRVRLFEWLNDRKDVTQEVLFGTFFGKKKPKGKESVFPYRWNYVDKAYPCNETRGEMIKCLEKAGVCKDKLTTEMEKSLWHVLYSVDDKQELGRALETFADKHGFGEAFVETFAKFKPFEKEYGAYSEKAIKRLLPLLRMGKHWSADAIDEATRVRIDKIIDGEYDENIRSRVREKAMNLTDVTKFSGLPLWLACYVVYDRHSEAKDIVRWTSPDDIDGYLRCFKQHSMRNPIVEQVVTETLRTVRDIWRQHGRPDEIHIELGRDMKRTAEQRKAASQINVDNENANIRVKALLAEFMNPEFGIDNVRPYSPSQQDLLRIYEDGVLDSAGGDIPDDISEIMKKLSETDVKRKPTHSEVLRYKLWLDQKYQSPYTGRFIPLARLFTSDYQIEHIIPQSRYFDDSFSNKVICEAAVNALKDKMLGMEFIKEKHGQKVELGNGQTVDILSVEEYERLVARIYGNNKPKMRKLLMDDLPDDFIARQLNDSRYISKMVKTLMSNIVREEGEQEDISKNVVTCNGTITDRLKKDWGAGDVWNRIVLPRFKRLNEITESNRFTTMSSNGHEIPDMPLELQKGFKKKRIDHRHHAMDAIVIACTTREHVNLLNNEAAMSKNNANRYQLSHKLRRYEDTTIIRNGEAKRISVAKEFLKPWPTFTADMEQALRGIVVSFKQNLRVINKTSNKYQHFEEGKKKMVHQVKGDSWAIRKPLHKETVFGEVNLRVIREVSLKEALKRPRSIVDKDLKRKIVTMLELGYDEKRIKTYFLSNKDAWHDFNPSKIKVYYFTQEILDKSGNVKDRYFATRKPLDTSFSRKRIEDAVTDTGIQKILLRHLDACGGDSEKAFSPEGIEAMNQDIVNLNNGKQHQPIYKVRVYEKADKYAVGKRGSKAKKFVEAAKGTNLFFAVYETEETDKATGLPKKRRTYATIPLYEAVRRAKEGLPVAPEDANGNSPAFVLSPNDLVYLPTREDIDSGQISLPLDKSRIYKMVSSSGNQCFFVSFTVASAIVDKVEFSSLNKMERAITGEMIKETCVPLKVDRIGNIVELNGKKL

SEQ ID NO: 3572 - protein, 1394 aa, unidentified
  REGION 1..1394: note = Description of Unknown: Cas Enzyme sequence
MKRILGLDLGTNSIGWAVVNEKESNEEKSSIERIGVRVVPLTTEEQQRFDKGKAITTNAKRTEKHGMRLNLFRYKMRRSYLIKLLKDGGLITDDTLLAENGNRTTFETYRLRAKAADEEIGLEELARVLLMINKKRGYKSNRKVKSEDEDGQIIDGMDVARHLYDNNLTPGQYASALFNEGKRNLPDFYRSDLKTEFDKVWNFQKAFYPNILTDELHNALQGKNEKQTWAICEQPFNVKGVKRTTKGFEQTRENYKWRAESLKQKMELEQLIVVLQKINGQINSSSGYLGAISDRSKELYFNHQTVGQYLMSQLDANPNCSLKNQVFYRQDYLDEFERVWETQARFHKELTPELKHKMRDCVIFYQRPLKSQKGLISFCEFESQEKEFEIDGKKKFKMTGLRVSPKSSPLFQEFRIWQTLNNVLVSGKIVPDRQIDLFGESVTYKQGKRCLEQEEKEILFGELSVKEKLTKSEILKLLFKNHKELDLNFKEIKGNTTQAALFKAYQKIIELSGHGEHDFTKMSANKITDMVSRVFSALGFNTGILSFDSSIEGKAFERQPAYRLWHLLYSYEGDKSVTGNYRLVKKIAELFGFDEEYAKLIANVAFEQDYGSLSAKAMRKILPYMRDGVEYSEACALAGYRHSERSLTTDEIENKELKDQLRLLPRNSLRNPVVEKILNQMINLVNSLMAEYGRFDEIRIEMARELKKNAKEREETVKAISKATKENDEYRKVLEEEFGMKNVSRNDILRYRLYCELQENGFKTLYSKTYIQKEKLFSKEFDIEHIIPQSKLFDDSFANKTIEVRSVNIEKGNMTALDYVENKYDKSYTEKFKDRIEALYKKGAISKTKRNRLLTKEEDIPEGFIDRDLRNTQYIARKACEILEQVTKTVVATTGSVTDRLREDWQLVDVMKELNWNKYDKVGLTEIVKDKDGRNIRHIKDWTKRNDQRHHAMDALTIAFTKHSFIQYLNHLNTRSNKADSIYGIEKKELYRDDKGKLKFVPPMPLNEFRAEAKRQLNDILVSIKAKNKVVTQNVNTTKTQKNGKRRNEKVQLTPRGQLHNETIYGSIKQYVTKTEAVGSAFDMDKIATVTVTKYRDTLLRRLNQFSGDAKKAFTGGNSLDKNPVWVDEAQTKQVPSKVKTVTLETIYTQRKEINKDLKVDKVISKRIRTILENRLNEFGGNADKAFSNLDENPIWLNKENGIAIKRVTIKGVNEVEALHEKRDHNGKLILDHSGKRQPTDFVSTSNNHHVAIFRDADGNLQEHIMSFYEATARAIQHQSIIDKDYRKADGWQFLFTMKQNEYFVFPNQDTGFNPEEIDLFDPKNYATISPNLFRVQKLSSKYYVFRHHLETKVDDTKELQGVTWKRITALKNLKGIVKVRIDNIGKIVAVGEY

SEQ ID NO: 3573 - protein, 1558 aa, unidentified
  REGION 1..1558: note = Description of Unknown: Cas Enzyme sequence
MKHILGLDLGTNSIGWALVKSEQDCDDVERINGIEAAGSRIIPMDAAVLGDFAKGNTKSQTADRTAARGIRRMGERHKLRRERLNRVLDVMGFLPEHYSAALTRYGKFKDGEECKIAWRKDESGQWTFVFEDSFREMLADFVAHQPEWLAGGRKVPYDWTIYYLRKKALSKPLTKQELAWLLLNFNQKRGYYQLRGEDEHTDDKGKLVEYYALKVVGVEDTGDKKGKDTWFNIMLENGMVYRRPAAEAPDWIGKTKEFIVTTDLEKDGTPKKDKEGNIKRSFRMPKEDDWTLIKKKTENDIDRSGKTVGEYIYDALLADPTQKIRGKLVRTVERKYYKEELKKIINSQKRFIPELNDNELYGRCISELYQSNDAYRQSISSCDFTYLFVDNIIFYQRPLKSKKSLIDNCPYEEHSYTDSKTGEVKTAPVKCVAKSNPLFQEFRLWQFVQNIRIFERQKKIGDSVKTDVDVTGEFIKSADDVVSLFDFLNDRKDITQSVLLGTYFKIKKPKGKDSDYPYRWNYVEDKTYPCNETRALILKGLKDAGIDEGFLDKDKEYSLWHILYSVEDKQEITKAMEKFAAKNSLGGKFAEVFSSLPPFNKNYGFYSEKAIKKLLALMRTGKYWSADAIDKHTLERIDKIINGEYDESIRTRVREKAINLTDVSHFRGLPLWLACYIVYDRHSESKDITRWNCPADIDLYLDHFKQHSLRNPIVEQVVTETLRTVRDIWRQYGKIDEIHIEMGRDMKNPADVRAKMSKRMIDNENANLRIKAMLAEFADPDFGIAGVRPYSPSQQEMLRIYEEGALESVDEVPDEINEIISKFNQTDIKKRPTHGEIIKYKLWLEQKYQSPYTGRTISLSRLFTDDYQIEHVIPQSRYFDDSMSNKVICEAEVNQLKDRMLGYEFIKAHHGEKVLLSSGETVTILTAEEYERLVQLNFRKNPVKMKKLLMDDIPDKFIERQLNDSRYISKKIKSLLSNMVRDEGEQEDISKNVIACNGAITDRLKRDWGVNDVWNRIILPRFERLNAVTGSDRFTTTSTNGHTIPDMPLNLQKGFNKKRIDHRHHAMDAIVIACTTRSHVNLLNNEAAMSKNNAVRYQLSRKLRRYEDTMVTRNGETRTISVTREFLKPWPTFNADVEKALRGIVVSFKQNLRVINKTVNKYQKFVYNEEKHIKEKKAVRQEEHNGRHLLAIRKPMHKDTVYGDVNLRRIKEVSLKDAVANPKAVVDKDLKKKLMAMIELGYDLKQITKYFEDNKDAWQDVNLKKIKVYYFTKDTGDRYFATRFGNDLVTLFSKITDRKNAEKQIERITDTGIQKILKRHLDANGGDCQKAFSADGIDEMNRNITQLNGGRPHKPVYKVRIYEKADKFAIGTKGNKAAKFVEAAKGTNLFFAVYLKEYEDSTTGETIKKRVFDTIPLKTVIDRLKNRQTPAPEEKDGAKLLFVLSPNDLVYLPTEDEVKNGTINRPLDKRRIYKMVDSSKSLINFVPQSVAKVIYSVSKEMAKQYSSNENNIVVDEFGLGSPKSKNERAITGEMIKEKCVPIKVDRLGNITEVNNEKI

SEQ ID NO: 3574 - protein, 1538 aa, unidentified
  REGION 1..1538: note = Description of Unknown: Cas Enzyme sequence
MKNILGLDLGTNSIGWALVKSEQDSDDIESIKGIEAAGSRIIPMDASVLGDFAKGNTKSQTADRTAARGVRRMGERHKLRRERLNRVLDVMGFLPEHYSAALTRYGKFRDGEECKIAWRKDDNGKWTFVFEDSFREMLADFVAHQPEWLAGGRKVPYDWTIYYLRKKALSQPLTKQELAWLLLNFNQKRGYYQLRGEDEQADVKGKRVEYYALKVVGVEDTGEKKGKDTWFNIMLENGMVYRRPAAEAPDWIGKTKEFIVTTDLEKDGTPKKDKEGNIKRSFRMPKEDDWTLIKKKTENDIDRSGKTVGEYIYDALLADPTQKIRGKLVRTVERKYYKEELKKIIDSQKRFIPELNDKELYVRCISELYQSNDAYRQSISSCDFTYLFVDNIIFYQRPLKSKKSLIDNCPYEEHAYIDKKTGEVKTATVKCVAKSNPLFLEFRLWQFVQNIRIFERQKKIGDSVKTDVDVTGEFIKSADDVVSLFDFLNDRKDITQSVLLGTYFKIKKPKGKDSDYPYRWNYVEDKTYPCNETRALILKGLKDAGIDEGFLDKDKEYHLWHILYSVEDKQEITKAMEKFAEKNSLGDKFAEVFSSLPPFNKDYGSYSEKAIKKLLALMRTGKYWSAEAIDKHTLERIDKIINGEYDESIRTRVREKAISLTDVSHFRGLPLWLACYIVYDRHSESKDITRWNSPADIDQYLDHFKQHSLRNPIVEQVVTETLRTVRDIWRQYGKIDEIHIEMGRDMKNPADVRAKMSKRMADNENANLRIKAMLAEFADPDFGIAGVRPYSPSQQDMLRIYEEGVLESVDEVPDDISEIISKFNQTDIKKRPTHGEIIKYKLWLEQKYQSPYTGRTISLSRLFTDDYQIEHVIPQSRYFDDSMSNKVICEAEVNQLKDRMLGYEFIKAHHGEKVLLSSGETVTILTAEEYERLVQLNFRKNPVKMKKLLMDDIPDKFIERQLNDSRYISKKIKSLLSNMVREEGEQEDISKNVITCNGAITDRLKHDWGVNDVWNHIILPRFERLNAVTGSDHFTTTSTNGHTIPDMPLNLQKGFNKKRIDHRHHAMDAIVIACTTRSHVNLLNNEAAMSKNNAMRYQLSHKLRRYEDTMVTRNGETRTISVAREFVKPWPTFNADVEKALRGIVVSFKQNLRVINKTVNKYQKIVYNEDKHRNEKKTVRQEEHNGRHLLAIRKPMHKDTVYGEVNLRRKKEVSLKDAVANPKAVVDKDLKKKLMAMIELGYSLKRIKQYFDDNKDAWQDVNLKKIEIYYFTKDTGDRYFATRFGNDLVTLFSKITKADDAEKQIERITDTGIQKILKRHLEANGGDCQKAFSADGIDEMNRNITQLNGGRPHKPVYKVRIYEKADKFAIGTKGNKAAKFVEAAKGTNLFFAVYQKEYEDSATGKTIKKRVFDTIPLKTVIDRLKNRLAPAPEEKDGSKLLFVLSPNDLVYLPTEDEAKNGTIKQPLDKRRIYKMVSSSGNQCFFLQYNVASTIVDKMEFSPLNKMERAITGEMIKETCISIKVDRLGNITEINNEKI

SEQ ID NO: 3575 - protein, 1508 aa, unidentified
  REGION 1..1508: note = Description of Unknown: Cas Enzyme sequence
LVIRRNDSDGPEFIERIEAGGSRIIPMDAAIQGDFENGNSVSQTAERTGYRGIRRLRERCLLRRERLNRVLDVMGFLPDHYAAELTRYGKFKEPDGCKLAWRRNDDGKYEFVFKDSYAGMLDDFRQYQGQWLGDGGLVPYDWTIYYLRKKALTQAITKQELAWILLNFNHKRGYYQLRGEDTDGDKSKLEEFYALKVVDVVDTGERKGKDTWYDIMLENGMVYHRPAPTPPDWIGKVKEFIVTTQLDNDGKPKTDKDGTVKRSFRMPKEDDWTLVKKRTEADIDRSGKTVGEYIYEALLADPKQKIKGKLVRTVERKYYREELRRILDAQINFIPELRDEALYEACLNELYGTNDAYRHSIEGRGFTYLFVDNIIFYQRPLKSKKSLIDDCPYESHAYVDKETGEQKTVPVKCIAKSNPLYQEFRLRQFVANLRIYQRQKEIDGILRVDVDVTDEFIATVDDQVKLFDWLNDCQNISQEALLVKYFKIKKPRGKDVPLPYRWNYVEDKTYPCNETRGKMLEFLEKAGVDKGILTKDVEKSLWHIFYSVEDKQELNRALITFAGKHGLGDKFVEVFSKFPPFKKEYGAYSEKAIKRLLPLMRVGSHWSEGDIDENTRSRIENIINGEYDETIKDRVREKAINLTDITQFSGLPLWLACYVVYDRHSEAKEVTKWTSPEDVDTYLRHFKQHSLRNPIVEQVVTETLRTVRDIWRRYGTIDEIHIEMGREMNQTADQRKKATQRITDNENANIRAKVLLTEFINPEFGIDNVRPYSPSQQELLRIYEDGVLGSVGEIEDDISAIMKKLSETDVKKRPTHNEVMRYKLWLDQKYLSPYTGRFIPLARLFTTDYQIEHIIPQSRYFDDSFSNKVICESAVNALKDRMLGMEFIKEKHGQVVELGNGTTATVLSVEEYERLVANNYKNNQPKMRKLLMDDIPDDFIERQLNDSRYISKLVKTLMSNIVREEGEEQDISKNVIVTNGAITDRLKKDWGVKDVWNRIILPRFKRLNELTGTGKFTTTSASGHEIPDMPLDMQKGFNKKRIDHRHHAMDAMVIACTTREHVNLLNNEAAMSKNNANRYQLSRKLRRYEQTEVIRNGERKTISVAREFMKPWPAFTTDVETVLRDIVVSFKQNLRIINKTTNRYQHFDNGKKSMLHQAKGDSWAVRKPLHKETVFGEVNLRFVREVALKEALKCPKAIVEKDLKSKITAMLELGYDDKGIKQYFESNKDVWHDFNPTKIKIYYFSNDILDKDGNVKDRYFATRKSLDTSFTRKRIESVTDTGIQKILLRHLESYDDNAEQAFSPDGIEAMNRNITILNSGKFHQPIYKVRVYEKADKYPVGKRGNKAAKFVEAAKGTNLFFAVYETEEFDKVTGDIKKKRSYATIPLYEAVKRAKAGLSIAPANADGNEPAFVLSPNDLVYLPTKEDIERGMINMPLDKSRIYKMVSCTGKRLYGIPYSVASSIIDKFEFTQLNKLEFTDNKELIKETCVPIKVDRIGNIIEINGKKP

SEQ ID NO: 3576 - protein, 1385 aa, unidentified
  REGION 1..1385: note = Description of Unknown: Cas Enzyme sequence
MKKILGLDLGTNSIGWALVKEAETSEEKSSIVKLGVRVIQYDNFVSTETGKDSKEPEKDFKGGKGISPNAGRTLKRSMRRSLQRYKLRRDNLISILKNQYFISEETILAESGNSTTFETYRLRAKAATEEISLEQFARVLLTINKKRGYKSSRKAKGSDEGELIDGMEVAKKMYDDNLTPGQLCLNLLQAGKRNIPVFYRSDLQNEFDSIWNKQKEFYKDILTNELKETLKGKNEKQTWAICQTPFKIVGIKRTTKGEELKKENFAWRVKALHEKIDLEELAVVLQKINGQIKSSSGYLGEISDRSKELYFTKQTVGQYQMSILAKNPNASLRNMVFYRQDYLDEFEKIWETQSQYHKELTTELKKEIRDVVIFFQRRLKSQKGLISFCELENQQKSVIVDGKPKTITIGRKVCPKSSPLFQEFKIWQILNNLEITNKNNGEKRLLEQEEKDSLFLELSIKEKLSKDEVLKLLFNNYKELDLNYKSVEGNRTQATLFTAYQQIIEASGHGENDFSKMKYADVIEIVEGVFSSLGFNTEILKFNADLAVNELEKQPLFQLWHLLYSYEGDNSNTGTQKLIEKISAKFGFDKEYASIISKISFQDDYGSLSTKAISKILPYLKDGDEYSKACLLAGYNHSKNSLTREEIENKILKDKLGILQKNGLRNPVVEKILNQMINVVNAVVETFGKPDEIRIELARELKKSAKEREDMTKAINDSTAAHEKIKLLLQKEFGLSHVSKTDIIRYKLYSELEPRGFKTLYSNTYISPEKLFSKEFDIEHIIPQSRLFDDSFSNKTIESRSANIEKGNETALDYITAKYDDNYLQDYLSNIELLFKNGNISKAKFNKLKMCGKDIPSDFINRDLRDTQYIASKAKSILADLVREVISTSGAITDRLREDWQLIDVMQELNWDKYDKLGLTEIIEGRDGQRIRRIKEWTKRNDHRHHAMDALTIAFTKRSYIQYLNNLNARSDKSSSIYGIEQKELYRDNLGKLRFKPPIAIDSFRAEAKKHLQNTLISIKAKNKVVTSNINITKKPGPDNKKKQLTPRGQLHNETVYGQIHQYVTKEEKIGAQFSVEYVQNVAKKTYRNALLMRLAENNNDPKAAFTGKNSLSKNPIFIDEAHSMTVPEKVKLVFKEPVYTIRKEISADLKIEKVIDVKIRNILEARLKEFNNDAKKAFSNLDENPIWLNKEKGISIKRVTITGVSNAIPLHDKKDHHGNIITDAQGRKQAVDFVSTSNNHHVAIYKDQNGNLQEKVVSFFEATTRANQGLPIIDKEHNITEGWKFLFSMKQNEYFVFPNESTGFNPSEMNLLDPDNYHLISPNLFRVQKFTVKDYFFRHHLETNVADKKELFGHSWKRGGLTLLNQTIKLRINHIGQIVSVGEY

SEQ ID NO: 3577 - protein, 1530 aa, unidentified
  REGION 1..1530: note = Description of Unknown: Cas Enzyme sequence
MNNSKKILGLDLGTNSIGWALVDIENRKIEGIGSRIIPMSQDILGKFDSGNSISQTAERTGYRGTRRLRERHLLRRERLHRVLHLMGFLPKHYEQQIDFENRLGKFLTDTEPKLVWKEIENGKFDFIFKNSFNEMVEEFQRHQPQLFENNNLIPYDWTIYYLRKKALKYKIEKEELAWLLLNFNQKRGYYQLRGEEEEENPNKLVEYHSLKVIDVTADEPQKGKTDIWYSVVLENGWVYRRSSKSPLFDWIGKTREFIVTTDLNDDKTVKTDKDGKEKRSFRAPSEDDWTLLKKKTEADIYNSHKTVGTYIYETLLQKPTQKINGKLVRTIERHFYKNELNAILEKQTEFHKELQNKELLNACIEELYPYNESHRDTLQSTNFTKLFLDDIIFYQRPLKSKKSLISNCKYEFRTYKTVEGQLEKEPIKCVPKSHPLYQELRLWKFVKDLKIYEREKNINGKLHTDYNVTDEFIKTEDDLVALFDWLNDRKEIKQDTLLTSYFKIKKKKGDDKLPFRWNYVENKEYPCNETHAQFANRLAKIKDVPVDFLTSSKEMELWHILYSVTDKLEIEKALTTFATKNSLPAEFVDIFKKFPPFKSEYGSYSEKALKKLLPLMRMGKHWDFENIDGKTKLRIEKIISGEVDESIQNQVREKSIHLSQPDDFKGLPEWLASYVVYNRHSEASDYIKWKTYHDLENYLAEFKQHSLRNPIVEQVITETLRVVRDIWKKYGDITEIHVELGREMKNPADKRAEMTKRVSENENTNLRIKALLAELANDRNIENVRPYSPSQQEILKIYEEGVLKSGIEIDDDISKIAKSSQPTKSELIRYKLWLEQKYRSPYTGEMIPLGKLFTSAYQIEHIIPQSRYFDDSLSNKVICESVVNGYPYKDNQLGYEFISKNEGRIVPELSSAHKTVKIFRLDEYETFVKQHYGKNNAKMKKLLMEDIPDSFIERQMNDTRYISKVIKGLLSNIVREEDEAEPTSKNVIPVTGAITDRLKQDWGLNDIWNRIVLSRFERLNELTGTNLFGQWENKGGKRVFQTQMPLELQKGFNKKRIDHRHHAMDALVIACTTRSHVNYLNNENARKKDEPTRYELRNKLRRLEDIEVDRIENGVKVRKKITVAKEFIKPWNTFTEDGQKALESIVVSFKQNLRVINKTVNKIESYKDENGNLYLNKEGKPTKGERKQIKGDNWAIRKPLHKETVAGQVDLRFRKQVTLSAAIDQWEMLVDKSLKTKIKQLINEGFDKKKIQKFFADKENKWQEKDISKPEVYYFSDEKEVLVASRSTLNESFNSKAIESITDTGIQKILKNHLAKYNEEKDGKIIEHPELAFSAEGIEDMNKNIKEFNGGKFHQPITKVRCYEPKGNKFNVGTNGNKKDKFVVAATGTNLYFAIYVNKEGKRSYETIQLNVVIERLKQGLNEVPEINDNGDELLDFLSPNDLVYVSNSIENRPTQDQIDSAVNENDALYKIVSFTGNRLYAIPNNVAKAIVDKKEYSILNKLEFTVVDNLPIKQFCWKLTIDRLGNISI

SEQ ID NO: 3578 - protein, 1498 aa, unidentified
  REGION 1..1498: note = Description of Unknown: Cas Enzyme sequence
MKRILGLDLGTNSIGWALVNEGENDEQKSILGIGSRIIPMSQDILGKFDSGNSISQTSERTGYRGVRRLRERHLLRRERLHRILHIMEFLPKHYEKNIDFENKLGKFISDTEPKLVWKDNDNGSFDFIFKDSFNEMVEEFKLTQPQLFEADKLIPYDWTIYYLRKKALEQKIEKEEIAWLLLNFNQKRGYYQLRGEEEEENPNKLVEFHSLKVIEVTADEPQKGKQDIWYSIILENGWIYRRSSKTPLFDWKDKVRDFIVTTDLNNDGTVKVDKDGKEKRSFRAPSEDDWTLVKKKTESDINKSDKTVGRYIYDTLLQNPTQKINGKLVRTIERKFYKQELKAILDKQKEFHSELNDVELYHACLNELYGNNEAHRNSNANRDFTHLFLNDIILYQRPLKSKKSLISNCKYETRTYTNKETGEKQTDAIKCIAKSHPLYQELRLWKFIQDLRIIEREKNINGKLSTDVDVTTEFLKTEDDYVELFDWLNKVKEIKQDTLLSSYFKIKKKKGEEKLSHRWNYVEDKEYPGNETRAQFLNRLSKVSNLPDNFLDKDKELQLWHVLYSVEDKLEIEKALMSFSLKNQLGVDFVEVFKKFPPFKKEYGAYSEKAIKKFLPLMRMGKYWQLDNIDNKTKLRIEKITAGEWDETIQNRVREKAYKLNSITDYKGLPEWLVSYIVYDRHSESSDISKWKTPEDLEAYLRTFKQHSLRNPIVEQVITETLRTVKDIWKNYGDFTEIHVELGREMKNPADKRKTMTAQITENENSNLRIKHLLAELMNHSDVENVRPYSPSQQEILKIYEEGVLNSGIEIPEDISKIIKQSQPSKSDLIRYKLWLEQKYRSPYTGEMIPLGKLFTSAYEIEHVIPQSRYFDDSFSNKVICEAAVNKEKDNALGYEFIKKNEGRIIELNYGKSVKIFTVSQYEDFVKQYYSKSRGKMKKLLMEDIPEAFVERQLNDTRYISKVVKGLLSNIVREDGEMESTSKNVISCTGGVTNTLKQDWGLNEVWNRIITPRFERMNELTKSNNFGQWTNKDGKRVFQTDMPLELQKGFNKKRIDHRHHAMDALVIACATRSHINYLNNESAKPTAKTSRYDLKNKLCYKSKTDDKGNYKWQFYKPWDAFTQDAQVALENIVVSFKQNLRVINKTVNKYQAIENGKKVIKKQEKGDSWAIRKPLHKETVAGIVNLRFKKTVTLSAAIDQWEMLVDKGLKTKIKQLINEGLDKKKILKFFAEHENKWLGNEISKVELYYFSNDKEVLVASRVNLDSTFNTNKIKSITDTGIQKILLNHLANNNEQPELAFSPEGIEEMNKNIVTLNNGKFHQPIIKVRTYEPKGNKFNVGITGNKKDKYVEAAKGTNLFFAIYQDENGKRSYETIQLNIVIERLKQGLSEVPEINEKGDKLLFHLSPNDLVYVSSTEDSSINQAININQLSKEQTGRIYKMVSSSGTQAFFIKSDVSTSIVNKLEYSALNKMEKAIDGTMIKECCIKLKVNRLGNISL

SEQ ID NO: 3579 - protein, 1536 aa, unidentified
  REGION 1..1536: note = Description of Unknown: Cas Enzyme sequence
MAKNFSLDLGTASIGFTVRNTDNGNSIIEQFNNFGSIIFKTTVNKDGKGNYKSLATNRRENRSPRRLYQARKYRIWETLKVLIDPANKNKNEAEIDLDKVGIYCPLTMRELNRWRKYDKANGLKRQYPVDALNFEKWVRLDFDGDGVADYSSPYQLRAELATTQLDFSLEINRYKLGRALYHIAQRRGFKSSKGETLKEQEEAIKESTDTVVDLDNVSLKKSEEKKSKDLITYMTLCNLPTVGCALAKLEKEKIDLDGNPVLRIRASIYQAVRSQYKKEIKKIFDFQNGLDINSDFFNRIYSDRKDGSIFYKRPLRSQRGLVGTCTLETKTINKNGKDITAGKPRCPISHPEFEKFRAFAFINNIQYRKTTNEEWENLTPRQKLDLYREKFLQTKSSFKFEEIHKWIEKEVGYSLSKEQKASDSTINYSDKTNVSGCPVSGRLKNLLGEDWEIFICETSEKRKDKNGKEHTITYSSEDIWHICFSFDDEEAVVEYAKTKLRFDDKQTKSLVNLWVAIPQGYSMLSIKAIRNINQFLVPIIENQLYKGFIYTESALLGKIPEIMGIDLWKENEKEILESISGWIDINREEKRILNIANNLISIYKSEDDQRPVYQSSDKQHENDYKNIEYQLHDSDKREIEKYVIEAFGEKTWEKETQKNKDKIITEVACKYQHFFSTSKRDYFRLPKLGDAIKLYLSNNFSTLHCENQLIDSITKMPCPCTVCKKLNKLYHPSMVEFYKPAKEQKIAYNGVQLSKRLLESPVIGAFKNPMAMRTLHELRKLVNYFIKEGVIDEETRIIVETARDLNDANMRWAIDAYQREREDENKEFEAAIREFRNNDSDVNNDDIDKARLLVEQIDETQAKEVFELKKIMRDNFKKIKERNEAQKRLLQKYLLWLEQGMQCIYTGKIINLNNLFNENSTDFEHTIPRSLSFDNSLANLTVCDYYYNRHIKKNRFPTQLENYDRNAIIGGQEYSAIKPRLEKWEQKVEQLKSNVELWKLKSKQSIDKEAKNYAIRQGHLWKMELDYWQDKLDRFNMTEVTSGFKHSQLNDTRLITKYAYHYLKSVFTKVEVQKGSVTADFRKMLGVQSVDEKKSRDKHSHHTIDAAILSLIPVAAKRDKMLELFFKIQEEKKLNRDTYYLEQALQKEINACQIGNVSKLAQYIEDNILINHTYTDQTLTPASRRARKNGKVIWLRDENEIIKKDQDGNSIPKYWIKGDSIRGQLHKDTFYGKIRLVERDENGKPMRNDIGNWKFLTDKEEYIYVKRISISELTTLDQIVSPELKKKIEEQLNGRTINKAIEDGIFMYDKKGNIANRIRHIRIKTSVTNPILVKKQDYLSKYEHKQNFYAENAENTFYAYYWDGKSDVRGYDCRNLFNVALLLKTTNSKAIEDFFEPNKLIGRGKNKTLVPLYIVLKPGIKVIFYEKNKEELKGLLNFELSPRIYKMNRIFSSETGQVQFYHHLDARDEKQLLIDFPEKMIWHDGAPIGKRQKNGFARFSNKTTAPRLLLSPSNFHFIIEGKDFDIKTDGTIKFRF

SEQ ID NO: 3580 - protein, 1237 aa, unidentified
  REGION 1..1237: note = Description of Unknown: Cas Enzyme sequence
MGKILGLDLGSASIGWAMIEENDSKTTILGLGSRIIPYEGTEGKDFAKGTGESRNSLRTKARTARKGYDRYQLRRKYLVVALVKANMFPDETLKNLPKIELWALRDKAVHSQITLKELGRLLLWLNQKRGYKSSRSDANLGKKDTEYVATVKNRHEKIKELNLTIGQYFYKELSNDPFFKVKENIFPREAYIEEFDTICNTQKQFYPETLTEEFISKLRNEIIYYQRPLKSQKGLVSVCEFEGFWRTGKDGKEYFVGPKVTPKSSPIYQLSKMWENINNIKVGSRSGGDIEITAEQKQAIFQHLDNNEKLTVTDLLKILQLDRKNCYVNKQIEKGLVGNITKHAIRQCLGDSTQYNHLLRLNLNIIESDKKGYLVDKKSGEILNEKSSQYIDANIEYEPLYQLWHTIYSIHDKQECSNALQAKFKLETTIADKLADIDFSKHAFGNKSAKAIRRILPYLMEGDKYSEAMSYAGYEHSDSLTKDENLKRKLLETLKPIEKNSLRQPIVEKILNQMVNVVNAIIEKHGKPDEIRVELARELKQSKEERNDTDKAMSKRQRENENITKRLAEYGLKATRNNIIKWRLYEEIDNEEKKLNAVCIYCGQPISLTEAIKGNDVDIEHIIPKSKLFDDSQSNKTLAHRHCNKNKNDMTAYDFMKGKPTEVFEAYIERVNSLYANYVINKAKRDKLLMPEDKIPDNFIDRQLRESQYIARKAREILQTICHNVWATSGTITAELRHLWGWDEITMNLQFEKYKQLGLTEMVEWESEHGKNKHKKEVISGWTKRDDHRHHAIDALTIACTKQGYIQRFNTLSAEKTRQDMWAVVEERSVTFNEKRSLLEKYIISEQPIAVADVENAVANILISFKSGKKVAVVGTRKAGKRGNKKVVQTGIIIPRGSLSEESVYGKIRTIDERKPLKYIFENSQLILKPLIKQLVDERINTHKGDIKKAIASLKKEPIYLDKQKEIVLEYASCYKTEYVIKYSVDINFNKIDKVIDSKIKAVLQQRLDKFGGKAKEAFKDVQLSDKSIIKWYKDEGLDRPIKSVRCFTGLSAVVPVKKDEAGKDIGFVKPGNNHHIAIYTDKDGNRIEHICTFWHAVERKKYGIPIIIKDASEVWDKIQMQPEGTYPESFLEKLPDVQLKLELSMQQNEMFILGMSNEDIQVAVETNDYKAISDKLYRVQKLAGTNYMFRHHLETQLIDDNNAQSSKRYINTRSLGSLFGLNPFRLKINRLGDISL

SEQ ID NO: 3581 - protein, 1448 aa, unidentified
  REGION 1..1448: note = Description of Unknown: Cas Enzyme sequence
MAKKILGLDLGTTSIGWAYVIEGENITDSEIKQIGSRVIQYDNFDKVDKSGKVSESKNPQQDFASGKGLSPNAGRTKKRGARRTLDRYQLRRENLIEVLTKSGIINADTKLTEVGKYTTHETWKLRAKAAIEKIELEEFVRVLLAINKKRGYKSSRKAKNTEEGQAIDGMAIAKKLYEERLTPGQFVFHALKDGKKFVPDFYRSDLQTEFDKVWNFQKLHHPEILTDEFYKELQGKGQRATSAIFWTKHKFNTADIKELEDTLKNEKTIKLHNRDQKKLQAYKWRSDAISKQLAKEQMAYVITEINNNLNNSNGYLGAISDRSKELYFNKLTVGQYLYNQLQTNRHTSLKNKVFYRQDYMDEFETLWTTQAKFHPALTAELKEEIRDIVIFYQRKLKSQKGLVSFCEFESKEIEINEKKKMIGLRVAPKSSPLFQEFKIWQSLNNVILKQGSIRKKDEPNLALEAKEVLFEELNLKGNLKSERLITILGYKPKEYTLNYTLLEGNRTNQVLYNAYLKILEFEGYNEELLKLSDKDEINISELDTPATEIREMVKSIFEVLGINTKILTFDAELEGKDFEQQASYQLWHLLYSAEDDTKKHSEEDKLIYGNENIGLKKQLCTKFGFKPEHAKIIANVTFQDDYGNLSSKAMRKVYPFIKENKYSEACELAGYRHSKHSLTKEEIENRVLKPNLELLKKNSLRNPVVEKILNQMVNVVNTLIDKENDKLASEGKPRHFCFDEIRIELARELKKNAAERAEMTTNINAAKTAHEKIYKLLQTEFGVKNPTRNDIIRYKLYEELKNNGYKNLYTDTYIPKEILFSKQIDIEHIIPQSKIFDDSFSNKTVVFRKDNLEKGNQTAYDYIESKFGEEGLKKYQDRIENLFGLGKKNKEEGISKAKYQKLQKRESDIGDGFIERDLRDSQYIAKKAKDMLFDIARSVISTSGSITDRLREDWGLINVMKELNLPKYRALGLTEMEERKYGQKVEVIKDWTKRNDHRHHAMDALTIAFTKHNYIQYLNYLNARKNEHHKLHGNIIAIETKETEVKVDDNGDKKRVFKEPIENFRQAAKEHLESVIVSHKAKNKVLTKNKNKIKGKDKPQITLTPRGQLHKETVYGKYHFYQQKEEKIGSKFDKKTIEQVANPVYRKLLLQRLEENNNDPKKSFAGKNALSKKPIYLNEDKKEKLPEKVKLIWLEEDYSIRKDVTPDNFNDEKTIDKVLDEGIKRILKARLKEYGDAKKAFSDLEKNPIWLNKEKGISIKRVTISGVKNAEALHYKKDHFGNLVLDSTGNKIPADFVSTGNNHHVAIYRDGKGDLQENVVSFYEGVARVNQGLPVIDKAYNQHLGWQFLFTMKQNELFVFPNEKTGFNPNEIDLLDPKNKKLISPNLFRVQKIATKNYFFRHHLETTVDTNPKLEDVTYKSQLGINAINGIIKIRSNHLGDVISTGEY

SEQ ID NO: 3582 - protein, 1639 aa, unidentified
  REGION 1..1639: note = Description of Unknown: Cas Enzyme sequence
MKKILGLDIGTNSIGAALINLPDKFEDYGKEGNIEWIGSRIIPMDGDYLQKFESGTPADTKAAFRRQKRGARRLKHRYKLRRARLIKVFKALGWINQDFPLDNSRKFKQDINENGYSLKISDEIPFSDETIEGFEKDLGIEGKKSKKKSGRKGGKSIVPEDWIVYYLRKKAITEKIEISELVRILYLLNQRRGFKSSRKDLKDTNVLPYDEFVSRKEKNDFGENGIETQFVSITKIKSVIFKEEKKDKKGNITNVYTIKAEDPRMHTWEENRKKEPDWAKEINDKGEKIAKKEFTFLVIQKIDKNGKPTQLKPQMPEEKDWALCTTALDEKINDYRTPGEYFYEQIKGAYKAKRNFKVRQYPVYRWRYQKELEAIWEVQCKLNPELNKLNSDKNTRIKLAEILYPTQAKYKLAKLKEFENNDLLHILSKDIIYYQRELKSQKSSISECRYEKRKGIDGETYGLKCIPRSSPLFQEFRIWQDIHNIKILKREEKIDGKTKIDIDRSDIYINESVKEKLFDLFKSKVSISEKDTLETIKECNRQNDIVIAKKGDVHSHRINLFANRDALKGNETLARYRSVFKKVEFNGEAILEDKDKLMRLWHIDYSITSSDEEKSKKGIANALKKLLPENENKNKAIEAFEKLSELKKEYGSYSACAIKKLLPVMRCGKYWNEKEMTDQIKANANKIEERLESIEHNPRRIGEIADDDVKKQVLKSFIGKEHLTKGLNTYQAGYLIYNKHSEKVIKPVDSIEQFTSYIQKEIPNNSLRNPVVEQVARETMFLVRDIWKKYGNIDEIHIELGRDLKNNTDERKKISDTQKSNFDEKQRIKQLLYELINDGFDQHVDEDKTKPFDFKDGKFEWKTKIETTSFKVNPNPESPVDIDKFRIWRNLNPKSEFEWAKKVKDEKIPTEQEIKKYVLWLSQNCRSPYTGKIIPLSKLFDINQYEIEHIIPQAKMKNDSFNNLVIAEWGVNKAKDKQLAASFIADSKGKCKYGDVEYTLFMYDEYDKYCSETFKFQKQKRKNLLATESPEDFVERQLNDTRYIGRKLSELLAPITKKENGIVFTGGMITSELKKNWGLHSVWKEIIKPRFERLEKNNAGKTYIVHDKDKYGNPIFHFNVKENQGLDTKRIDHRHHALDALIVASTTREHIRYLNTLNAADTDDEHRRIRLAITNPISKKIRDFRQPWDSFTEQAKEQLEQIVVTFKINNKIISQPKNRTAYLKVENGKPKKDFKLQKPNEKWMSVRKSMFKEPLGVIWLKETKSVSVPEAFKVQIERMKVEQDKEKRKTASYIYDQTARPIIKDVIFRTGIALTETNTLNDEIKKYLQKNSKKVSNGTRKKTVYILNGLEFENIRIAEFIPYKTKRMKLTNKDYVEKLTIEKMKNDFPYFSEDEKRNNAFNNLFLQHIKEYNNDPKEAFNAEGLEKLNKKAIENKKIRKPIYTITRLDGTVDESDMFKGSFYEADKGAMAYFIMYENIQTKEREYLLPSPSIATHKAIERLADKSKSGIADEKDGYDLIILSPGDLVYVPTKEETGKIKYGEEIDKVIDWNERKIISERIYQVRKFSKKQCYFLKSRISDLIIPYNNDSGIGEYGSQNLSEKSDDDIKIVEVCIKLKVDRLGNIKPVFSNTQKATAIQ

SEQ ID NO: 3583 - protein, 1527 aa, unidentified
  REGION 1..1527: note = Description of Unknown: Cas Enzyme sequence
MKRILGLDIGTNSIGWALTEIDIDKESRKFKDGKIIYSGCRIIPTSQDVLGKFNAGMKVSQTAERTRYRSIRRLRERQLLRRERLFRVLNIMNFLPQHFRSQIDFKNNKGKFLNFSEPKIAYNLKNGKSEFYFKTAFEEMLKDFKKHHPALLKKSDGSTALVPFDWTIYYLRKKALSKKIEKEELSWLILNFNQKRGYYQLRSEDEEDEVNNKTENFFALKVIKVEEEKDRKSNAESWYSVYLENGFIYKRKSKTSLKDWVGKIKEFIVTTEIDSEGNELLNKDGEPKRTFKNVDSEKDWIAIKKSTEEKIEKSRKAVGEYIYDSLLHNPDQKIRGKLIRTIERKYYRSELEKILNKQKEFHPELKDKKLLSKCVKELYDKNETHRELLEQKDFTNFFVNDIIFYQRPLKSKKYLISNCKFETRFYKVNGDLVEKPVKCIPKSHPLFQEFRLWKFVKDLRIFEKEKIVNGELLFDADVTKEYLKNEDDFVKLFEWFNDKKEIDQNSFLKYPEWGLKKKSVNFRWNYVQDKCYPCNETRAQMLNYLRKIIENPSEFLTKDLEIELWHILYSISDKEELKKALLKFSQKQKLDEKFIDKFLKFPAFKRDYGSYSYKAINKMIKLMRMGKYWTKEFIDNNTLDRIEKLITGEYDESIKNRVRDKALELRCIEEFKGLPEWLASYIIYDRHSERKDSEIWKTPEEIQLLKQHSLRNPVVEQVVNETLMIVRDIWNHFGKGAKNFFDEIHIELGREMKNNSEQRKRLSQKIIENENTNLRIKALLIEIKNSGNSENVKPFSPMQQEILKLYEEGVLASYSDKLPEEFEKISKLASPTSQELKKYRLWLEQKYRSPYTGEIIPLSKLFTPAYEIEHIIPQSRYFDDSLSNKVICESEINEEKGNLTAYEFINSNPGKIIELSAGKSAKLFTLDQYKDFVSKFYKGISIKQKKLLMEDIPESFIERQLNDTRYISKSVKNLLSNIVREENEMEETSKNLISCSGMITSTLRQDWGLNDVWNEIISPRFQRLNELTNSKNFGDWEKKNGKNIFQINIPIEHQKGFSKKRIDHRHHSLDAIILACTTRDHINYLNNQSALRISKSEKNDDKLKRRYDLRNKLCHKKYSGSNKNNYKWEFNKPWDDFSKDVYNSISNIVVSFKQNLRVINKTTNNYLRLRKNENGKISREFVKQVKGDNWAIRKPLHKDTVFGSVMLKFKTKVKINAALNTPDLICDTILKNYIMDVLEKHNNDKKAVLKFLKKEKYRYNKKDISVIEVYSIDDSNVAARKKINTDFNSKKIESITDAGIQKIMLNHLKSFNEKKKGKIIEHPELAFSEDGIEEMNKKILTLNDNVPHKPIYNVRVYEPKGNKFAVGVRGNKPDKYVEAAKGTNLFFAIYVNEEGKRSYETIPLNIVIERQKKGRSPVPDKDVNGNNLLFYLSPGDLVYVPEIEEIEKLNSVSSNDLSNNLDKIYKMVSSTGSQCFFINHYVANPIVNKIEFLSLNKMEKTISGIMIKEKCFKIKINRVGMIKLYND

SEQ ID NO: 3584 - protein, 1434 aa, unidentified
  REGION 1..1434: note = Description of Unknown: Cas Enzyme sequence
MKKILGLDLGTNSIGWALVNEAEDENEKSAIIKLGVRVNPLTVDEQQNFEKGKSITTNADRTLKRSMRRNLQRYKLRRENLIDILKEKSMISNETILSENGNFTTFETYRLRAKAATEEITLEQFARVLLMINKKRGYKSSRKAKGTEEGVLIDGMEVAKKLFNENLTPGQYCLGLLKAGKKTLPDFYRSDLQEEFEKVFDKQQEFYPDFLSAELKEELRGKKRDAVWAICAKVFKVNGFELVGTKRQGNTTEQKTENYVWRVKGLSEKLELEEFVVVLQQINIQLKSSSGYLGAISDRSKELFFNKQTVGEYQMEVLDKNPNASLRNMVFYRQDYLDEFNAIWETQSKFHKELTDDLKSEIRDVVIFYQRRLKSQKALISFCEFESRRIEIEVDGKKKTKTVGSRVIPRSSPLFQEFKIWQRLNDIEVFGKANKTKKQKGASLFSETEDPLKYGGRRELYQEEKELLAAELSIKKELKKAEILKLLFNNTKELDLNFPFIQGNLTQATLFEAYRHIIELSGHEIDFENRTTSEILKSIEEIFQGLNYNTGVLHFNSDNELDKEPMYQLWHLLYSFEGDNSKTGDENLINKITERYGFEKEYSAILSSITFQNDYGSLSAKAIRKILPYLKAGHKYDVACEYAGYRHSASSLTSKELENKVYKDWLEILPKNTLRNPVVEKILNQMINVINAIINSYGKPDEIRIELARELKKSAKEREELTRSIAETTKLHEQYKDILSKSPFNLSYISRNDIIRYKLYEELKDNGYKTLYSNTYISPLAVFSGDYDVEHIIPQSRLFDDSFSNKTLELRSINIEKGNMTAVDFIKLKYGETCGDKSLDNFLSRMEDLHKKGVISRAKYNKLKMQEKDIPDGFIDRVIRDTQYIAKYAKTMLGDLVKFVVSTSGSITDRLREDWQLIDVMKELNWEKYKNLGLTEEFTNEEGHRIRKIKDWTKRNDHRHHAMDALTVAFTKRSFIQYLNNLNARSDRSSSIYGIEQKELYRNSKGKLLFKPPFDLDEFRSEAKKHLENTLISIKAKNKVVTQNINVTKKSGGVNRKVQLTPRGQLHNETIYGSQKLYSVKEETINAKFDAAKIATVSKSAYRQALLERLKQYNNDPKKAFSGANALSKKPIWLDELQTQSVPEKVKTVCFETVYTIRKDVSADLKIDKVIDAKVRRILEERLKKYNGNAKQAFSNLEENPIWLNEEKGICIKRVTISGVSNAESLRDKCDKEGNLILEEKGLKRPVDFVNTASNHHVAVYRVPVLDNDGQVVNDDDNNPKYELQENVVSFYEAVARRNAGLPVIDKEYNGNEGWQFLFSMKQNEYFVFPKSEKREKVNEETGEILEEEVVVFNPKDIDLLNPDNYHLISPNLFRVQKFTVKDYFFRHHLETVVDNNNTLKGITWKRYGLNGINDIVKVRINHIGQIISVGEYL

SEQ ID NO: 3585 - protein, 1503 aa, unidentified
  REGION 1..1503: note = Description of Unknown: Cas Enzyme sequence
MKKILGLDLGTNSIGWALVGENDDNQKEILGIGSRIIPMSQDVLGKFDSGISKSQTAERTGFRGIRRLRERYLLRRERIHRVLHIMGFLPEHYERNIDFDKKLGQFITDTEPKLVWKEKENGSFDFLFKSSFNEMVGEFKVTQPQLFDNGMLIPYDWTIYFLRKKALSEKIEKEELSWLLLNFNQKRGYYQIRGEEEEENPNKLVEFHSLKVVEVNADELQKGKTDIWYNVLLENGWIYRRSSKIPLFDWANKIKEFIVTTDLNDDGTVKTDKEGKEKRSFRAPSDDDWTLLKKKTESDIEKSHKTVGCYIFDTLLQNPSQKINGKLVRTIERKFYKLELKAILEKQKEFHTELNNAELYNACLEELYGNNEAHRNSNINRDFTYLFLNDIIFYQRPLKSKKSLISNCKYEYRSFKDAKSGDYKRDPIKCISKSHPLYQELRLWKFVQDLRIIEREKVIGGKLKTDIDVTSEFLKTEDDYVDLFDWLNKTKEIKQNTLLTSFFKIKKKKGEEILSYRWNYVEDKEYPGNETRAQFLNRLSKVNNVSITFLDKNKEIALWHILYSVEDKLEIEKALKSFAKKFELGEDFVDIFKKFPPFKKEYGAYSEKAIKKLLPLMRKGKYWDINNIDEKTRNRIDRIITGEYDENMQNRVREKAIDLTDVSHFKGLPEWLASYIVYDRHSEGEGTTKWESPEVLENYLQTFKQHSLRNPIVEQVITETLRVVKDIWIKYGDFSEIHVELGREMKNPADKRAQMTTQISENENTNLRIKYLLAELVNHDDVENVRPYSPGQQEILKIYEDGVLNSGIEIPEDIAKIVKTSQPSKSDLIRYKLWIEQKYRSPYTGEMIPLGKLFTSEYEIEHVIPQSRYFDDSLSNKVICESEVNKEKDNALGYEFIKNNEGRIVELSFGKKVKVFTISQYEDFLKQHYSGSKSRGKMKKLLMEDIPEAFIERQLNDTRYISNVVKALLSNIVRVDGEQEVTSKNVISCTGGITTILKQDWGLNDVWNKIVTPRFERMNELTKSTDFGHWTNKEGKRIFQTEMPLENQKGFNKKRIDHRHHAMDALVIACATRSHINYLNNQSAKPSAKTSRRDLKNKLCFKSKTDDNGNYKWRFIKPWETFTQDAQTSFENIVVSFKQNLRLINKTVNKYQCYEDGEKTIKKQEKGDSWAIRKPLHKDTVAGIVNLRLRKSINLSVAIDQWEMLVDKSLKTKIKQLINEGLDKKKIQKFFFEQENIWMGKDISRVELYFFSNEKEVMVASRVNLDTSFNSKKIESITDTGIQQILLKKLSEYNEIKDGKTIEHPEFAFTSESIDEMNKSIKSFNNGKFHQPIIKVRTYEPKGNKFNVGTSGNKSDKYVETAKGTNLFFAIYADEEGNRSYETIQLNIVIERLKQGLCEVPEINDKGQNLELFLSPNDLVYVPSEEELFSEIKINFLINANKTYKMVSSSGTQCFFVPNNISIPILQTVELGANNKSERTWNGQMIKQVCVKLKVDRLGKVFL

SEQ ID NO: 3586 - protein, 1512 aa, unidentified
  REGION 1..1512: note = Description of Unknown: Cas Enzyme sequence
MEIKEKKILGLDLGTNSIGGTLISIPADIQDYGKQGNIEWMGSRIIPMTEDVIKEFTNGAKGKTKASVRRGFRMSRRVKFRYKLRRTRLLKTLKLLGWISPGFPEDFKSEIYKNENYKFNINEFLPFEENTIEEALQRLKVKKDNGKLPISQDWIVYYLREKALREKISLHELVRIIYMMNQRRGFKSGRKDIKSEENEESIQKEVKILKINYISEIEEEGKRIKKQKYSVNATDINGIIVEFEIQKNYKPDWEEKELSFLVTTVGTKISYTLATENEWEYEKAAFEEKLNKSGLNPGEYFFGELIKDKNYKIRQRIIDRKYYKNELVAIWEKQSEYHPELKSKECLQKIAEMLYENNKAKQQELKSRDLLNIICNDIIYYQRELKSQKKLISECKFEKIKFFDKDKEIIKGFKVAPKSSPEFQEYRIWQDINNIRIIQKEKTINGKRKINVDVTNLYLNNNIKEKIYELFDSNKEISEKKIFKCINENLNNDDFEGEDKFTSDKSSEISNEYETEVLEAKTSIIESLISLSDSTHKINLFENRTALIGNETKYYFRKIFKGNDFNGDDLLSDSGLFYKLWHILYSINSTDIDKSKKGIKNGLKKLNYNLPDNVIESLSVAPDMSKQYAAFSSKAIKKLLTFNRCGKFWNWENIDIGLKGKIEKIISGVWADSINDNVRDIIIEYFKKAGKNFDEIKESDFQGLPSYIACYLVYGIHSEINTSEKFSNYREMDISKMLPPNCLRNPIVEQIIRETLHVVKDVWKTYGRPDEIHIEMGRDLKKNAIERKRLSEITANNFKEKERIKKFLIELVTGKYEFEKIPNPNSPIDIEKFKIYESSSGMSFSIYEKEQIKNNSKWKPTSEEIKKYALWLSQKCISPYTGVPITLSKLFTSEYEADHIIPRSKLKYDSPENLVICESGVNKIKGNKLAANFILESPQTISYGGTNYMLLSYDDYVENCKRIFKGKKLQNLLRDDVPKDFISRQLNDTRYITRKISELLLPVAGYDNGLIFTNGSITSELKQNWGLSTLWKDLMKPRFERLQKITNEQYIYQDDEDKNKYHINAPNGELDIKRIDHRHHALDALIIATTTREHIRYLNTLEAADSEKEIKIIKHSLVKSKIREFKLPWESFTKDAKDKLSEMIVTFKKSSDVITKPQNRYIKWVNENGKWHKIFYNQKQNDKWLAIRRSMFKQPHGVRYLKSVKSYDLIKSVEIQISRNISIKDENGMPRSYIYNKQQREEIKQIIDKVGNEINDIKKYLKKNPLKINGKNVTSIDVAEFKEYGSKKVVIDSSFTLDKINKIPYAQKNPIAKLLKDHLMEFGNNPKDAFENKGKDVLNKKFTNYINKITIVEEMSKDSKFKGQYLETDKGSNVYFVMYEDEAGERKIKKSISTLKVIQNLLNNIYISEDFDGLNKIILEPNDLVYVPRKDENTNNIDYNNKKQFRERIYRVKSFTGNRCFYVPNDIAISIDKNYIELGPNNKSEFTWDDIKINDFCVKINVDRLGNLILPE

SEQ ID NO: 3587 - protein, 1607 aa, unidentified
  REGION 1..1607: note = Description of Unknown: Cas Enzyme sequence
MKKILGLDLGTNSIGWALIESDFEQKTGKILGMGSRIIPMSQDVLGKFDSGVSISQTAERTGFRGTRRLRERHLLRRERLHRVLHILNFLPEHYANQIDFDKHLGQFKPEKEPKLAYKAENGSGKNEFMFKASFEEMIRDFAMYQPQMLINKNGEPALVPYDWTIYYLRKKALSQKIEKEELAWLLLHFNQKRGYYQLRGEDEDEPTDKKVEFYALRVTDVVDSRDKKGKDEIWYNVHLENGWIYRRTSKTPLDWVGKTKEFIVTTDLNEDGSIKTDKDGKEKRSFRAPAENDWSLVKKKTEHDIEQSRKTVGTYIYDSLLAKPNQKIKGKLVRVVERKYYREELKSILQKQKEFHPELQNTNLYNECLEKLYPYNDAHRGSIQNKDFTHLFLDDIIFYQRPLKSKKSLISNCKFESRIYKDKNGQLQAEPIKGIAKSHPLYQEFRLWQFVQNLKIFKREKPDDIDITSQYLRTEDQLTNLFDWLNERKEVDQKILLKYVLNLKNIDDYRWNYVEEKNYPCNETKALISKRLVGLTGVNTGFLTKETETALWHILYSVDDKHDIIKALRTFAGKNGLQEDFVEAFKKYPRIEKEYGAYSEKALKKLLPLIRSGSHWQEQDIIQQIPDYQKNIRMLLGNLAEKEARKTDNEYRNLKPASPSLSEKLGAFEHGNTDAYKGVEHFMASYLVYGKHSEDSEALQWKTPEDLENFLREFRQHSLRNPIVEQVIVETLRVVKDVWTYYGNGQENFFEEIHLELGREMKNPADKRKQMTNQINENENTNLRIKALLAELLNEGDIENVRPYSPMQQEILKIYEEGVLSQEDGNIPDEILKISKQALPSASELKRYKLWLEQGYHSPYTGKMIPLSRLFTRDYDIEHIIPRSRYFDDSMSNKVICESEINSDKGNETAFAYIKRKGGSMVQLSHGKHVPLLSLDQYEDMIKRNFSKSRSKMKKLLMEEPPEGFIERQMNDSRYISKVVKNLLSNIVREDNEREASSKKVVPVTGAITSQMKHDWGMEHIWNEIITPRFERLNELTSSKNFGDFNPNTGKFLPQVPLDYQKGFSKKRIDHRHHALDALVIACITKDHVNYLNSINSERKNHSLVSKLREVEEVDVKGKMQKVAKAYLKPWNTFTQDSREALTKVVVSFKQNLRILNKTSNSYQKWVKDAEGNVSKELVKQTKGDNRAVRKPMHKDTVSGIVQLKFKKAVNLSAALDVWEMITDKSLKSKIKELTSQGADKKSLQKHFKDLGNKWDGKDISKVDVFYFDSDHVASRVKIDESFNSKKIESITDTGIQKILWHHLVRFNEDKNGKIVEHPELAFSPDGVEDMNRKIQELNGGKPHQPILKVRTYEPKGNKFNVGVTGNKKDKYVEAAKGTNLFFAIYLDQTGKRKYETIPFNIVLERQKQGLDSVPEINEFGDKLLFSLTPNDLVYIPVSSNSTDIHDTRKSDQGKTQRIYKMVSSSGTQCFFIRHDIATSIVNKVEFSPLNKMERAIDGVMIKEFCQKLKVDRLGNVFNANVGDKSGNLPDTTNQVNEPSPTYQKSHIKIFHSFMDAENEEIDATLRQTPMERIRETVELILRAYNVTRDELKKHPSPKSIKIISSL

SEQ ID NO: 3588 - protein, 1439 aa, unidentified
  REGION 1..1439: note = Description of Unknown: Cas Enzyme sequence
MKTLGLDLGTNSIGWAIRNSDAEDNQIEKYGVAIFEKGVGSEKGVEFSYAAKRTQKRSVRRLYQARKYRLWETLEVLISYGYCPITIDQLNGWRKYDKLNKRKYPHIEAFEQWIRLDFDNDGKPDFSSPYQLRALLVGEKLDLNKQSDRYKIGRALYHIAQRRGFKSSRKDAIVDELGERKDAKSEIKKDNEFSNSFNKKFEKTLADFPTIGAALAYIENQGERVRLEWIQHTFRKHYRDEIIKIFEFQAINIDSDLFKKLVENSKNKYNGAIFYQRPLRSQKGLVGNCTLEKNRARCPISHPAFETFRALSFLNNIEFKQIGDPGAKWLQIPLDLRQEIYNDKFIGRQKPDFLFLEITEYIKKKGFNWELNYKDKTHVSACPISARLNDIFGETWEKIQIPKVKRKDAKTNKEFYDIEDIWHVLFSFDDDESVKEFAIEKLKLSDEKSKKFVGAWKALPDGYSMLSLNAIKKINRFLLKGYIYTDAVLLGNIPELLGSNIFNENEDLIVNSLKGVLLDNRKDKYKINIANTLISKYKSLPYEERFGHKDQNYKLAETDEKEILKTTIEAFGDKTWEKLNDNEKQETIYDVSKLYQKFFKSEKREYILLPRVADSLERFLNDNFPKLSENKTAKLYHPSMVDIYPSLERSNDGKYYLGSPKTGVFKNPMAMRTLYILRNQINYLIKTGQINEETRIVVELARELNDANKRWAIETYQRQRQAENNEFAEAIRGLLQVENDLTINANADSNDDIDKVRLWYEQVKSAQNNKGKGEYAQNKWNNQESVLFANLAQTKSAIEKYRLWKEQKCSCMYTGRLISITDLFDENKIDFEHTIPRSISMDNSLENLTVCFAKYNRSIKKNQIPTQLPNFDNDAPINGEIYSAIKPRLKEWEDKIEHLKVNIEYWKGKSKSASTKDYKDEAIRQKHLWFMELDYWRNKLSRFTMTEVTTGFKNSQLTDTQIISKYAYHYLKSVFEKVEVQKGTHTAEFRKIYNLQPKDEKKDRSKHSHHAIDAAVLTLIPYSKNREEILRKSFIQSERFKLGFEKEKQYHEKPYKGFNISHISQIEENILINNISRNQALVPAKKKIRKRGQIVYIKDKQGNEIHDSFGKPIPMFAQGDCIRGQLHQETFFGAIKLPITDENGKPKTENGKFIYDDKITYVVREPFLFKKDANSPGFKSLEEIETKIVDKHLFALIKTQIGEREFRTAMNEGVYLFDKNGKKSGRIRHIRVFVRATEPLRIKEQTYISDKPSVHLPDKEHKKYYYAGNGENYAYALYQGIIKNKIERDFRIINLFDAANILKISESRRFTVEQEIEYNKKGDSIILHALLTIGQKVMFFKEYPDELKDLSISERSKRIYKIQGFEKDGRIRFLHHIDSRDDKQLKELELTYGKGIWQGFSSLNYEIPWPKLKLSVGNLNFLIENKDFEINPDGQIIFF

SEQ ID NO: 3589 - protein, 1532 aa, unidentified
  REGION 1..1532: note = Description of Unknown: Cas Enzyme sequence
MKKILGLDLGTNSIGWSLIKQDYENNAGEIIGLGSRIIPMSQEIINDFNKGASISQTASRTGYRGVRRLLERNLLRRERLHRTLNILGYLPEHFANQIDFEKKLGQFIDNSEPKIAYKEIKTSDNKIQHEFIFKKAFEEMLEDFKTHQPNLLLNDKKVPYDWTIYYLRKKALTAKIEKEELAWLLLHFNQKRGYYQLRGEEEEDTPNKLVEFHALKVVEVTADEQQKGKTDIWYNVILENGWIYRRSSKAPLFDWKGKIQEFIVTTELNDDKSIKLNKDGNEKRSFKAVDSELDWVAIKKSTEEKIDKSKKTVGCYIYETLLQNPNQKIIGKLVRTIERKFYKEELKQILEKQVLEHPELQNRKLYNACIEELYENNTAHRENIKEKNFVHLFVNDILFYQRPLKSKKSLISDCPFEQRTYLKDGKKEIQSIKCISKSNPLFQEFRLWQFIQNIKIYQKEKTIDGKIHSDVNVTTEFLKSENDYTNLFDWLNERKEIDQKAFLRYPGFNLKKNAENYRWNYVEDKSYPCNETHNAILNRLSKVQKVPSDFLTREKEQDLWHILYSVEDKIEIEQALKSFAIKNNLSEDFSEVFKKIKPFDTDYGAYSEKAVKKLLPLMRMGKYWDESAIHPQTKNRIEKIINGEVDDKIRDRVRDKAIYLNTINDFKALPLWLTSYIVYDRHSEDSNAMQWKKPEDIENFLKEFKQHSLRNPIVEQVITETLRVVKDIWKTYGNGSANFFDEIHIELGREMKNPANIREDMTKKMSANENTNLRIKALLSEFLNDASYENIRPYSPSQQEILKIYEEGVLNSEVEINEDILKISKTAQPSTSELNKYKLWLEQKYRSPYTGEIIPLNKLFTSAYEIEHVIPQSRYFDDSLSNKVICEAEVNKDKDKSTAYEYIRDNHGKKIELSFGKVVTIFEEKEYEDFVKRNYAKNRSKLNKLMMEEIPESFIQRQLNDSRYISKVVKNLLSSIVREDDEQESTSKHIVSSNGNITNVLKQDWGLNDVWNDIVSPRFERLNELTKSTNFGEWTNKNGKRVFQTQVPLELQKGFNKKRIDHRHHALDALVIACASKNHINYLNNQYAKSDTNRYDLQKKLRRHEQVEITDKKTGEKKKINVAKEFFKPWDNFTIQAKDSLENTVISFKQNLRVINKTVNYYQKWVADGNGDLKKQIVKQEGNNWAIRKPMHKETVSGSVSLRKIKNGVSLLNAIDNYEMIVNKSLRKKIKQLIEEKNDKKKIQTFFKNLENKWNDKDVTKVDLYYFDNDNVASRTKIDESFTSKFISESVTDTGIQKILLKHLEKYSETNGSKIIEHPELAFSPDGIDDLNKNIISLNNGKFHHSIQKVRTYEAKGNKFKVGHTGNKKDKYVEAAKGTNLFFAIYKDEKGKRNYETIPLNIVIENQKQGALQNIKPEFCSVPTKNEKGDSLLFHLSPNDLVYVPTNEEFENPNLVDLKKISKEQINRIYKTVSFTNTQAFFVKNEVANTIVNKVEYSALNKMERGINGEMIKDVCWKIKTDRLGNILNVLK

SEQ ID NO: 3590 - protein, 1441 aa, unidentified
  REGION 1..1441: note = Description of Unknown: Cas Enzyme sequence
MEKILGIDLGTNSIGWAIRDLNVSDNQIIDKGVLTFDKGVAEDKSGEHPMVQKRTNARGIRRNYQAEKYRKWELLKTLIENNMCPLTMDELNDWRHYTKGVGRKYPQSKKFIQWLRFDFDGDGKTDFERLGFSKHESYYLFRCLIIDETKKEIFKKEPHIIGRILYLLVQRRGYNDGSEIDEKEQDELSKTIKKGGGEAGASGSDEIEPYIEKYKTLGAALYHIQKEQKVRIRKRYNLRSKYEAELKEICRVQNIEHLYKLFWKAIIWQRPLRGQKGLVGICTFEQNKRRCPISHPLYEEYRTWVFINNLKIKCIDEENTDNIKLNEVLTTIVYPEFYKAATDFKLSVIKKKLDKIGYAITAKFPDDTKVNSVQFLYRISEIYGEDWKDQLGWQNLINNKPKDPNCKYNIEDLWHLHFTKTTNSKTGESGFDFLNRFAIEKLSLDEENAKTFSKIKLQQGYATLSANAIKKIVPYLQKGFIYSESIYLANLPQVLGATEISENDVLHFSEEVRRILRADKIQKKYIQTINDLISDQLNAEANTRFGMDPSYQLDTSDLADIENKLISVFGNATWTKLSSEEKQVATNFVSDKYLSFLRKRIYAKDVFEKTERIHDKIFHWISETYSVPEENKKHLWHPSEQETYKKAGLYHEVVLHNKTIFIPINEVNKFIEKNPSCIKGNFITELLGSPEPISKGFKNPMALKTLHKLKKLINYLIETKKIDENTRVVIEIARELNDANKRKAIERWQRDRETENVEFAKAIIGTAKLKYPNLDEKNPEVIHKFRLWFEQTENSAETWKQITGLKDDVKKLRLWQEQKGVCLYTGKSINISELFNGSKYDFEHTIPASMSFDNELKNLTIADKTYNQQIKNKKLPSECPNFDKDILSFSAILPRIEFMRKKVEELETRYERAIYFSKKSITKEDKDKNIQEKNYIKINLDYWRYKLKSFTTTEYKAGWRNSQLRDTQTVTKYALPYLKTVFKKVEVQKGNITSDFRKIFKIQPRLEKKERTKHSHHAIDAAVLTLIPPAAIRDKILEKYNEANECNTGYHETPRQWANFKTAHVLNIENEILINYLPEHRTLTPTVKNVRKRGKIQFVKEKSSDGKWQYKLDDDGKKISLVAKGDSIRGQLHKDSFFGAILKPIYDENDKAINTNGKFSHEEKPSYVKRVHLEINTLQGFKLYKDDKDNAKFLSQFEDIIDPYVKKLVKNSIIDRINIGTLPKDVLLDPIMMLDKNGNNVHAIRRVRVFQGTMNPPEIKKIEEPFLSKHPHKQYIYAENTDYVSMACYIGYNETKSIIYHFKPFTTLGLSKTKKIPLAEYQNGVHFNLLWELKPGLKIIVKKSLNEDVKELENNKIIKRIYKVNTVYPAYQGKYEYFYADIDFNLNTFSAEIKVPKRGKELDFENPKESPQVRLNLSKSTFLIEKRDFIIELDGKIKWLF

SEQ ID NO: 3591 - protein, 936 aa, unidentified
  REGION 1..936: note = Description of Unknown: Cas Enzyme sequence
LSLIRFGKHWNENIIDKKTLDRIDKLLTGEYDEKIRDRVREKAIELKSINDFKGLPLWLASYVIYDRHSESGNIQKWKTPDDIEKFLKEEFKQHSLRHPIVEQVIAETLRVVKDIWKSYGSSSENFFDEIHIELGREMKNPADKRKQMTNQIGENENKNLRIKALLTELLNPEHKVENVRPYSPSQQEILKIYEDGVLNSNITIDDDILKISKSAQPTKSELTRYKLWLDQKYRSPYTGDVIPLSKLFTPAYEIEHIIPQSRFFDDSFSNKVICEAEVNKDKDNSTAYAYIKDNSGKKIELSRGKEVTLFKIEDYELFVKDNFSKTRGKMKKLLMEEIPESFIERQLNDSRYISKVVKNLLSQIVRENNEQETTSKNVISSNGSITSTLKQDWGLNNVWNEIITPRFERLNELTQSKNFGEWTNKEGKKVFQTQVPLELQKGFNKKRIDHRHHALDALIIACATRNHINLLNNEYAKATKKDLRYDLQKTLRRTEKVTITDKKTGQPKDINVSKEFHRPWDTFTQDARENLLTTIISFKQNIRVINKTVNYYQKIENGEKVTKKQEKGESWAIRKPMHKDTVSGSVTLRFKKIVQLSVAIDNYKMIVEKTLKTKITQLIAENYDKKKIQKFFKDIENKWKEKDISKVEIYYFDNENVASRSKLDESFTSKRIKTSITDTGIQTILLKHLETYNKTNAKGETIEQPELAFSPDGIDVLNKNIITLNKGKFHHPISKVRTYELKGNKFNIGVTGNKKDKFVEAAKGTNLFFAIYQDVNGKRKYETIPLNIVIENQKQGALQKIKPELCSVPQKNENGDNLLFFLCPNDLVYVPTNEEIESPQIVNLKKLSQEKISRVYKFIDGSDGIANFIPHQSATLLFNLNKKEQEKLKVDFKIQNEYGVGSPQSKSQKSIEGIMVKEFCWKLQVDRLGEIKKTIK

SEQ ID NO: 3592 - protein, 553 aa, unidentified
  REGION 1..553: note = Description of Unknown: Cas Enzyme sequence
MKKILGLDLGTNSIGWALIEQNFEEKQGKILGLGSRIIPMSQDILGKFDSGQSLSQTAERTGCRGVRRLRERHLLRRERLHRVLNIIGFLPKHYLKHIDFEKNFGQFINESEPKIVYKKNETTNEFEFIFKTSFNEMLADFAKEQPQLLENNKKVPYDWTIYYLRKKALTAKIEKEELAWLLLLNFNQKRGYYQLRGEEEEEIENKLVEFHSLVVVKVEDSGDKKNKDEIWYNVHLANGWLYRRTSKEPLDWVGKTKEFIVTTDLNEDGTVKTDKEGKEKRSFRAPAEDDWTLVKKKTEFDIEKSDKTVGSYIYDTLLQNPNQKIKGKLVRTIERKFYKDEFKQILEKQIQEHKELQDKNLYTACIEELYENNDNHRNNISNKDFAHLFLNDIIFYQRPLKSKKSEISDCSFESRKYVLNGEQKVAPIKCIAKSHPLFQEFRLLQFVQNLKIYAREKEINGKLETDVNVTNDFFKTEADWESLLEWLNERKAIEQEPLLKHLLSGLKLKPKALSEETQKYRWNYVEDKIYPCNETHSQISSRLEKVKIYQLIF

SEQ ID NO: 3593 - protein, 1312 aa, unidentified
  REGION 1..1312: note = Description of Unknown: Cas Enzyme sequence
MKYTIGLDIGTNSIGWVLMSDNNIVDKGVVIFPIGTNLIKGVQEETKNHQRGGYRRTKRNLFRYKLRRKDLKQFLKGINMIPDFKKTFEIENDYQASELYKIRAQAINQQIPIEEIGRIFLLINKHRGFKSNSKTLVEKNEKENEEDGKVKEGISQLTHFMINNGAKTIGDYFHKMYLKAEELYKQGQWHNIDEPYDERAENKDGIFILQNNRGIRRENGRYVSRAMYEQEFDLIWEQQKKHYPQLTGSRKEYDEILKLPISEKREELKKFKETLYWKIRFTTIFYQRQLKSQKKFIGKCQFETNKRTAPISSLLFQEFRILKQLADVRYSDKKNEINNQPLPNEWQEKIISYLNTHSKLNLREGKKNKDGIKNMDVMDILEITNKKDYEFNFDTAEDDKTFEGNKTLYAIYKACGEKTFNELQNNSYKYLELKNKNANQLEALWHILYMAKDDDWLKDTLLFTWGFDETTSNNLIEMGLEDGFANYSSKVLQKIIPFMKKGKDEYEALVMTDYLKGIDEEKEVIKLSKKIKQLKNNELRNPVVEKAVSQTIKLVNAIIENKEYNINQEELTIHIESTREFKKPKTEREKIRRGNTDIDKKRNDYANFLNEKRNEGKLKFAREIYKNDSIIHKFELWLEMGMDKEDANFNNFQLEKKASDKHKLWLECNRICPYTGKIINLSSLFSPVTEIEHIIPYSRSLDDSFLNKTITFNYINKEKGNLTSYEYIKKQGDQAFSDFKKRIKSNTNFSKDKIEKIFLKEKVEQGFNNTQITNTSYIAKYVKIKLNEVCKDVQFTNGSATGELRKNDWRLGNLLDKIRYEEHSNIDIDLYFGEFNRYRKDFENWRKKKNNSTDLPTIKWKELTKEITAEYEKETKNPLYEWWFTIQKFEEFRSEKGKKDRSDHRHHLLDAIITACTSRSVIQKLSTLNANREINGYSMYDEYGNITREKIGCPIGYEKIKEALKNNLIYHKPEQRLITSKINRIKKHKKDKNESSVLKQKTYSVRGSLVGDNFYGKLKNPKHQGIDKENAFVKRVNLTGENFKDIKSLDKIVDKNVKEILKRRLENTTYSGKGEKAFSEEALANDPVYLYSLNKYPESLKETPVSKKEKPLPIIKKVRIVNKNSRNLIPIPALSEEKNELGKRVIVNENRYAETDGNYVMALYEGKDEKGKIKRDFEILSFYKAVERKRSGEQLFPDEKLQKDGSSIGLMKKCPYLKQGDMALMYENTEDEINWSDTEDLKKRLYKVSELGLDYRSEKEQYGTLKFIKHNTQKMPKDSYTKEGDFIKRLHTGVNMIKVKLNNLGKIIKIDE

SEQ ID NO: 3594 - protein, 1391 aa, unidentified
  REGION 1..1391: note = Description of Unknown: Cas Enzyme sequence
MKKILGLDLGTTSIGWAIVNEANNDKEKSEIIKLGVRVNPLTVDEQQNFEKGKSITTNADRTLKRSMRRNLQRFKLRKENLIELLKEQNFISDETILSENGNKSTFETYRLRAKAASEQITLEQFARVLLMINKKRGYKSSRKAKSQDEGQLIDGMEIAKKLYNENLTPGQFVLDLLKQNKKFIPDFYRSDLQAEFDKIFDKQVSFHPHFLSSELKEELRGKKRDAVWAICAKAFKDKGFDLVGTKRQGNAASQKIENYEWRVKGLTDKLDLEQLVVVLQQINIQLNGSSGYLGAISDRSKELYFNKQTVGQYLMQQLEKDPHTRLKNQVFYRQDYLDEFNTIWETQAKFHNQLTDELKSELRDVIIFFQRRLKSQKGLVSICEFENRKIEIIVDGKKKTKTIGNKVCPKSSPVFQEFKIWQILNNLQIIEKATNAKRFLEQEEKEILFKELNLKDKISKNDALKLLFENHKDLDLNYKDIEGNRTNASLFKVFQNIIELSGHGEYDFTKLTADKIIEIVTGVFDGLGFNTSLLKFDSNLEGDAFEKQPAYQLWHFLYSFEGDDTPTGIGKLIEKLETHYGFPKEYASLIANVSFQPDYGSLSTKAIRKILPHLKDGFAYGGRKEKENEPSACEMAGYKHSKDSLTKDEKEKKVLKDKLEILPKNSLRNPVVEKILNQMINVVNTAIDAYGKPDEIRIELARELKKSAKEREELTAAIAKSTAEHEKYKTILQKEFGLANVSRNDIIRYKLYLELEHVGFKTLYSNTYIPKEKLFSKEFDIEHIIPQSRLFDDSFSNKTIESRSFNIEKGNETALDYVKVKFGEKGLEEYLTRIEDMFKAGKMSKTKYNKLKMSGKDIPDNFIARDLRDTQYIAKKAKSILEELVKDVVTTTGVITDRLREDWQLIDVMQELNWDKYHKLGLTEIIENRDGHKIKRIKDWTKRNDHRHHAMDALTVAFTKRSHIQYLNNLNAKSDKSGSIYGIEAKELYRDDRNKLKFKPPIPLADFRAEAKRHLENTLISIKAKNKVVTANINTTKKKGELNKKKQLTPRGQLHLETVYGSIKQYVSTEIKVGANFNEELIATVANKKYREALLKRLMEFDNDPKKAFTGKNSLDKNPLYIDELQTYKLPLKVKTVALETIYTIRKDISPDLKLEKVVDPKIKTILENRLKAFNGDAKKAFTNIDENPIWLNQEKGIKIKRVTITGINNAQALHAKKDKEGQLILDANGNTIPVNFVNTGNNHHVAIYKDENGNLQENVISFFEATTRVNLGLPIIDKSYKEKDGWQFLFSMKQNEYFVFPNETTGFKPHEIDLLNPDNYHLISPNLFRVQKFGSLLSGFWFRHHLETKIETEKELKGLTFKVIQSTKNLENIIKVRINHIGQIVSVGEY

SEQ ID NO: 3595 - protein, 1192 aa, unidentified
  REGION 1..1192: note = Description of Unknown: Cas Enzyme sequence
MKKFLGLDIGVSSVGLSVVYENNKQKEIKELAVRIVPEDPNFHGKFYSGNTASKNLDRTTNRGIRRGYQRFKQRRDNLYKVLKDHNMFPNDILFKLPTYELYQLRANAVTRQISLEELGRVLILLNQRRGFLSNRKSNSEEENSTDYKKRIAELQHELNGKTIGQQLFSEIENKKNSFEIILRERTYLRASYVEEFDRIWECQKKHHHQVLTGGVNEDDNKSTLYNTIRNKIIFYQRPLKSQKGLVSNCPFEKHHKAVTKSSPYFEIFKIWQRLNDLEVTYENGTKTKPTLEQKQELFKLLFFGEKLNNKYKLTVTEIKKVLGLKRNEGYLNFTELDGSRTYSILKNALLKANITTPEVYLFFNLDKNDEKGGLMELWHITYSIPNENDVIKTLEQRFHFKKEQAEIISKEVGYTSDYGNLSTRAIRKLLPHLQKGLNYSEACDAVKYDHSGYKTKIQLEEKLKPIKQNSLRNPVVEQVLNQVVNIVNLAIDKHGKFDEIRVELARELRNSAKTRKNITNLNSKNKKENDKVREMLQKEYGYKIVNGRDTQRYKLWNETDKQCLYCSNPITKTDFLTGNGEIEHILPKSRSFSNHSNNFILAHRKCNSGKEGKNQMTAYDFMESKGKEALEQYIKKVNEFYKDGKGTISKSKFENLMCKGDDIPSDFVERMKKDSQYISKEAVKMLKNVCEKTYTTTGQITDFLREKWELKNVLQEISYDKYKAIGQIETKEYKDGQGNIRTYETIKDWSKRDDHRHHAVDALICALTDQKIIFKLNNLNKIYQYQRDALSNEELEKIKATYDFKKLDIKSFADLIDDYYYSPIKNLREEATKHLENIFISIKKSSKVLSKNINEPKHVKPQITWTPRGRIHEDTVMGKVKRVAEKKAKLNGKFTIIDYIVNPEIKAIIKNHLSQHQDNPEIAFNSKTLKKNPIKYKDQELKEVQVYEETCTKRVPLTENFTAAQVEKITDEKIKNIIKERISKSKNIKEAFANLKENPIWLNKEKSIQIKSVTVYDESKVEHVRDGYVKTGGNHHALIYRDENGKFNEKVISFWEAVSIGTINIQQTGKPYPIINKKDDSILGTFQFSMMINDLFVFDLKHSENPTENEINFLDKKNRAIISKKLFRLQKLSKNNAGQFQTDFRHHLETTVNRNENELRGIAWERFQSNDNLKRITKIRINHLGEIIKIGE

SEQ ID NO: 3596 - protein, 1189 aa, unidentified
  REGION 1..1189: note = Description of Unknown: Cas Enzyme sequence
MKKILGLDIGVSSVGLSVVYEENKQKEIKELAVRIVPEDPNFHGKFYSGNTASKNLDRTTNRGIRRGYQRFQQRRNNLYKTLKEHNMYPSDILFKLPTYDLYQLRANAVTKQISLEELGRVLILLNQRRGFLSNRKSNSEEENSTDYKKRIAELQHELNGKTIGQQLFSEIENTKNSFEIILRERTYLRASYIEEFDRIWECQKQFHDKVLTGGVNEDDNKGTLYNTIRNKIIFYQRPLKSQKGLVSNCPFEKHHKAVTKSSPYFEVFKIWQRLNDLEITYENGSKKKPTLEQKQELFKLLFFGEKLNNKYKLTVTEIKRVLGLKRNEGYLNFTELDGSRTYSILKNALIKANIKTPENYLFFNLDKNDEKGGLMELWHITYSIPNENDLIKTIEQRFKFTKEQAEIISKEVGYTSDFGNLSTRAIRKLLPHLQKGLNYSEACDAVKYDHSGYKTKIKLEEKLKPIKQNSLRNPVVEQVLNQVVNIVNLAIDKHGKFDEIRVELARELRNSAKTRKNITNLNSKNKKENDKVREMLQKEYGYKIVNGRDTQRYKLWNETDKQCLYCSNPITKTDFLTGNGEIEHVLPKSRSFSNNSNNFILAHRKCNSGKEGKNQMTAYDFMESKGKETLEQYIKKVNEFYKDGKGSISKSKFENLMCKGEDIPSDFVERMKKDSQYISKEAVKMLKNVCENTYTTTGQITDFLREKWELKNVLQEISFDKYKAIGQIETKEYKDGQGNIKTYEAIKDWSKRDDHRHHAVDALICALTDQKIIFKLNNLNKIYQYQRDALSNEELERIKATYDFEKLDIKSFADLIDDYYYSPIKNLREEATKHLENIFISIKKSSKVLSKNINEPKNAKPQKTWTPRGRIHEDTVMGKVKRVAEKKAKLNEKFTTIDYIINPEIKNLIKNHLSKNQDNPEIAFNSKTLKKNPIKYKDQELKEVQVYEETCTKRVAITENFTPAQVEKITDEKIKNIIKERISKSKNIKEAFSNLKENPIWLNKEKGIQIKSVTVYDESKVEHVRDGYVKTGGNHHALIYRDENGKFNEKVISFWEAVSIGTINIQQTGKPYPIINTKDDNVLGTFQFSMMINDLFVFDLKHSEKPTENELNFLDHKNRPIISKKLFRLQKMSKKSNGQFDIHFRHHLETSVERNIPELTWINITSNSQLARVTKIRINHLGEIIKIGE

SEQ ID NO: 3597 - protein, 1367 aa, unidentified
  REGION 1..1367: note = Description of Unknown: Cas Enzyme sequence
MSKKILGLDLGTNSIGWALVDKENKKILGMGSRIIPMGSDKIDYEKGAGITKNADRRTKRTIRKMNKRFKLRRNKLLFILHELGMLPKQFQFKEGIPRPNKIQDLELLPIKKGTMQLDSLGHYELRANSIEKPVDNLKNFGKILYQFNQLRGYSGGNNDEDAKKKKEDDIDEETEKKKYEVITQKVTILKVEKSNRTFKVKGGKNKGEEQFYYDVTISFENEEMEGSTMLQNLKEKEGQEEELEIRIKRTKKEENVTFALPQKTNWRKQMEATEEILKNENLFVSQLLVKDLKQNKWTRIRNRVVLRHRYQAEFDTIWKTQSAKYPILNNCPKETIEKIAKYLFPGKSESQEKLRKAAIQGGLKYIIKDQVIYYQRPLKPQTELISNCQFEKEEKVMANSHPLFQEFRCWDQINRMYITSKQEIYSERKKKNIFQYTDRFLTNDEKQEIYNKLQNQKQLGFGEVAKIVKLKNDKTEYLNGLNVKAKLKGCDTTISIKKILGEHFETLFEKDNDIIAKIWQAIFDNANNGSEYDPKSLKVSSISEVLKPLNNDTIATELALKLVQNIKFPRKYASLSKKAIENILSLMQLKPDVVPEKVKNNFENVQYLIETGEILNENLLEDYVISFVKNNSDALQTGGLMYAFASSLVYGKHTKETIKAQIKNYHEIKYENRNLRNPVVEQVANETMQVIKAIWKQYKLNPEELEIKVELARDLKNSAAEREKIYKRQIRNNKINETIKKRLEEEKMPVTNENILKYKLYEQQKFVSPYSGDIMEVSLFAKYEIDHVIPKSRYFDDSFSNKVLVEGFLNEEKSNKTAWEYITQQNSQYKIQSEKLYLKHINENFFGRKKKNLTLEKIPTNPVERQIKDTQYISVAVKNELAKIVGSDKVKTSTGEVTSFLRSRWGLKRLFMELTESRFKQMELWDWNKETNQPNTEWVQKYFDKEREKHIYEIKNWSKRYDHRHHSIDALVVALTEQKHIQRLNNLNKYLQDELTKRKDEFKIEVREDENIIEAFFNLESSRRTEIQKQIESSRHFEKPFEDLIKQAEKLLETMVVSIKPKDKLGIKVDEKTGKKQLKIRAALHQETYYGKLNGKDTKTVAISKLTTKDISKVIDEVIKKEIDVHRKKYESTKEAFTGEGLKAFNESRFQRKNPTELKAPVYKVKVWYSAKEDKDSSLQKLYDNNNKLSVVTGDNYLFSVLEKENKNGKERLFDIASLYDSVTLANTALKENNVDFKRKIATERIDIIRQELKKDIWNTQKELGDKFSKAKGKKKEELQDKIEAIDENFHLKLLFTLQQNDLVYLPENVDDPVLKFNNDDFQEWLKKVENKKKFTQRTYKVVMFTGKDAKFISHNYANTISVPKVC

SEQ ID NO: 3598 - protein, 1697 aa, unidentified
  REGION 1..1697: note = Description of Unknown: Cas Enzyme sequence
MFSQRNNPYCDLLQNVVQIYKYLNMKKILGLDLGTNSIGWALVEIDNVNKTVRILGLGSRILTMDAAEIAKFESGAKTESSAAKRTTLRSPRKLNERYLLRRDRLHCVLNLLNALPEHYKLSIEFENKKGKRSGKFKKGIEVKLAYYKDECGKYQFLFKEAYNQMENDFRKKFPEMFYQKRNGTQAKIPYDWTLYYLRHKAVTDKDFELTKEQLAWITLSFNQKRGYEKVIGQDEKVQKEGELNDSFVGKVKSINRIENQDAYEIILVDNNNDAIELFKYKEESKIPITEIGDLKEVEIVSKYDDEGTIDSKKTEYIITEVREFSIVDVRNTGRKIKENFVFEIELETGWIKEQQSKFTPKWKDTTRDFIIKTKYDESGNRILKGTDKGRNINIPKEEDWTLMKLKTETSLTSFNAKNETKGVASFVYYNLLQNPKQKIKADLITVIERDYYREELDAIYKNQEQYHPELNNRNLYEQAIQLLYPNNNSHQKTIKELDFNHLIKEDILLYQRDFKSKKSLIADCVYEKENYERIDEKTGKKYKNPLKAIHKANPLYQEFRLWQFIKRLKIIKKEDGSGELNIDVTTQLLTNEFKEELYAFLNDKENATEKDILGFLNKKHKDLDINSNSYKWNFASEKEPCNPTRYNFILRTKRIKGFDYRVFLTPENEYSLWHFFYSVKKKDEFTKGLSNIISRLLDKSGLSKEFHAELVKNFSSFGGYTNDYGTYSEKAIKKILPFLRLGKYWNENEVEAILSKANQEIKQKVLDKEEINGEMKDFQGLWVSNACYLVYGRYSEVGEVQFWQSPYDIENYLKNEFRQHSLNNPVVEKVLVETLHVVKDIWKYYGEEVGKDEGDRIIYNKLFDRIHIELGREMKKNNKQKEKDDKKNKENRKANERIVELLRELKKTNSTLQEKSPFQQEKLRILEEGLLSSIEYDKDTTEYELPSGKISKKEIKDITSKELSKISRSDFERYKLWLDQRYQSPYTGKFIKLSDLFDRKKYEIEHVFPQERITLNALYNKVICETEINKEKKASTGYGFIANSKSKKVFCAAHDTEVAILSIDSYEELVKSNFTGRKRDILLSKEIPEEFTNSQLNNSQYISKMAMKLLSNVVREVNDDDNYRSKNVLATNGTITSTLKRHWQLNDAWNEIISPRFKRLNKLTNSNLFGDYREINGHKVFINTVPEEDNKNFDSKRIDHRHHALDALIIALTTENHVQYLNNISSQEENDEEKLKTRKGIKFQLTNSRKGFNEEKEWYFLPPAQIKTKDGIDEFEYQYLEMKGNVFKEIAQNALENTIASFKQKNRVIRQRWNKYLKPIEGKIKIETQVGLKEVVNYNVRKRLHEDTFYGKVKLQNNKNTGTNVITITLKKALEEQFELYDLLIAKEIQELRQLEKKSTQEIIETLTIKYPKVSVYEKYVATRFGNELESFASTPSDKIIKAIQSITDTGIQGILENHLENYKEFIDGKTKFDTENAFSSDGIKELNKNITELNSGKLHQPIYKVRISDAMGTKFSISEEGQKSTKYVVTAAGSNAFCGFYQKGTDRKYYIPTLRESVECLKQGLEPCPTAHPEDAEYKLIFVLNPSDLVYVPTEEEIENPNSVDFSRMKKEQMNRIYKFIDGSGTTMNFVPVNTANILFNMSNKEQDKAKIKLPIQNELGLGSPQSKNQNSLEGIQIKSLCWKIKFDRLGNITKY

SEQ ID NO: 3599 - protein, 1462 aa, unidentified
  REGION 1..1462: note = Description of Unknown: Cas Enzyme sequence
MEKILGLDLGTNSIGWAIRNTTLDDTQFEKYGVITFETGVGKNDKGQYVVSHAAERTKKRSVRRLYQVRKYRLWETLGILREDYCPITEEELNQWRRYDKEKGYYRKYPVNAIAFEQWIKLDFNNDGKPDSYSSPYQIRLELATIKLDLTQKENRYKLGRALYHIAQHRGFKSSKKTNNNNEINEGQLVGAEKKRSSKITDLFAKHDVKTVGAAFAKEELEGIRIRENLHQWVLRKQLEEEVKIIFETQGISIEDEFYRQVKKAIFYQRPLRSQKGLVGICTLEQTSYEDKEGKTIVSGKPRCPLSHPDFEEFRALSFINNIQFKINENNEWVKLSSKNLKELRESIFQNLFFRKSKEYFKFSEIREYVENYYRKQGSNLELNYKNKTINYADTTSVSACPVSARLKATFGDNWKTITIEKEKRKGSKSGKDNYTIEDLWHILFTFDDEDYFEEFGEIRLKLTPSQLKEFRSAWDNLPVGYAALSLNAIKKILPFLQEGLIYTEAVLLANMPTVLGEKLWNENKQFLIDTIEDIISRNREEKRIINIVNNLIAKWYALDYQNKFGFKDTSYKLVASDNKDILNTCIESIGEKTWAAKNEEDKEDTIKKVEDKYQLFFQSDKKEFYKAPHLLDTVKEFLIEEFTGIIEQKKLNQLYHPSQIDIYPKAKPDKEGKILLGSPKTGAFKNPMAMRALFELKKLVNYLLAKGNIEQDTRIVVEVARELNDANKRWAIKTYQDQREKENKEFAEAIAELIIDPHFKGKANPNNESDIDKFRIWYEQINKVKIEKEEFELNYELRKEPKKLDTDSPIKRDWLNTSTNLYKLISAKDKAIDKYRLWKEQGCRCIYTGNIIKLTDLFADNIVDFEHTIPRSISFDNSLANLTVCFADYNRNIKKNKIPTQLNNYETDSDGYSSIKPRLGDWEKKVEIITENISFWKKKSAKAQDKDFKDKAVRQKHLWQFELDYWQNKLNRFTITEVTSTFKNSQLVDTQIISKYAQHYLKTVFNKVDVQKGIITAQFRKIYSIQPKEAKKDRSRHSHHAIDAAVLTLIPSPAKREDILKRVYELEEQYSKEKLNIKPYPAFKYNQIEQIEENILINNIAKDQALTPSKKIIRKRGKIVFIPGTQIPKVATGDSIRGQLHKESFYGAIKKVIRDENNILKKDEEGKYLFEKENSYVIREPLLYKKDATSPGFKNLKEIKDCIVDPYLFEIIKKQVGNKTLKDAIEDGIYMLNRKGEQVYKHKIRHIRIFASVSNPLEIKKQSHSSSKKLVHFEDREHKKWYYASTGEGANIICALYETKKSNKIHRSFDIINLKDASELIKLKHIDEKGKLEIFRLREDGTKEFPTSILKPNTRVIFYKSNIDEIKDLNNNDDRQKLISRVYKIIKFTGVQMTFESHIEARAASELKKIATNTKDASYHDGYSTIDFDNLKPRYRLTAGKFNFAIEERDFEILPDGEIIFK

SEQ ID NO: 3600 - protein, 1288 aa, unidentified
  REGION 1..1288: note = Description of Unknown: Cas Enzyme sequence
MKHILGIDIGTNSIGWVLMLGNKIIDKGVVIFPIGTNIKKGIQEETKNHQRGTYRRTKRNLFRYKLRRADLKKFLNQLSMLPDFLKLDKQEGYQAIELYKLRAEALNKQIPLEEIGRIFLLINKHRGFKSNSKTLSEEVEEIKTAEKEEEGKVKDGIKQLETFINNSGSKTIGEYFYKMYVKSNKLFNVGNWHNINEPFDERAIDENGVFVLHNNRGIRREHGRYVSRKMYEIEFDLIWDKQKEYYKQLTGSSIEYEEIRKLPIEQKRNVLKQFKQTAYWQIKNQTIFYQRILKSQKKFIGKCQFETNKRTAPISSILFQEFRIWKQLADVRYTDESKDIYNSPLPEPWKQKIVDYLEVHPSLSLRQTKNYKDKVRKDDVMDVLGIENKKSIDFNFDNEDDDKVFHGNKTLFAIYNACGSEKYNQLKSENKLEKLWHILYMAKDDEWLKDNLLFNWNFKEDAVNNSVELGLEEGFANYSSKVLKKIVPFMKEGKDEFDALVLANYMKAPDEVKDEIILKDKVSILKNNELRNPVVEKAVNQVIKTVNAIFENKEYKINQKELEIHIESTREFKKPKKERENIRRGNIDVEKKRIEYANFLNEKRKEGKLNFKREIQKNDAIINKFELWLEMGYDKEDPAFQNFNVEKTGKEKHKLWLECNRVCPYSGKVINLSTLFSAETEIEHIIPYSKSLDDSFANKTITFTNINKEKGNDTPVEYFKKKKSKKEFDDFKKRIKVFGKEKIANRFLIEKLEFDFTNAQYPNTSYIAKYTRKKMLEVCKDVLFTNGAATADLRKNDWQLGNLLDKIRYEEETAIDIDNYLRPFGLYKKGFYQWNKKKFNSADLPRIDWKNLTPEITDEYEKETKEPLYEWWNTIQKFDEFRGAKGKKDRSDHRHHLLDAIITACCSRSIIQKLSTLNAKRETDGISMYDERGNITRDKIECPLEYDEIKSAMKDVLVFHKSEQRLITSRINKIKKKKTTEDKSNFIKQKTYAVRGSLVGDNFYGKLKNPRHQGFDKDIVFIKREELSGEKFKDEKSLEKIVDKNVAEILRRRLAKYNGNGEKAFSAEALISNPVYMYSLKKYKDRIKDEPKSTKENPLPVIKKVRIANKNARNLVQLNAKDENKSIVNENRYAETDGNYLMALYEKQEIVKKGKIKIKRDFEIVSFYEAVKKRSNGEKLFPDEKNGMGLMKNCHYLIAGDMVIIYEESEDEIDWSDNANLKMKLFKVTELGSSDINGYLYGVIKFSKHNKSGSNIKYSSTGYFIKKYHSQLNAVKIKINQLGKIERY

SEQ ID NO: 3601 - protein, 1188 aa, unidentified
  REGION 1..1188: note = Description of Unknown: Cas Enzyme sequence
MKTILGLDLGTTSIGWALIREDENQTSFVDMGVRIVPLATDEKEEFTKGNAISKNQKRTQKRTQRKGYDRYQLRRKYLTEVLRERNMLPNEKHYKLSALELYGLRNNALKERLDLEQIGRIFLHLNQKRGYKGSIKEEGDSDKKVGEYVAGVKSRYAKIKELGLTIGQFFYQELQKNQYYRIKEQIFPREAYIEEFKIIYKSQQNYYPNILTDEFLNKLIHEIVYYQRPLKSQKGLVSICEFEGQYRKNKEGKVIFTGPKVAPKSSPISQVCRILEVVNTMKLKSKTGSEFELTNQHRKLLFEYLNENERLTETKLFSLLKLSKNDGFVCNVMGKSGIKGNETVVSVKKALGEDISNWLKFELSEVQANRLIDPETGEEILRNEISSSFELEPLYQLWHALYSIKDDELLRKVLSEKFHLPSNRIESLIKIDFTKQSYSNKSARVMRKIIPFLQSGFLYSDAMAYAGYNHSNSLTGDENLNRELIDKIKPLKLNSLRQPVVEKILNQMINIVNAIIDQYGRPDEIRVELARELKSSKDERNNAMRRNNENEAYNKKIADELIELGVKVNRRNIEKLKLYKEVGGISIYTGNLIPVATFLNGDQVDIEHILPKARIFDDSFQNKTICEQSENRLKGNMTAYDFMKTKSEEEFNNYLERIELLYKKKDGITRAKRDKLLTPADKIPKDFIERQIRQTQYISRKSTEILKSVCRNVYATSGQVTEYLRHSWGWSDVLMQLQVERLKSMGLDDLIEYEMIGKGKDEKKRPVIKGWTKRNDHRHHAIDALTIASTKQTIIQKLNRLNQEVMKNEGQTQSEALKENLKLKDFVNLHKPFTHEQVLEFARNINISFKSGKKVAIYGKRLIRKNGKSKVVQSKIVIPKGALSEESIYGKINHIKNNCALNELFEQPDQIVSDKIKAKVKERLQIYEGNKRKALASLKKEPIWLNEEYDIKLESAAMYQSQFVIKYPISAIKLKDVEFIVDAKVKEIVSNRLAEYNGNHKEAFKDLQNNPVWYNKEKGIEIKTVRCFTGLSNLQPLHTKKVGNESLPLDYVKPGNNHHVSIFEDEKGKLYDIVTTFWEAVERKKNGLPVIVTNHPDGHKFVMSLQQNEMVRINEETGFDNGPYNYFRVQKFSKKSAGDLDIHFRQQFETELIDNEDSKIARRFYNFRTVQNLKRVTKQKINVLGKLV

SEQ ID NO: 3602 - protein, 1294 aa, unidentified
  REGION 1..1294: note = Description of Unknown: Cas Enzyme sequence
LTQPVSIEELFRLVYHFNQRRGFKSNKKANNPDEQTAIAEEDSDKIKPELTIEKVKIVSVESTGERKGKLKKEELKVVLEDGRTAFTDKFLFKKFKGESTFLEIKKEITKSSSEPKYTFSFPTKWQRNRKELNDGIIKSGGYPGKYFYEEYLKAVAENKPYDFKVRENVVNRELFVKEFEAIWEKQTEFLKERITNHPKFGEALDIILPAHSKDEKAKWLEKGLGAFIAEYIIFYQRDLKSQVETISDCRFEKRFFKKVDTETGEVETLRDGPKCCAKSNPKFQEFRIWQQINNLIAYNDREEEISISDEVKTDLFAHLNEKENIEPDELKKWIRKKVKGVEEINAVKMWSGNRTMHFLKGIFKRGNYDAKHILENEETYLRLWHLLYSVGDEKGIKGGLKKIDANLPQEIINVFCAVDFKEKQYASLSLKAICNLVPLMRCGSLFKEADVTAKAKKRIELFLKGELDNEFDPKTLTRLKQRKTVNDFKGLSYFETASLVYGKHTAEAKKQFDVPGEIHPVPRHSLRNPVVEQIVNETLMLVKDIWTEYPELRNGEIRIELARELKSNKEQRERTSKAQDASKDYNKEITEEIRRHKGASYNPPLNEIEKVKLWKEANCQSPYTGKTLNITEVLSSYTNIEHIIPKARFYNDGLINKTICESHINDDKDKMTAYEYMNTGTKCQSEKLSYDEFLATIKRFPPAKRRMFTMQEIPNDFIERQKKDTQFIATRIREELGQVVGLNNVKTTTGQVTDYLKEQWGLAELIKRLIKPRFEALQDRYKIELIKEVPVIGKDDKPTGKNRTVIKGYSKRFDHRHHAIDALIVACTKQGIIQQLNLLNQITSGKIKSMAETKGGSLRKFIPPTGSSDPDATKFYSIAEEAVNNIVISYKNKKRLATKRINSVQKFSEEQNAIIKFKHPEQKSSWNIKGKLHDDQPFGKVYFKKREIPVEDSFERLKDIVDDKIKFAIAGRIEEFKNAATSTKDKSKAVSLAKKSVDVRPIIIKEKIEWVEVKEEKFLFVKNRKIYDAEALQKTLSISQLKRIVNKEAREDIFKHLAKAEYEGKTEKAFGPDGFVEFNHNREAAKKAPIYTVRVIEEGDEESVGKTPLYTPERKLDVEKGGNFCVAVYEHLETKDRKFDVVSFFDAVHLKTSGQNPFQTEAGVELEKAGYQMIFTLTHFDLVYVPYPDEKKEDIPLNKNDKRYSAFWFDKGKQRLKRIYRVVKFSGTDFYFQPHTYSTEITIHDGKAKSAKEYQGEFGKGTNGTAYIIGTDSNPIKKACFKISVNKLGAITLL

SEQ ID NO: 3603 - protein, 1423 aa, unidentified
  REGION 1..1423: note = Description of Unknown: Cas Enzyme sequence
MKKILGLDLGTNSIGWALVDNENQKILGMGSRIIPMGTDKQDYEKGVGITKNAERREKRTIRKMNKRYKLRRNKLLFILHKLEMLPEQFQFKNDIPEPNKIQDLELLPIKKGTMQLDSLAHYTLRTKAISKKVELKELGKIFYSFNQLRGYSGGNNDDETKKKKEDDNEDEEGPVKKYEVFNQKVTIQKVEQSETKFKGRGKNKGQEFNKFEVTVLLEEEELEGETELQNLAEKINLEEEFEIRIRRNKKGEIASVVFALPQKTNWRKQMEKTEEDLKQGNLHVSQLILRDLEQNKWAKIRNRVFLRNRYQAEFDAVWETQSKAHDILNNCPEETIHKIANYLFPGTSETQEKFRQDAIKGGLKHIIKQQVIYYQRPLKPQKELISNCQFEKDEKVLPNSHPLFQEFRCWDQINRMYITSKQEVYSEKKKKNIFQYTDRFLSKEEKQEIYNRLQIQKQLGFSEVAKIVMLKNDKTEYLNGLNVKAKLKGCDTSIAFKKILGEHFDTLYSKDNNIITKIWRAIFDNANNGSEYDPTSVKVSSIIEVLKLINNEVVTIELALKFAQSIKFPRKYSSLSEKAIKNILPLMQLNPANIPNKVKENFENLQLLIETGEILDENFLEDYVINFVQKNPSVLETGGLMYAFASSLVYGKHTKESIKAQIKNYHEIKYINRNLRNPIVEQIANETMQVVKAIWKQYKFNPGELEIRIELARDLKNSAAERDKIYKAQIRNNKINDTVKKRLEEEKIPITDENILKYKLYEQQKFISPYSGVTMKSSLFNEYEIDHIIPKSRYFDDSFSNKVLVESVLNEEKSNKTAWEYISNQNSQYKIQSIESYIEHINENFFGRKKKNLLLEKIPTNTVERQIKDTQYISVAVKNELAQIVGSNNIKTSTGEVTDFLRSRWGLKKLFMKLTENRFKQMELWDWNKETNQPNKNWIKEYYDKEKQKHIYEIKNWSKRYDHRHHAIDALVVALTEQSHIQRLNNLNKYLQDELTKRKEEFKIEIKDDETIIEAFFNLEEKRRKEIQEKIESSRYFEQPFEDLVKQTQTLLEAMVVSIKPKDKLGIQTDKEGKIRIDKNGNKQLKIRGALHQETNYGNLNGRNTKTVELSKLTAKEISKIIDVVLKNEVENHREKYDSMKEAFTGEGLKAFNENRFQRKKPTALKPPVYKVKIWFSAKENEESTLQRLYDDNEKLSVVTGDNYLFIVMEKESEKGKERVFDIASLYDSTDIAKRAIQEQEENFKQRICEDFRLTYGERNKIKGISQENPDRILFTLQQNDLVYLPENIDDPVLNFSNEEFQEWFSNTVNKKKFIQRIYKVAKFSGKDCYFIPHNYAKVITVPKDLTEEQKDVLTKHYADKKIPKKELNFVEFGSYRDCSPYESGLSFIKSLIYKKPEIKPLKIQDTCIKLQSDWLGNIKLMR

SEQ ID NO: 3604 - protein, 1425 aa, unidentified
  REGION 1..1425: note = Description of Unknown: Cas Enzyme sequence
MKKLLGLDIGTNSIGWALIDYDFDNKTGEIKALGSRIIPLEADKLKDFQQGRSASLAAERRMARQGRRLKYRYKLRRERLIKVFKILGWFPQNFPEKFEEDDHFNINDFVPFSDQTIQEAKELFNVVNLPNDWAIYYLRDKALREQISLQLLARIIYHFNQRRGFKSSRIENKSPDVVEQEVFPKTETFYEFLKITSIKETTEKRKSNRVFIVEGKTKDNVTYSGTLSRKTKPDWLNQEIELEITKTTKKDGTVSFTFKEPDRSNWEERKLALEKDIKLSGLYVGQYHLKKLLEDRNYRIKEQIVDRKFYQEELEAIWKSQERFYPELKNNPKIEVIAKTLYQHNEQKQKELQKLSLLEIIKDDIIYFQRPLKSQKKLIGECRFEKKNFIDQYGRQPGYKVAPKSSPIFQEYRIWQTINNLRIFKREEKQPDGKFKFDVEKTDEVLNIENKEKLFKLFDSKDDVKIDEIIKAIGLSPDEYRINFPQDRELKGNETKAAFRRVFKRHNFIEEGEKILENRELFFNLWHLTYSVTDENQLSKSLIKKFNFSEDLAIHISKMPPFKKEYAAYSSKALKKLVPLMRCGNYWNEKEIDPSTKQRIEKIIDGSLKSSFPEEIISKLYSGSYKSISDFQGLPVYLACYVVYGKHSERELYEKFDSPDEIDHLKMLPTNSLRNPVVEKVIRETLLVVKDIWAQYGRPDEIHIELARDLKRNAKEREILTKQMLENEKERKRIAEILKYIKNANPNSPMDIERLRLWEELGTKEAKETFPKLSANPTKAEIQKYLLWGEQNHISPYTGKVIPLSKLFTEKYEIEHIIPKSRYFDNSLANKTICEAEVNRFKENLTAMELIQQYGGTTIPNTKIKLLTLEEYTQHIKSTFRGRKLSNFMRLEIPENFINRQINETRYITRKLGELLYPVAKESLIFTIGSITSELKEKWGLNKVWKEIIKPRFERLEKITGDKFIFYDKETNNFHFAKDYKRIDHRHHALDALVIGLTQREHIRYLNSLNAVDSSDELMEVKYRLVKKGIREFHLPWKTFTKDAKEKLKEVIVSFKNKIRVVQRGRNKYWKWVNENGKWFKKLVPQDNSKLFTVRKSLFKEPSGIINIAEYKDVNINEAVKYQFEYLTNRQSNLQERIANKKLRKKINELIKNCNFDLNETLEHLKKYPLKDDKGNKLKKVTILYFKEYSAKRVSLDQSFDERKIDKIPYSNHPDNRLVKLLKNHLKEFNNNPKDAFTGEGLEQLYKKYGKPIRKITIMEEVGKKIPIKGKYFEVDKGTNLFFVIYENINDPTDRIIDENSSISIVDALQVFINGGKKEDLGENKPGYKKIILSPNDLVYVPEPGETVNLIDWNNKAKLSQRIYKVVNFTKSQIFFIPHFIAEPIIQTTELGSNNKAERSWDGIMIKKVCIKLKVDRLGNISPEI

SEQ ID NO: 3605 - protein, 1386 aa, unidentified
  REGION 1..1386: note = Description of Unknown: Cas Enzyme sequence
MQKILGLDLGTNSIGWAIRDIDENENQIIDKGVLTFEKGVGEEKGNEVPLVKKRTESRCKRRNYQAKKYRKWEMLKCLIENNPKMCPLTIDELNGWRKYKNENGRIYPQRKEFINWLKLDFDSDGKIDFENPYHLRKVVAEKKIDNPLILGRAFYHLVQRRGFKGRDEEEAKLIMEGSEKTSTKGVNEIHKIMEEKNTTLGGALYFDLKNNGKRIRKRYNLRTDFETELKIICSAQGIDESSELFKRLYKAIIWQRPLRTQKGNVGICTYERYEYINKANGKKLTIGKPRCPISHPLYEEYRAWCFINNIKIKSASEIESSFEPLSEEQRIDIYEKKFFRKSKAHFEFNDIWKLLDPKKNLYVFNYKDNTSISGCPISASIKEIFGELEDIRIPHTANERRSKKKDYYDYEDIWHVLFSFDSKEKLTEFAKVQLKLDNENADKFCKIKPQQGYASLSISAIKKILPYLRKGFIYSDAVYLANLKKVLGKEPSATEKNRIIEGIRLQIKLQKEEKDLIGTANSLITRHLNLEAHERYARYPEYFLRPKDYDDIENELLNNFGTKTWNEKNEETKNKYRLLVQELYQAYLQTPVNVEKGLLFNKVPRLDERIKTYFKNEWNAKDENLKYLYHPSETEIYPPAKEREGKKYLGDPMPISRGFKNPMAMKTLHHLKRFINCLLDQEKIDENTRIVIEIARELNDANRRKAIDRWQKEREKQNKEYADATREIVEKHGLNIDTGKDDIIDKYRLWIEQDRQCIYTGKVINCTELFDGTKFDFEHTIPADLSFDNELKNITIADSKYNREIKQKRIPTELPNYESDATIGKEIYTAIKPRLNFIEQKIKQFEKDIENWKAKSKSAQNKEWKDTCIQNRHYFSFHLDYWRKKYETFTTKEFKSGWRNSQLRDTQTITKYALPYLKTVFNKVEVQKGIITAEFRKIYNVGFEKDRSKHTHHAVDAAILTLIPTAVSRDKLLKAHFEAVEKNIRFHSLPPDWKNYKPQCIKNIEEETLINYINKDRTLVPTVKYVRKRGRIQYVKEKLPDGKWVFKLDEQGKKIPIIAKGDSIRGQLHEESLLGAIKELELDNNGKPILENSKPVYKKDKDGSYKLIFVKRILLKDFTSIDDCRKIVDKTIREIIINTIQQRIDRGKSFKEAIAEDIWMIDKNGIPKKEDKYGNILHPIRHVRCRVAAGRGYLTKEKALEIKQHIMQSKHEHKQVVYAKNEEMSVCLFYEGTVNNKMERAFRLIGLYELAQYKLNKINDIKNVPDYQHCEVGRGKNKIVIPLINVITTGTHVLVYSNSPDEIKELNKKELLKRLYRIYKFNEAPSPYVYMQYHAEARQDLELGVGETQIDIKKYQPRLKLVANNFKCLIEERDFEIKLDGEIILE

SEQ ID NO: 3606 - protein, 1231 aa, unidentified
  REGION 1..1231: note = Description of Unknown: Cas Enzyme sequence
MKKILGLDLGVASIGWALISEHEEGSKRDILGMGVRIVPLTTDEKDEFAKGNKISKNQNRTILRSQRRGLDRYQQRRSKLKRILEREGMYPHTFLFQLSPLEIYGLRARAAQEKIKPHELGRVLLHLNQRRGYQGTRAEESEESAKKSTSEEKGYVAAVKNRHQQILDKGLTVGQYFFESLVEDPHFRTKNLVFPRKAYLEEFNAIAQAQQLSPALAKELGDQTIYFQRPLKSKKNLVSICQLVGHCHVDNKGVEKWQGPKVAPVSSPIAQVCRVWEHINHLTLKTLDNKNIPLTLPQKQQLFHLFDTKELVRLKDIIKTLGFAEGTVFSDKQLEKGIKGNSTRVELTKILGDKHPELCAFNLSVLSDSSKPARFVDKKSGEVLIESHYKQVTPAFEHQPFYQLWHTIYSIPEIESCQSTLENKFGIEPNLAAQLARIDFTRQGFSNKSARAIRQILPHLMDGYVYSTACALADINHSNSITKEENDVRTLLSRLPLLPKNSLRQPVVEKILNQMIQVVNAIYDEYGAPDEIRVELARELRQSQEERNKTYSALNKLERENKAIREDLNAYNIRATRNNVIKYRLFQEIDGEKTRVNATCIYCGKMFGFVDALRGNAVDVEHIIPQQLRFDDSQSNKTLAHRACNLEKGNQTAYDYMASKSPAEFEAFKKRVQDFYDRKVIGSRKRKNLMTSASELTTSDFINRQLQETRYISKKSREILSKTCREVHSTTGTITEYLRRIWGWNDVLMRLQLPKYKALGLTDTELRQGPDGHAYEEEIIPGWTKRNDHRHHAIDALVVACTQQGFIQRLNSLHAKETRDFLYAQTAEHKPLPGKILERYLKKQMPFTTAEVEAAASSIFISLKPGKKVATKSVFKREEKTRGKNRITGVLTPRGALSESSIYGRIKLISPDMPLKYLFENPHTIVKPYIRELVLERLNQFEGNPKTALASLKKDPIYLDEGRTIPLQYGSCYKEEFVIRYPLNGLKLKDVPSIIDPIIREKVRARFEQFGNDEKKAMQGLDENPIWFNEAKRIPIRTVRCLTGLSAVEPLRFNSDNQAIAFVKPGNNHHLAFYRDQAGIPQAHICTFWHAVERKKYGFPVIIEQPEQAWNQILHQPTTYPDSFSAKLPQDTWQFDFSMQQNELFLLGLSDEERTHLLEAQDYAALSTYLYRVQKLTFLDIFFRHHLETTVEEKEVFKLTKSFLRISSLSRLYELNPYKIRLNHLGKLERP

SEQ ID NO: 3607 - protein, 1436 aa, unidentified
  REGION 1..1436: note = Description of Unknown: Cas Enzyme sequence
MKKILGLDLGTNSIGWALIDKEENKILGIGSRIIPMGQELSKFEQGQAQTKNANRRISRGMRRLNKRYKQRRNKLIYVLQQLDMLPNQIQLSEPFGNPLKLDHISILPIEKQQKQYSALDLLKLRVLALHNQISLKELGKIIYLFNQLRGYSGGSNEPEKEENSEENTEIDDKKRNDNYIAFGKVLSLSEPEKITFKGKELNKYKVNFETEDGILEGDSYLDVLKEGDSLELQVNITVSKKYGETIIFRLPNKTNWRKKMENLEKELSDLSKQKGQEVYLSEYFLSILNENKWAKIRNNVILRSRYQSEFDAIWKEQIKYYPFLNNCPQEKITIILNFIFPGTKETQKKYRNEGLNKGLYHIIRNQIIYYQRDLKDQSNLISDCRYEKDEKAIAKSHPVFQEFKIWEQINKLTINTKTEDGKNRKGETKYKYIDMPIPATLKEWIFDELQEKKEMSFGVVLNKLKKEFNLRDGIDFLNGMNSKAKLKGNETKLMLKKSLGEKLWNQLGLSEKDRQIEFWNILYNAKGNEYELNSDRTSKILAFLKKYSSEIEDVEQIAIKISKIKFTRNYASLSLKAIENILPLVRCGKYFDNQLSELLNKKILYLYNENVTDPFEKSAQEYLTNNIDVLINGGIINAYATILVYGNHTTKEFSKEELIENYNQIHRLTPGELRNPLVEQLISESLMVVKDIWRQYGEKPSEIRIELARELKNNAERRDKIYKANSKNQKINEEVRNLLIELRQETTLANIEKYKIWASQESFEEKFIQEYKDPSKNEIEKMKLWREQGHISPYTQQPIPLSELFNRERYDLDHIIPQSRYFDDSFTNKVICEKSVNKEKSNRTAMEYFEAGSSIPSVLSKENFIDLVNKMYQGAKRKNLLATKVPEDPVARQMKETQYISVRIKEELNKIIGNTNVKTTTGGVTDYLRNQWGLTDKFKYLLKPRYENVQPLLAESEYEKYAASIEKKKKEYEKDNIPFTEFVLSKDGYIQKFNQELFQKKNNKLVIKGWSKRIDHRHHAIDALTIACTEPSHIKRLNDLNKELQTWLDNHKKEFLPNFEGTPSELLDEILNLDETKRDVIFNQIEKFKNVDLPWNGFPEDAETAIKQIIVSQKPKDKLLIQPDTKTGKFQIKIRGQLHESTLYGKSQGIESYRIPLSKLAGKQFATEKTIEKITNEYLKEQIKQHLKDFNNKKEEAFSAEGILVLNTKLAEKKNRKGNMASHAPISSIKIFYRDPLKIKKKKGEEEIEDALQRLERKKAYNNSLYVSTGDNYLFAIMEKDGNRIHDLISFFDAANLLKEEFKKISDKSTFNKETVFKTYFEENNKATLLFTLKQGDSIYMPPENEEVIFDPQSSLYEDFWKDKEARSENIYYVTKFSQNKEIYFIKHLIANTILKGKEFGSQNASQIIDGRSIKQHCFKLNIDRLGNISPYKSIL

SEQ ID NO: 3608 - protein, 1152 aa, unidentified
  REGION 1..1152: note = Description of Unknown: Cas Enzyme sequence
  MOD_RES 302..308: note = Any amino acid
MILGLDLGTTSIGWAVVSEDDQTFRLDSLGSRIIPLTTDDANEFLSGNAISKNAKRTQRRTQRKGYSRYQQRRALLQQFLQQHAMLPDESLKGLNKLSLWGLRTRAVSEQLSLPELGRVLYHLNQKRGYKATKADYDADGDKKQGEYVKAVMGRHRMITERGITIGQLFFEKLSEDPSYRIKEQVFPRRAYEEEFDRIVACQRQFYPTLFTEENIDTLRNRIIYYQRGLKSCKHLVSLCDFEKRAYLNAAGKTVFNGPKVAPKSSPLAQVCKIWESVNNLTLKNRRGETLEIAPEERRALFXXXXXXXTHDKLTLTDLYRILGIRKTDGWWAGKAIGKGLQGNTTRNALRKALAGQYDELLRFNLTTVETNHVDAETGEIIQMVSEAYLDEPLYRLWHAVYSIPDQEDLSKTLQKQFGITDPEVVENLFAIDFVKAGYASKSAKAMRRILPYLELGLKYAESCEAAGFRHSESLTVQELESKSLLPKLKPIEKNELRQPVVEKILNQMVNVVNALMDKYGHFDEVRVELARELKQSRDERNETTKRIDKNEQKNRAVAKRIATDYQLTPTRNRIRKYKLWEESGHVCIYCKSVINASEFLQGIDSEKEHIIPRSLFFDDSFSNLACSCRQCNAAKGNRTAYDFMQQKSEAEFADYLDRVEKLYKKKKISKTKYERLLTPESKIPTDFIDRQLRESQYIARKAREILSGVCRQVTATSGSVTDFLRRTWGWDRVLHDLNFDRYRAAGLTEIKDREHNGRHWQEEEICNWNKRLDHRHHAIDALVIACTKQGYIQRLNTLSQWKDVSFAPTEAQGEVYQTKRSKLEKYIVAQPHFSVQEVQQAVRSVLVSFKAGKKVASTGKRYSYRQGKRVLMQHVLIPRGALHKDSVYGVVNRYAKNRRGETVIEQKSVLRYPLASIERNQINSIVDSGMRKLVQQRFDRHPGSGKDVLKDLQNDPLLFNGVPVKSVRRMPRLDASSLIHLHRGGYVVPGNNHHVAIYRDRAGKLYEHCVTFWQAFDRKRYGLPVVIIHPEEVWNSLPEGVPDTVMEQLPLPEYSFVVSLQQNEMFVIGMAPELFEEAMRNQDYALLGQYLYRVQYISSNDYCFRLHVETGTERGESDGLAKKFYRFKSLKAFFAANPTKVRISLLGEISKV

SEQ ID NO: 3609 - protein, 1570 aa, unidentified
  REGION 1..1570: note = Description of Unknown: Cas Enzyme sequence
MKRILGLDLGTNSIGWALVDTDVQRILGLGSRIIPMTQDVLDLFSGGKPLQTQTAARTNYRGIRRIRERHLLRRERLHRILNVLGFLPEHYARDIDFEKHYGQFVDESEPKLAYDNKTFIFKSSFNEMLAEFKQTQPPLFYTKANGKETLIPYDWTIYYLRKKALSQKIAKEELAWIILNFNQKRGYYQLRGEEDEAENPTKLVEYHSLKIIDVVADEKPNTKGEIWYSLYLENGWIYRRQSKTALYDWKDKVRDFIVTTELNDDGSIKEDKEGNVRRSFRAPGEDDWTLLKKKTEQEIIKSEKTVGSYIYESILQNPTQKIRGKLVRTIERSFYKEELKAILKKQIELQPELFSTAAYNDCVRELYRNNIAHQLTLSSRNDFIHLLIEDIIFYQRPLRSQKSTIGNCSFEFHEYKINKLDENGNKLKDESGNFIFEKDSNGDILKKKEYLKVIPKSHPLYQEFRVWQWLANLKIYRKDDDTDVTPIFLKSNDEYVKLFELLMTLKEVGHKDILKHLLVPILHEKYPGAKASVFNKEVEKEIAKYRWNYVYDESREKEEDKSKKYPCNSTGYEIRKRLEKVDNIPADFLTTEKLQHLWHIIYSVTDKNDYKSALDKFAKKHNIDAESFTAAFEKFPPFQSEFGAYSFKAINKFLSLMRMGKFWDWDAIDSNTKDRIEKIISGEYDEKIKDSVREKSISLTHQNSFQGLPAWLVSYIIYDKQSVEKWNTIDDLTEYLENFKQHSLRNPIVEQVITETLRVVRDIWKQYGHGAKNYFDEIHVELGREMKNTAEDRKRLSDQISINEATNLRIKALLNELKENSDGKLTVENVRPFSATQQDALKIYEEGVLRGNIEVPEDIVKISKSSQPSKSELQRYKLWLEQKYRSPYTGQIIPLARLFTEDYQIEHVIPKSRYFDDSFNNKVICEAAVNQLKDKQLGFEFIKNHPGERVECGMGKVVEIFTEEAYQTFVKEHYSRNQAKRQNLLLEDIPEKMIARQMNDTRYISKYISSILSNIVRSENNDDEINSKNLIPGNGKITSILKKDWGMDAVWNELILPRFERMNTLTNTNAFTYWNEQHQKFLPVDYSPVDSKRIEKKRIDHRHHAMDALVIACMTRDHVNLLNNQSAKSETTRYDLQNKLRNKSRVTWTDKKTGKQVERDVFKEFKKPWDHFTIDAKNALDTVVVSFKQNLRVINKATNNYQKWVPKNGIMVKQTLQQEGTNWAIRKPMHKETVAGIVNIRQIKSVSLAMAIDKWEMIVDKKLKIKIKQMINESHDIKKITKFFSEHEYQWDGKDVKKIDIYCFSNDTEVLVASRVNLDSSFNTKKIETVTDSGIRKILIEHLSHYNQNADLAFSPEGIEDMNKRLTILNKGRFHLPIKKVRTFEPKGNKFNVGIIGNKKNKFVVAATGTNLYFSIFTNKDGKRFFETIPLNVVIERLKQGDKPIQDTKTDENGNVYILYDFLNPNDIVYIPTEDQKMNINITIDELDKNRIYRFIDSSDTTANFIPVYTASLIFNFNKKDQEKIGTVFPIQNEYGIGSPQSKNQRAVTGEMIKDVCIKLKIDRLGNITF

SEQ ID NO: 3610 - protein, 1426 aa, unidentified
  REGION 1..1426: note = Description of Unknown: Cas Enzyme sequence
MKKILGLDLGTNSIGWAFVEEAENESEESSIIKLGVRVNPLTVDEQQNFEKGKSITTNADRTLKRSMRRNLQRYKQRRENLIDILKKNRFTSDDTILSENGNRTTFETYRLRSKAVTEKISLQEFARVLLMINKKRGYKSSRKAKGTEDGELIDGMEVAKKLYNHNLTPGQLCLQLLNEGKKHLPDFYRSDLQTEFDRIFDIQMTFYPEYLTLELKEELRGKKRDAVWAICAKTFKEKGFELIGTKRQGSTAEQKHENYSWRAKGLSEKLELEQLVVVLQQINIQLNSSSGYLGAISDRSKELFFNKQTVGQYQMAVLDKNPNAGLRNMVFYRQDYLDEFNAIWEKQALFHPILTDALKDEIRDVIIFYQRRLKSQKGLISFCEFECRKIEVEIAGQKKTKMLGSRVIPRSSPLFQEFKIWQSLNNIEVFGKGKKSKKQKEQTLFDQTEDPLEFGGRRELYEEEKELLALELSIKKELKKADILKLLFDNPKELDLNFNAVQGNLTQATLFNAYKKIIELSGHEIDVEKVSASKILKSIEEIFKALNYNTEILHFDSEKSQDQQAMYMLWHLLYSFEGDNSNTGNENLINKISKLYGFEKEYAKILANVTFQDDYGSLSAKAISKILPYLKEGHKYDIACDLAGYKHSASSLTREELENKTYKDRLEILPKNTLRNPVVEKILNQMINVINSIIDSYGKPDEIRIELARELKKSAKEREELTKSISETTKLHQQYKDILSKAPFNLTNISRNDIIRYKLYEELKDNKYNTLYSNTYISPAALFSGDFDIEHIIPQSRLFDDSFSNKTLELRSINIEKGNKTAYDFIKGKYGETGKNESLDNYLNRIETLYKNGVLKKSKYNKLKMQDTDIPDGFIERDIRDTQYIAKYAKTLLGDLVKFVVSTSGSVTDRLREDWQLVDVMKELNWVKYQQLGLTEEFTNEEGHRIRKIKDWTKRNDHRHHAMDALTVAFTKRQFIQYLNNLNARRISDEQGISNAEKDERNNVSITTNDMKLNTRDVLGIEKKELYRDNRGKLRFKAPMPLQEFREEAKRHLENTLISIKAKNKVTTLNINTLKKAGGVYKKTQLTPRGQLHNETIYGSQKQYIVKEETINAKFDVEKIATVTNPVYREALLKRLEQNNNDPRKAFTGSNALTKKPMWLDEQQTEKVPEKVKTVSFETIYTIRKEISPDLKIEKVVDEKVRQILNNRLNEYNGNAKQAFSNLDENPIWLNKEKGITIKRVTITGINNAQALHEKLDKDGKPILDGEGKKQPVDFVNTGNNHHVAVYSDADGNLQENVISFYEAVTRRNLGLPIIDKDYKKDDGWQFLFSMKQNEYFVFPNESTGFNPNEVDLLNPDNYSLISPNLFRVQKFTIKDYFFRHHLETNVESNSTLKGITWLRCGLNNIDNIIKVRINHIGQIIHVGEY

SEQ ID NO: 3611 - protein, 1383 aa, unidentified
  REGION 1..1383: note = Description of Unknown: Cas Enzyme sequence
MEKTLGIDLGTNSIGLTLREDNEFSWYGVYTFKKGVGEGKSGEFSYAAERTKHRSSRRLYNARRYRKWETLKILIDFDFCPLSIENLNKWKHYKKGTGRVFPINDASFQQWIKLDFDNDGIPDFSSPYQLRRKLITDKLDLTVSENRYKVGRSLFHIAQRRGFKSSRKSGSNEKTAVYKGSNETKTIGRNEYENLIIEKGSLGAVMAFLEDKGIRIRNRYTLRSDYVQEVKKILMIQQIQDDKFSEKIESAIFFQRPLRSQKGLVGKCTLETSSIMKKDNEDGIIKEIVIGKPRCPISHPKFEEYRAWSFINNIKYRKDKNADFEPIPLDLKERIYHEKFFFKSKREFPFSDIRKLIQANGDKNWELNYSSKMDGISVPSCYVSARLNSVFGNEWQNFEKKIVKTNPKRKEETIKYTIEDIWHILLSFEDEENFMDFCIKALELDDKQVKDLSTLFNSFPVGYANLSLKAINNILPFLREGLIYTEAVILAKIPEIIGRQLFNENKNYILNEIRNEIDRNRHEKMIITITNSLIFKYYALNYGERFAWKDFSYKLEQTDYDDIVKTTIEHFGDISWKTKTENEQHNIISEVAEKYQSFFADEKREHLKPPHLVNQIKTFLHTNFDVIEKKLDKIYHPSQIDIYPKTEDQQFLKSPKTAAFKNPMAYKTLYKLRDVINHLIEIEKIDKDTRIVIEIARDLNDANKRWAIETYQRRREAENQTFKTAIMELIQDDDFKGYADPNSDDDIDKMRLWTEQIENLNETEETIAKINRDKSISDKDIQKYRLWKEQNCRCIYTGRIINLTDLFDVNKVDFEHTLPRSKSFDNSLANLTVCYADFNRKIKKDKLPTELNNYTEIKLRLETWEKRIDDLEKQIDFWKTKSKHAQDKQEKDDAIRQRHLRQMEYDYWKNKFDRFTRTEIPQGFINSQLTDTQIITKYAYHYLRTVFYKVDVLKGTNTAQFRKIYSIQPKTEKKDRTKHYHHAIDAAVLTLIPSAKKREEILKKAYEFEEKQENRNKLYHEKPFASFNYSMIEEVQKNILINNLVDKDQTLTAGKKFVRKRGRVVWIDKKNRIPKIAQGDSIRGELHMQTYYGKVRLVERDEKQKPLRDDKGNWKFLQGDDEYKFTLRIPIENLSSLDNLVSPELSKIIESQLSGRTLKKAISENLYMIDKHGNKINRIRRVRVWQAVEPMQIKEQTYKSKKEYKNYYYAKNAENTAFGFYKNKDGESAVIPRNLFEISTFSKPNSIKNLREVFENKIINKKGKSLDLYHVIVPGQKVLFYENNKEELKELDNVSNHLYFVRRLYQASRGNIQFQHHMDARDDKQLLIDFPEKNFGKKGINGFSKFTTDFVSPRLLLSPGNFNFIIEGKDFEMNLDGTITFNY

SEQ ID NO: 3612 - protein, 1390 aa, unidentified
  REGION 1..1390: note = Description of Unknown: Cas Enzyme sequence
MKRILGLDLGTNSIGWALVNEAESENEKSSIIKLGVRVIQFDNFVNAKTGKESKDPENDFKGGKGISPNAGRTLKRSAHRNLQRYKLRKENLIEVLIENGWITPITLLSENGNKSTFETYRLRAKAANEEVSLEEFARVLLMINKKRGYKSSRKAKSQDEGQLIDGMDIAKKLYNENLTPGQLVLQLLKSGKKSIPDFYRSDLQSEFDKVFDKQISFHPNFLSTEIKEELRGKKRDAIWAICAKKFQENGFELVGTKRKGSSTDQKTENYEWRVKGLTDKLELEEFVIVIQQINSQVNNSSGYLGAISDRSKELYFNKQTVGQYLIAQLDENPHTKLKNQVFYRQDYLDEFNQLWETQAKFHKQLTPALKEEIRDVVIFFQRKLKSQKGLVSICEFENRQVELVIDGKKKVKTVGLKVCPKSSPIFQEFKTWQVLNNLAVIDKSGAKRLLNQEEKDILFEELSLKDKLSKADALKLLYQNAKDLDLNFKEIEGNRTQAVLFKAYQRIIELSGHGDYDFAKLPAKESMEIVKTIFTGLNYNTDILEFDSSLEGNAFEKQAGYQLWHLLYSFEGDDSISGNDKLISKITELYGFETEYASIFANVTFQDDYGSLSTKAIRKILPHLKEGHEYSLACEYAGYRHSKKSLTREELNNKVLKEKLECLPKNSLRNPVVEKILNQMISVVNTSIDAYGKPDEIRIELARELKKSAKEREDTTNAINKTTAEHEAYRNILKNEFGLTHISRNDIIRYKLYKELEFNGFKTLYSNTYIPQEKLFSKEFDIEHIIPQSRLFDDSFSNKTLEVRSINIEKGNDTATDFVLKKYNEDGHTAFLNRIVDMYKAGKISKTKYNKLKMKIEDIPSDFINRDLRDTQYIAKKAKNILEELVTEVISTTGSVTDRLREDWQLIDVMQELNWTKYDKQGLTEIIENREGHQIKRIKDWTKRNDHRHHAMDALTIAFTKRSHIQYLNNLNARSDKTGSIYGIEQKELVRDCNGKLKFKMPITNFRSEAKKHLENTLVSIKAKNKVATRNTNVSKKQGGVNKKIQLTPRGQLHLETVYGSIQQYVTKEEKVNASFTLEYIEKIAKKAYREALTKRLAVFGNDPKKAFTGKNSLDKNPIYLDETNTAKVPEKVKTVSTETVYTIRKDVSPDLKIEKIIDVNIRKILSARLNEFGGDGKKAFSNLDENPIWLNKEKGISIKRVTISGISNAVALHEKRDKEGKLILDKNGNKQPVDYVNTGNNHHVAVYRDENGNLQENVISFFEAVSRINLGYPIIDKEYKSAEGWQFLFSMKQNEYFVFPNENTGFNPHEIDLMNPENYHLISPNLFRVQKFGSLLSGFWFRHHLETKVEIEKSLKGITYKVIQSARNLDSIVKVRINHLGQIVSVGEY

SEQ ID NO: 3613 - protein, 1465 aa, unidentified
  REGION 1..1465: note = Description of Unknown: Cas Enzyme sequence
MRILSIDLGQSSIGWLLRNTDEDGIEQFQKFGVLTFKKGVGEEKNVEYSLAAERTKYRSMRRLYQSRKYKLWGTLKKLKARDYCPIDEKALIEWTTYNKEKRLKRKYPIWDTHFENWIKLDFNEDGKPDFESPYQLRKYIAENELDLNDPKERYMFGRALYHIAQHRAFKSSKKVQLEEELKEETNVGAEKRKKEELKKEFEKNGLTLDEDKTIGQLLAEAEKFFKERGYGRIRNELHPYVTRKMLQQEVEKVFKFQFGDKWQQKFEEIFGVGKVSKCSIFWQRPLRSQKSSVGKCTLEKNKYRCPISHPQFERFRAWALINNIKYKIKNDEEFVSLSMEQKNKLYDEIFIKAGDFNFSTVRKWIMKEIQNENIILNYSDKTSIPGSPTIYYLTKILGENWESTQIKHNPVQRKRKSDNSQTYTSEKDYYTYEDIWHVAFQLDDEEEIEEIARNKFQFNDEQVGYYKQMFNKMEIGYAQLSLKAIKKINYFLRKGLIYTDAVLLAKIPDILGRDFYEEKEDFIIKSLKNIIESNRNKKTIISITNNLISEYKINHYHERDYAYIIKEDDIRKIEDACKSHFGNKSWENMDTDEKDNILEEVKKEFQAFFKDKNREYRKLPKIQDDLKTFLKNNFNFLSEKKLNMLYHPSAIDIYPKLTGKDKDPEDGKLYLKSPQTGSWKNPMAIRVLQELRQLINYLISTDQIDEQTKIVIEIPRELNDTNRRKAYEIWQKRKEEENKEFAIAIGELINNSPGMKANPNNDSDLDKFRLWYEQCFDSSTGEYTEKGPNELNQKKRKNKKGEAIEEDVFKENRFEKINAKTWFEIQKAKDNVLEKYRLWSEQKAVCIYTGKIIRLTDLFNENTIDIEHTLPYSRSLDNSLTNKTVCFKEYNRNVKKNLIPYECPDYEEIMERIKPWEDKVENIKKHLEFWKNESKKTNTKNRKDECVVQKHLWSWELKYWQDKVDKFKMKEITSGFVNAQLVETQLISKYAFHYLKTLFENVQVQKGEITAEFSKIIGLREKYKPKNRDKHSHHVIDAFILSLIPDSSRLKRILETNAEKQEIEKNIKDGVYNKNEIVTYMDKLNILDKELKQFLIEARIPVNYIHKITEKIENEVINISPVKHKIFAISKKKIKKGRLKGKYSTGDVVRGQLHKESFYGKIKLIKRDENGKPMRDPNTNEWIWETDKKGNTEYAFVKRVPVDENLDIDKIVDPEIKKIFKEKIEVEKQSLKEMKKQGGLFFTHPKTGKPIRIRHVRCYQKPTELLGIKKQTYPSRHEYKNFYYADNAENIYYALYEYKDDKDDKKIQRTFEMLNLFDAIKLKKSISIENIEDFFERTKEVGKGSKKSIAKLKAVLYPKQKVIFYKNSIEELKELTKNELSKRIYFIYALYGKTTGQIQFQHHLEARPDKDIKDPNNPSKKLIGFSSVDIDNLQPRYLLSPLSFNFAIEGKDFELKPDGEITWKF

SEQ ID NO: 3614 - protein, 1460 aa, unidentified
  REGION 1..1460: note = Description of Unknown: Cas Enzyme sequence
MKTVLGLDLGTNSIGWALVDTDEKKILGMGSRIIPMTQDVLDTFSGGKPLETQTAMRTNYRGVRRIRERHLLRRERLHRVLNVLGFLPEHYSKQIDFQKHLGQFVDEAEPKLAYDNRNFIFKNSFEEMLNDFKQSQPQLFYTKSNGKETKIPYDWTIYYLRKKALNQKIGKEELAWIILNFNQKRGYYQLRGEEEEENPNKLVEYHSLKILDVIADEKPNGKGEIWYSLYLENGWIYRRSSKIPLFDWKDKVRDFIVTTDLNEDGTIKTDKEGNEKRSFRAPSEDDWTLLKKKTEQEINQSNKTVGTYIYENLLQNPSQKIRGKLVRTIERKFYKDELIAILKKQIELQPELFTDDLYSDCIRELYRNNESQQLILSKRDFVHLFVEDIIFYQRPLRSQKTSIGNCSLEYRIYKDKNGNQVKEYLKTIPKSHPLYQEFRVWQWLSNLRIYRKEDDTDVTMEFLKNTEDKVNLFDFLMTQREVGHKDILKQLLTATLKEKFPNAKPAALNKEIDKEVVKYRWNYVFDDSKEKEEDKSKKYPCNTTGYEISRRLEKIENLPENFLTIEIERDLWHIIYSVTDKKEYISALGKFANKYSLDKESFISNFEKFPPFKSEYGAYSEKAIKKFLPLMRMGKYWNWDAIDTNTKNRIEKITTGEYDENIKIRVREKAINLTDISHFQGLPVWLASYIIYDRHSEADIAGKWNSVGDLEKYLEEFKQHSLRNPIVEQVVTETLRVVRDIWKQYGQGAKDFFSEIHVELGREMKNTADERKRLTEQVSNNEATNLRIKALLTELKENSDGKLSVENVRPYSQMQQEALRIYEDGVLNSKIDLPEDIVKISKSSQPSKTELQRYKLWLEQKYRSPYTGQMIPLGRLFTEDYQIEHVIPKSRYFDDSFNNKVICESAVNQLKDKQLGLEFIKNHHGEKVECGMGKVVEIFTEEAYQTFVKEHYAKSKKRQNLLLEDIPEQMIARQMNDTRYISKFISSLLSNIVRADKEDDGINSKNLIPGNGKITTTLKRDWGMDAVWNDLILPRFERMNQLTNTDAFTYWNDQYQKFLPVDYSPIDSKRIEKKRIDHRHHAMDALVIACMTRDHVNLLNNQSAKSETSRYDLQNKLRNKTKETWIDKKTNEIVERDVFKEFKKPWDNFTVDARNALETIVVSFKQNLRVINKATNYYQKWVEKNGIKVKETVKQEGTNWAIRKPLHKETVLGKVTLDRIKVPKGKILTATRKNVDTSFDLKTIGAITDTGIQKILKNYLTFKEGNPELAFSPEGLEEMNINIKQFNDGKAHRPIRKVRIFELGNKFSLGESGNKKDKYVEAAKGTNLFFVINEDKDGKRSYETIPLNVVIERLKQGLPPVELKGENDFYLTPNDLVYVPNEDEKENIKSLNPSEFVEEQRKNIYKVVSFTGNRLFCIPHSVGSVIANKIEFTQLNKIEFTKQKELMIKLKIDRLGNISL

SEQ ID NO: 3615 - protein, 1470 aa, unidentified
  REGION 1..1470: note = Description of Unknown: Cas Enzyme sequence
MIQNRVYVSRFDHNFLLPVTNEVYCLSQQKSVYMNKVLGLDLGTNSIGWAIRTVDEPDNQITHFGVLTFNKGVGVGKTGEFSYAAERTKKRSARRLYQARKYRLWKTLEHLINEGYCPLSIAELNKWRYYNKEEALLNKNGGRVYPLHNKLFDAWIKLDFNGDGVPDYTSPYQLRSELADRKIDLDVEQNRFKLGRALYHIAQRRGFKSSRKVAGENMPSEDAEEVVDLKKSEKKKNQEIIKLLEENPEAKTIGQLFALLERKNERIREKIAQHAIRENYKDEIKFIFSVQELGSAHPLYVKLVESGKNKNDGSIFYKRPLRSQKGLVGRCTLEPHKYRAPISHPAFETFRAWAFLNNIKYKVINDEGKDWKRLPLDLKQFLLKEKFLRKSRPYFSFAEIEEVVKARGFNWKLNYKSTTTIAGCPVSVHLKGIFGEDFLNVKIQKPKAPNTEKDYYDIEDIWHVLFSFEDQEFVSEFGEEKLRLDQEKTRRFVNAWNAIPEGYSMLSLKAIRKINRFLEKGLIYTEAVLLANLPEIIGEDKWAEKEEYFLEKIGFIISENRTQKSILAVVNNLISKHKNLTAIEKFGYKDNTYRLDNSDIRDIANTISDTFGKEKWEHLSSTERDRIFESVKDCYQAYFINSGLRRVDINGERHFEVHTNGCIYYKTDSGYYRMPKLIDTLADFLRDNFGLNEKVRDLIYHPSEIEIYPPAKPDKDGVLKLGSPKTGSYKNPMAMRTLHQLRKLINHLVEKGTIDSDTRVVVEVARELNDANKRWAIEAWQRQRENENKEFAEAIARLLKEEEGIQANPDSPADIDKLRLFSEQVDEETLPPVEQEVEQEDEKPSKKKKEKKRADAVFWTGMGKNLLDRYRLWKEQGCLCMYTGKVIPLSELFRPNIIDIEHTIPRSISFDDSMANQTVCYADYNRQVKRKQFPTQLVNYDKDYGKFKAILPRLDAWKDRVERIKQQIEFWQNNSKKALDKDTKDKAIRQKHLWKMELDYWQNKLDRFLMTEVTAGFKNSQLVDTQLISKYALHYLKTYFNRVDVQKGRIVSAFRKIYNLENVDEKKDRSKHSHHAKDAAVLTLIPVAAQRDNILAQYYEARENNLPFFLAPYKSFSRQHIVAIEDAVLINNSVKDQTLTPGRKKVRKRGKEQMIPGTNRIMWATGDCIRGQLHQEKFYGAIKRALRDETGKLLKDENGKILHEEEVTHVIREPFVFKKDDVSPGFKSLDDIKKRVVDPKLVRDIEDQVSKHGSLREAMAHGIYLLDKEKKPHGSPIRHVRVWANIKEPLKIKLQTNLSRKKHKQYYLAANATNSYFAIYEGEGKRTFELKNLFDIAKTKNQIPVSSVNDLFEARKIVSKGKKQIEMGLKYVLRSGLKVLFRKDEHENLKSLDVVELLKRLYVFTNFEKDGRLNFRYHLEARKDISEEYSDSEIDFEIPKPTLRFSYNKYDFLLEGVDFDVEMDGMLLWK

SEQ ID NO: 3616 - protein, 1421 aa, unidentified
  REGION 1..1421: note = Description of Unknown: Cas Enzyme sequence
MKRVLGLDLGTSSIGWALVNEAENCNEESSIVRLGVRVNPLTVDELQNFDKGKSITTNADRTLKRCMRRNLQRYKLRRENLIDILKENCFISEESILSENGNKTTFETYKLRAKSASQEISLEEFARVLLMINKKRGYKSSRKTKGNDEGQTIDGMEVALKLYNESLTPGQLCLHLIKSGKKHLPEFYRSDLQAEFERIWTKQKGFYPDILTDDLKEKLKGKNEKVTWAICRDNFKWSETVRVWNNDEAKNQDIIIEKTLTGIKREGNVQEQKIENFYWRSKAISEKLHPEEIAVVLSKVNSQINGSSNYLGAISDRSKELYFNKQTVGQYQMSVLEQNPNASLRNMIFYRLDYLNEFNTIWETQAKYHKKLNEELKQEIRDIIIFYQRNLKSQKGLISFCEFEKKQIEVEIEGKKKTKTIGSRVIPRSSPLFQEFKIWQILNNMIVSGKGKNSNKDKDDTNLHFMDNENRLSINGARELYQEEKELLASELSIKEELKKDEILNLLFNNPNGLDLNFKSVQGNLTQAKLFETYKTIIELSGHSLDLKKPATEIVKNVEEIFSGLGYQSNFLCFDSSKPLEEQPMFKLWHLLYSYEGDNSVTGNEGLINKINEICGFEKEYATILSNVVFQNDYGSLSTKAIRKILPYLKEGNKYDLACEYAGYKHSASSLTKEEIENKVLKEKLEILPKNSLRNPVVEKILNQMVNVINTITDIYGKPEEIRIELARDLKKNAKEREELTKSIAEATRAHEEYKRILTKPLSEGGQFGLTYVNRNDIIRYKLYEELRENGYKTLYSNTYISPGNVFSGDFDIEHIIPQSRLFDDSFSNKTLELKSVNLEKGNRTAIDFVKDKYGETGNDNSLENYLNRIESQFKKGVLSRGKYNKLKMQEKDIPEDFINRDLGDTRYIAKYAKTMLGDFVKRVVTTTGSITDALREDWQLVDVMKELNWDKYNALGLTYYEENREGKKLKRIVNWTKRNDHRHHAMDALTVAFTKDAFVQYFNNKNASFNPTSNEYALRTKYFFNNKAIPPMPLEVFRSQAKRHLENTLISIKAKNKVVTQNVNVTKKKEGNNKKIQLTPRGQLHLETVYGSQKQYVVKEEKIDSTFDQEKILTVAKPVYRDVLLKHLKIFDGDPKKAFSGKNSLAQNPIYIDEKQTISIPERIKTVSFETIYTIRKEITPDLKLEKVIDIRIRRILETRLKEFDNDSKKAFSNLDENPIWLNRQKQILIKRVTIKGISNAECLHEKRDKEGNLLLDAEGNKQFVDFVNTGNNHHVAVYRNENGDLQECIVSFFEAVTRRNLGLPVIDKTYRALYGWKFLFSMKQNEYFVFPNDKTGFDPNEIDLLDPENYALISPNLFRVQKFDKNGIKMFRHHLETSVKDENTLQETAWKRLSSLRGIDKIVKVRINHIGQIVLVGEY

SEQ ID NO: 3617 - protein, 1526 aa, unidentified
  REGION 1..1526: note = Description of Unknown: Cas Enzyme sequence
MKKILGLDLGTNSIGWALVNEAENENEKSSIIMLGVRVNPLTVDEQKNFEKGKSITTNADRTMKRGMRRNLQRYKLRRENLIEILKENGFITDETILSENGNYTTFETYRLRAKAVTEEITLEQFARVLLMINKKRGYKSNRKAKGAEEEGALIDGMEVAKLLYEKDLTPGQYCLQLMEQGKKQLPDFYRSDLQEEFNRIWAKQQEFYSEILTDKLKENLREKSEKATWTICKEPFNIVGIPRTTKGEELKKENFAWRTKALSEKLDLESLAVVLQKINGQINNSSGYLGAISDRSKELYFNKQTVGQYQMAVLAQNPNASLRNMVFYRQDYLDEFNTIWEKQAEFHKKELTEELKKEIRDVIIFYQRRLKSQKGLIGFCEFESRQIEVEIDGKKKIKTVGSRVIPRSSPLFQEFKIWQTLNNLEVSGKGRKSKKKKEHSLSLFTNQEDPLLIYGKRELYQEEKELLATELSIKEKLTKSDILKLLFDNPQELDLNFKEVQGNLTQAKLFAAYRDIIEQTGHILDLKKSASEILENVEQIFSGLGYNTDIIRFNSDTDNLDNDPMYKLWHLLYSFEGDNSKTGNENLINKITNLYGFEKEYAAILANITFQDDYGSLSAKAIRKIFPYLKEGNKYDISCEYAGYRHSASSLTKEELENKIYKDCLEILPKNSLRNPVVEKILNQMVHVVNAIIADPQLGKPDEIRIELARELKKNAKERQELTKSIEESTRMHKQYREILSKPPFNLSYISRNDIIRYKLYEELKDNGYHTLYSNTYISPTTLFSGDFDVEHIIPQSRLFDDSFSNKTLELRSINIEKGNATACDFVKEKYGETNNENSMENYLNRIEKLYKTGVLSRAKYNKLKMQEKDIPSGFIERDIRNTQYIAKYAKTMLNDLVKVVVSTTGAITDRLREDWQLIDVMKELNWEKYKNLGLTTEFTNEEGYRIRQINDWTKRNDHRHHAMDALTVAFTKRQFIQYLNNLNARRTDKNQSISNTEEEEYDNFAITTEDMLLNTRDVLGIEKNYLYRDHRNKLRFYPPIPLNDFRAEAKYHLENTLISIKAKNKVVTTNVNKAKNNVTTKITDKNGKQKVIKGQLVKTPRGQLHKETIYGSIKQYVTKFEKVGSDFNAEKIATVSKPAYREALLRRLQEFDNDPKKAFSGKNSLEKNPIFLDKACSKQLPEKVKTVSLETVYTIRKDLSPDLFKDSKKKDIFEKSFEQIDENLKGDEKEVMEIWSNTIDFIFDKRIRDKLVERYNLIKKDVEIFNKTANQKDKKKVLEEAFSKSSLEENPIWLNKEKGIAIKRVTISGISNAEALHDKRDKEGNLILDKSGKPQPVDFVNTGNNHHVAIYRKPVLDKNGNHAEDENGNKKYELEENVVSFYEAVSRRNLGLPVIDKAYKASEGWQFLFSMKQNEYFVFPRTEKVEKIDEETGEITEEEIVVFDPNDIDLLNPDNYKLISPNLFRVQKFSFKNYVFRHHLETTIKDTSSVLKGITWTDFRSSKGLDKIVKVRVNHIGKIVSVGEY

SEQ ID NO: 3618 - protein, 1445 aa, unidentified
  REGION 1..1445: note = Description of Unknown: Cas Enzyme sequence
FFLEKIFTYLIMNKILGIDLGTNSIGWALRNPKISGNQIEKFGVVTFNKGVGIGKTGEYSFAAERTQKRSTRRLYQARKYRLWKTLEELINQGYCPLSIEDLNKWRHYNKEEALEHNNGGRVYPVNNTSFNNWIKLDFNKDGIPDYTSPYQLRKELAEVKLDFSLEENRFKLGRALYHIAQRRGFKSSRKEVDDVKEKENEEGGEIELQASEKKKSKLLKELYPDFDPSIPIGVFLANKENEGKRVRLDITQYLVRENYKDEIKYIFDFQGLSTEHSLYLKLVESGKNRNDGWIFYKRPLRSQKGLVGKCSLERNKYRAPISHPSFEIFRAWAFLNNIKYKEGSEWNPLPLELKQDIYKDKFFRKSKAYFQFSEIADFIKAKGKNWELNYKPKTTVTACPVSARLKDIFGENYLKIKIPKAQAVKSDKAYYDIKDIWHVLFSFEDQESVAEFAEQKLHLSPDKVKQFVAAWNTLPVGYGMLSINALDKINAFLQKGLIYTEAVLLANVPKIIGQDLYEKNESEIIQGISNVIEENRRQKSILTIVNSLISKHKNLEADETFGYKDSTYTLKDSDIKELYGAIEEQFGTSKWNALSEDKRQDIFNTVRDCYQAYFTSRGLPLRYINDERHAVVQSGGKHYYKTDSGYSGYYRLPKLADSLGEFLQSHFTIEDNLLSKIYHPSELSVYQPAQTDSNGVLKLGSPKTGSFKNPMAMRALHELRKLLNYMIESGQIDSETRVVVEVARELNDANRRWAIEAWQRQRESENQEFECAIQQIKGGDTTAQVKVQESDIDKMRLWYEQNEEEAIPPIASGKRDVKGIKWSDNKKDSFKKIAAQKSLIEKYRLWKEQECQCIYTGKIINLSDLFDENIIDIEHTIPRSQSFDNSLSNLTVCYASYNRTIKKNQIPTQLNNYEEDFGGYTAIKPRLKRWEDKVERIKQQIDFWKTKSKRAVDKSSKDDAIRQRLLWEMELDYWQNKLSRFTIKEVTSGFKNSQKVDTQLISKYAFHYLKTYFEKVDIQKGLITAEFRKIYGLSMENEKKDRSKHSHHAKDAAILTLIPVAAKRDAILEKYYDSIERRIKFTDYLPYKGFDRAHIMDIDAKILINNITNNQALTPAKKKVRKRGKEQFIPGTNKVKWATGDCIRGQLHQETFYGAIRPAKRGENGSLLKDDTGQFIQEEKVKYVVRVPFQYKKDSNSPGFKTLEEIQKCIVDEGLKKDIEQQVKEAGGLKEAFEKGIYLLDKYGNPHGNKIRHIRVWANVTEPLPIKKQTNLSRAEYKQYYWAANATNSFFAIYEGEGKKDFDYRNLYETAQLLSRNGVTTPEELFEKSIQVIKGKKTSELYLKYVLKAGVKILFKKDEEENLKSLSLMELQKRLYVLTNFEKDGRLNLRFHMEARNKIEEKYLESELDLISPKPTLRFGYAKYDFIVEGYEFVVKPDGKIDWRI

SEQ ID NO: 3619 - protein, 1329 aa, unidentified
  REGION 1..1329: note = Description of Unknown: Cas Enzyme sequence
MFLIVISFRGKSTKKQSKSRMNTILGLDIGTNSIGWVLLRENQILDRGVNVFPIGTNLIKGVQEETKNHQRGGYRRAKRNLFRYKLRRKQLKKLLQPLGFLPDFSESNKVKKTYQASLLYELRAKALNTQIPAKEIGRIFLLINKHRGFKSNSKAIIELDETVQKEEGKVKDGISQLERLMLENKAKTVGEYFHKMYEKALNLYNEGKWHNIDEPYDERAINEEGEFNLQNNRGIRRENGRYVARAMYEKEFDLIWDKQKEYYPQLTGSRKEYDEICLLPIEEKRICLKTFKETLYWKIKSETIFYQRGLRSQKKFIGKCNYESTKRTAPISSPLFQEFRILKQLADVRYSDKENDFYNQSLPSEWRLKLVDYLNCNSKLNLREGKKKKDGTKTIDIMDVLGLSKKKNYEFNFDNTDDDKTFEGNKTYYAIHNACGEELFMKLKSENKLEKLWHILYMAKDDEWLKDTLLFSWGFSETIALKLIEMGLEDGFASYSSKVLKKIMPFMREGKDEFDSKVLAGYEKAPDEVKDAIILSPKIRQLKNNELRNPVVEKAISQAIKLVNAVIQNSNYAINQEKFTIRIESTREFKKPKTEREKIRRGNTETDKKREALAAFLNEKRKNNSLSVNREIYKNDSIISKFELWLEMGMDKEDATFNSFRLEGKASEKHKLWLECNRICPYSGKIIPLSKLFTSEVEIEHIIPYSRSLDDSFTNKTLTFSDINKKKANKTAFEFIKDQGEIAFKEFKARINSFENKQKIKGRFLLENVASDFSNAQLNNTSYIAKYVRKKLQEVCRDVQFTNGSATGELRKNDWQLGNLLDKIRYEEETGINIDAYISEFNVYKKDFEVWRRKKNNSTDLQRVNWKELDTDVVAEYEQESKNPITDWWRAIRKFDDFRSAKGKKDRSDHRHHLLDAIITSCCSRNIIQQLSTLNATREQQGISLYDEKGRLTRAKIECPLSYDQIKSALKDNLIYHQSEKRLLTSKINKTKKLKDSKSDSSFNKKKTYSVRGSLVGDNFYGKLKNPRHQGFDKDTVFVKRVSLNGQEFKNIKSLDKIIDLNVREVLKRRLENPLYADNGEKAFSDEALLKDPVYLYSVNKYPSGIPVAPLSNAGKPLPIIKKVRIANKNARNLIQLPAKSEDRGVDGKRKIINQNRYAETDGNYVMALYEGKDEEKKGKVKTKRDFEILSFFEAVRRKEQGEKLFPDEKLQKDGSSISLLKGCPYLKQGDMVVLYENQETEINWDDLRDLKKRLYRVSQLSSKIVSKIYEFGDIFLVKHNVTSANAKYESVSFSLNEEIKHIQNSHVQFKGIKVKLNNLGRITKTWND

SEQ ID NO: 3620 - protein, 1253 aa, unidentified
  REGION 1..1253: note = Description of Unknown: Cas Enzyme sequence
METKKILGLDLGVTSIGWALIEEANDRKRILGMGSRIIPLGTDEKTEFSTGNKISKNQTRTTKRTQRKGYDRYQQRRANLTRVLLENKMFDEHLFKLSSIELWGLRSKAVKEKISLTELGRVLYHLNQKRGYKSSRSDANLDKKDTDYVAAVKSRHQELKDTGLTIGQKFYKELGQNEYYRIKEQVFPREAYIEEYDAIMDEQSKHYPSCITKGLINRIRNEIIYYQRPLKSQKGLVNICEFAGFETKDKSGKTVFVGPKVTPKSSPLFQLCKIWETVNNINLKVKNNEVSKYKWLDWHPTIEQKRAIVAYLNENEHLSFTELLKIIGFKKENVYANKQIVNGIKGNTTIALLKGIIDGSYLQFNVEINTKDITKPLVDKKTGEILSEELDYEISASFEQEPLYKIWHTIYSIKEEESCQQALMEKFGFTKEIASSLVKIDFTKQGFGNKSSKAIRKILPYLMRGHVYSDACEFAGYNHSNSLTKDERQKRVIAERLELLAKNSLRQPVVEKILNQSINIVNAIIDHYGKPDEIRIELARELKQSKDERNETEQRNKANERLNSEIASRLNELGLPSTRRYIQKYKFIFPSQSRNLKDAHVENTCIYCGKAFSIAEALTGDNFDVDHIVPKSLLFDDSQTNKVLVHRSCNAAKTNQTAYDFIAKKGERELQAYIERVDEWFKRGILSYSKMQRLKVSYEEYLERKSRKKQTEADIKLWESFIDRQLRETQYIAKKAKEIFEKICYQVTTTEGSVTAALRRLWGWDDVLMNLQLPKYRELGLTQVKEWSSDHGRKIHQKEEIIGWTKRDDHRHHAIDALVVACTKQGYIQRINTLNSSDVKDAMRKEIIEAAIIFDEKRNLLEQYLIKERPFNTAEVEEHASRIIISFKSGKKVATKGIRKVKINGIKKVVQKDIIIPRGALSEESVYGKINTIDKNKHIKYLFENPHKIANPRIKTLIENRLQQFDNDIKKAYQSIKKDPIITQKGIKLEFGDCFKEEYVIKYPLQSLKAKDIDFIVDKGVREIVRKHLEKFHNKEKEAFKEPVWFNKEKQIPIKTVRSFTGLSAVEPVSKDKKGFNIAYVKPGNNHHIAFYTDESGKKIHHLCTFWHAVERKKYGIPVVIKNPKQVWDFTINSNKIPDTFLDKLPFDKWQFIESVEVNEMFLLGLSKESLNELVMRYDIKRLSYHLYRVQKISVKKVNNQIDMTFRHHLETELNDSNDAKLSKRFLNIQSLKAFDDLNPVKVRVTNIGQIIF

SEQ ID NO: 3621 - protein, 1382 aa, unidentified
  REGION 1..1382: note = Description of Unknown: Cas Enzyme sequence
MKKILGLDLGTTSIGWAFVREAESENEKSSIERIGVRVNPLTTDEQTDFEKGKTISSNADRTLKRGARRNLDRYKQRRKNLINVLLKANIIIKETVLAENEKNTTHSTYLLRAKAATNEIAKEDFAKVLLMINKKRGYKSSRKAKNEDEGQIIDGMAVAKTLYDENITPGQYCYQILKQGKKYLPDFYRSDLKAEFEKVWTTQRKFYPEVLTDELKKELNDKGQKATIAIFISKAKIYAAENKNGTKDEKRLKLYEWRSKAITGQLKIEEVASVITEINNNLNSSSGYLGAISDRSKELYFNKQTIGEYLYNQLKYNPHTRAKGQVFYRQDYLDEFDTIWETQAKFHKELTPELKAEVRDIIIFYQRKLKSQKGLVSFCEFESKTIEAIENGKAKQKNIGYKVAPKSSPLFQEFKIWQNLHNVKAQNKITKEILLLNDKAKQDLFFELNIKGNLDKKYIVEFLGYKNNEWELNYSSIEGNRTNKALYDVFEKIIQAEGSEEIDFASISASQIKSIVQDFLKVSNIDTYILEFNAELQGKTFEQQSSYQLWHLLYSYQEDDSKTGNEKLIQLLQKKFNFKKEYAQMLSNISFQQDYGNLSAKAMRKIFPFIKEFEYSEACEKVGYNHSSSKTKKENDERILKDGLTILPKNSLRNPVVEKILNQMVNVVNAIIADTTLGKPDEIRIELARELKKNAKERAEMSTNINAAKTLHDGIIIKLQNEFGIKNPTRNDIIRYKLYDELKGNGHHTLYSNTYIPQEKLFSKEFDIEHIIPKSRLFDDSFSNKTLETRFHNDKKGDDTAVDFIERFFGVDGLDQYKKRIEMMFKLKENPISKTKYKKLLMKGSEIGKGFIERDLRDSQYIAKKAKSMLEEICRTVVTTTGSITDRLREDWGLINIMQELNFDKYKKLGLIETIEMKDGNTKERIADWTKRNDHRHHAMDALTVAFTKHNHIQYLNYLNARKDESSKMHGNVIAIESKETEMVTEDNGNKKRKFKLPVNNFREEAKKQLENVLVSIKAKNKVVTKNKNKIQTNNGEKVKTELTPRGQLHKETVYGKLQQYATKLEKLGAKFDEETILKVAKPKEREALLKRLKENNNDPKKAFTGKNSLDKNPIYLDIEKKIKLDEKIKLVVLEDDYTIRKDVTPGLKIDKVIDVGIRKKLEKRLEEFNGNSKEAFSNLEKNPIWLNEEKGIVIKRVTISGIKNAEALHTKKNHLGNEIFDKDGKHIPIDFVSTGNNHHVAIYQDNEGNLQEKVVSFYEAVARAKQQLTVIDKTYNEHLGWKFLFTMKQNEYFVFPSDGFNPKDIDILNPKNYSLISKNLFRVQKIATKNYMFRHHLETNVEEKKELVNLAFINIRSTNPLKNIIKVRINHIGQIVKVGEY

SEQ ID NO: 3622 - protein, 1511 aa, unidentified
  REGION 1..1511: note = Description of Unknown: Cas Enzyme sequence
MSKKILGLDLGTNSIGWALIEKDKEKNEGSIIAAGSRILPMSQDVLGKFDNGVSISQTAERTEFRGIRRLRERHLLRRERLHRVLNILGFLPDHYKQQIDFEKRLGQFIPDTEPKLPYTFNSITNKFDFIFTTSFKEMVDDFAIHQPLLLENNKKIPYDWTIYYLRKKALIEKIEKEELAWLLLNFNQKRGYYQLRGEEEEEIPNKLVEFYSLKVISVIATDDKKANDETWYNVNLENGWIYRRTSKTFLNWTGKTKEFIVTTDLNEDGTIKTDKEGKEKRSFRAPAEDDWTLVKKKTEYDINQSDKTVGAYIYDSLLENPNQKIKGKLVRVVERNFYKAELQKILQTQLTFHPELSDNNIYQLALEELYENNEAHRNSIIEKDFTHLFLNDIIFYQRPLKSKKSLISNCKFETRTFIKDGKKEIQPLKCIAKSHPLFQEFRLWQWLQNLKIYEKETDKNVTDELLKSEEDWITLFDWLNDRREVDHKALLTFLLKPLKLQPANYRWNYVYDVVKDESKKYPCNETKTQIQTRLSKTKNVPANFLSKEVEENIWHILYSVEDKDDIQKALTTFAAKNNLEDDFIQNFRKFPPFKKEYGSYSAKAIKKILPLMRIGKYWDENDFHPETIERINKLITGEYDETIRNRVREKSIHLNHLKDFKGLPQWLTSYIVYDRHSEEGEIVKWKTVSDIERIEQHSLRNPIVEQVINETLQIVKDIWLQHGNGAENFFDEIHIELGREMKNPADKRKDMANQISENENTNLRIKALLVELLNEGNVENVRPYSPMQQEILKIYEEGVLSAADGNIPDDILKISRQAQPSSSELLKYTLWLQQKYRSPYTGNVIPLSKLFTRDYDIEHIIPQSRYFDNSLSNKVICETEVNKDKDNLLGFEYIKANYGKIIELTGGRPPAKIFSVEEYEKFVKDNYSKSRGKMKKLLMEDIPEAFIQRQLNDSRYISKVVKNLMSNIVREDGEQESISKNVIATNGTITSILKQDWGLNDIWNEIITPRFERLNELTKSTNFGEWTNKNGKKVFQTQVPMELQKGFNKKRIDHRHHTLDAIVIACASRSHINYLNNESALGKKSKEEKDKKRYDLKHALCFKKYNDDTKQNYKWMFHKPWDTFTQDSKETLYNIIISFKQNLRIINKTVNHYQAWKKDENGKLKKELIKQTKGDNWVVRKPMHKDTVSGLVQLKFKKIVSLSTAIDSLEMIVDKTLRNKIKELVALNYDKKKITKFFKDIENKWMDNDISKMEIYYWDKDNVASRVRIDESFTSIKILSITDSSIQKIMLKHLQKYNEEKNGKVIEHPELAFSADGLDEMNRTIKILNGRPHYPIYKARTYETKGNKFNVGQTGDKKNKYVEAAKGTNLFFAIYSDANGKRSYDTTPLNIVIERQKQGQKPVSETNEMGHQLLMYLSPNDLVYLPTEEEREHNRIDFKKFDKEKMKNIYKIVSFTGNRLYAIPYSISKSIVDKVEFTQLNKLETSLEKKSIKDICIKLRVDRLGNIKSLL

SEQ ID NO: 3623 - protein, 1516 aa, unidentified
  REGION 1..1516: note = Description of Unknown: Cas Enzyme sequence
MTKQILGLDLGTNSIGWALIEKEDHKANGNIIAAGSRIIPMSQDILGKFDSGVSISQTAERTNFRGIRRLRERHLLRRERLHRVLKILNFLPEHYATQIDFEKRLGQFIPETEPKLPYIFHKENNRSEFVFKTSFNEMVKDFSLHQPQLLENDKKIPYDWTIYYLRKKALTDRIEKEELAWLLLHFNQKRGYYQLRGEDEEETPNKLIEFYSLKVIDVIATDDKKGDEVWYNVHLENGWIYRRTSKVFLDWVDKIKEFIVTTDVNDDGSIKTDKEGKEKRSFRAPAENDWTLLKKKTEFDIDKSHKTVGAYIYDTLLQKPDQKIKGKLVRVIERTFYKAELEIILKIQQQFHTELQNKKLYQLCLEELYENNEGHRKSIGAKDFVHFFLNDIIFYQRPLKSKKSQVSNCKFESRTYIKDGVKQIESLKCIAASHPLFQEYRLWQWLQNLRIIEKETDNIVTTQFLNTQETWVNLFEWLNERKEIDNKALISYLVKPLKLKANDYRWNYVYDETNDSKKYPCNETKAQIKSRLAKCKNIPLDFLNKEKEEALWHILYSVEDKFDIEKALKTFAAKNNLEDDFVENFKKFPPFKKEYGAYSAKAIKKLLPLLRMGKYWDESNFHQQTKERIEKLLSGEFDENIRTRVRDKTINLNTVNDFSGLPQWLASYIVYDRHSEDRETKKWKTPADIEKIEQHSLRNPIVEQLINETLQVVKAIWLQHGEGKENFFDEIHIELGREMKNPADKRKQMTNQINENENTNLRMKAMLMELMNDGDAENIRPYSPMQQEILKLYEEGVLNGIDIIDDDILKISKQAQPSSSDLKRYILWLQQKYRSPYTGEIIPLNKLFTREYDIEHIIPQSRYFDDSLSNKVICETAVNEDKDNLLGYEYIKGNYGKTIELSSGRNVKIFTVDAYEKFVKDHYSKSRSKMKKLLMDEIPEAFVQRQLNDSRYISKYVKNLMSNIVREYDEQEAISKNVIACNGAITSILKQDWGLNDIWNELITPRFERLNKMTNSPNFGEWTNKNGKQVFQTQVPIQLQKGFSKKRIDHRHHALDAIVIACASRNHINYLNNESALGKATKAEKDKKRYDLKHALCTKKFNTGSTENYKWILNKPWDTFTQDVKNTLYDIVVSFKQNLRVINKTINHYQAWKKDEDGVLTKELVKQTKGDNWAVRKPMHKDTVSGLVNLRFKKTVQLSAAIDNWEMIVDKSLRLKIKKLTEQENDKKKVIKFFKDINNTWLDMDISRVEIFYWDKENVASRVSIDESFTSIRIKSITDTGIQIIMLNHLAKFNENKNDKTIEHPELAFSSDGLDKMNKSIEELNDNIKHHPIYKVRTYEPKGNKFNVGYTGNKKDKFVEAAKGTNLFFGIYANDKGKRNYDTIPLNIVIERQKQGQQSVPETNEVGHKLVMHLSPNDLVYVPSEEEKVQNIKIDFEKLDREQRKRIYKMEKASGKECYFIPISIANLIVQYDAKLKFGEFGSQNKLQTSLEGIKIIDFCHKLKVDRLGNIKSANL

SEQ ID NO: 3624 - protein, 1423 aa, unidentified
  REGION 1..1423: note = Description of Unknown: Cas Enzyme sequence
MSTILGLDLGTNSIGWAIRDIDSEKDDQIVDYGVVVFKKGVGEGKSGEFSLAAERRMNRSKRRLYNAKRYRKWATLLELSKNNMCPITEEELRLWSIGNWQDGKNRGRTYPTSPDFIAWLAMDFENIGKESDADVKLKPAYTNTYALRSDLLENKDEDDLLRSYKIGRAFYHLAQRRGFKTSRKNGKSNFGDNELFKKFRETHPNKADWKPSQIYLYVQSGQDPDPELRRERIRNNAVIQRDLNIAEFEAICKKQDIGEGIIKKIYHAIYFVRPLRTQKGLVGKCTLEKGKTRIPISHPAFEEFRALAFINNIQWREAGTRKSFAPIPIHLKKQILEELFFRRYERGKNKGKVDDSGSVAFEEIIHRFSENGKWEFNFKNKPSISTCPVIAGLMNIFDEEWKDKFIIDKNSFGINWEGLLLAYNITYNGSIVKVKKLNYEEIWHLLFDYLQTKDDDSGLASFCKEVLGWDEEKTAAFADIAISQGYGSLSKSAIDKIIPFLQQGFLYSEAVSFANLSKVLGKEYFQDNKAAITASIAGTIKNIDARKEKLNIVNGLIQAYFAEATTNRAKGFNGTLEEINAYKAEVIHKLINYFGEGNWNEKSNGERNGYTEFVLDKYLTFLSGKQLKEEKASAGINKNPEIDYYKLPRLDESIKQTLTENFNATESGLKKMYHPSDIDIYPKAKNNWLEDPNPPSKGWKNPMAMRTMYELRKLINYLLEVGKITIETKIVIEMARELNDANKRWAIQTYQRYREDENKEFAKAIIGVAKEKYPNINENDADNIDKVRLWWEQLDNGEEVYKTIKALKEDVDKYRLWKEQDCQCIYTGKTINLTDLFDGISFDFEHTLPLSQSFDNSLSNLTICHAEYNRTIKKNQMPTKLANYAQEANGYPSIEPTLKKWKDKVVALKQKIEKNKLATKGAIRSGDIARKNELVQQRHLDQFAFDYWDKKVQTFTLTELPNWWKNSQLVDTQIITKYARAYLKSLFTKVDVQKGSITAEFRKIYGIMGDEKKDRSKHSHHAKDAAVLTLIPGSAKREDILRKYYEAIENRRKYQETPYLHFDISHVLKIEDTILINHVTKDQTLSETKRNVRKRGQVVFKKDEKGEFIKDEEGNKIFLVTQGDSIRGQLHKETFFGAVKVPERNSNGFAIKENGKYLLKQKNEQDEVWIVVRKAIEAINIDKDIILDEVLKNHIKEQIENGKKINETVDFNNKSIRHIRCRVKAGVGFLSQEKAIELRRHSHVSKHLHKQSVLVQNDSNYLYLVYELQTEKKLERADRIINLFEISALKSFLNLTSYLDLFKEKEFNVLQKGKSELPLKYIIRNGDRVIFFIQHKEELKGLSNAAINSRIFKVNKFNEQTTGYLYLQNHLEARPDSELGEEEIAFDITRYQPRLKLKINKLNCVVENYDFKINSDGTIKWLL

SEQ ID NO: 3625 - protein, 1250 aa, unidentified
  REGION 1..1250: note = Description of Unknown: Cas Enzyme sequence
MKKILGLDLGVGSIGWALIETTDDNKPQRIIDIGVRVVPLNDDNDSNKFTRGQDITTNIDRTQKRTARKCYDRYQQRREALTEMLKKNGMMPDSNLMALPVLDLWQLRSNAVTEQLTLPEIGRVLYHINQKRGYKHAKDENGDDKKQRDYVAAINERHKELKEKGLTIGQHFFSKLKESEYINDDGRKSYNYRIKEQVLPRQAYEEEFDKIMACQKQYYPTLLTEDFINHIRNHIIFYQRKLKSCKHLVSVCEFERRCFYDRDGNVIRDKSGNIVYDGPRVAPKTSPLFQLCKNWEAVNNIHFRNRRNDELFISREQRKAMVDFLETRELLKLQDIYQILGITKKDGWWAGEAVGRGIKGNSTRIALANALSLEPNAEELLRFNLKYEESKKVDEETGEIKMKVSSSFQDEPLYRLWHTLYSIKEKEELSVVLKNKFGIENEETIQKLYDIDFVTPGYGNKSSKAICRILPYLQEGLMYSEACEYAGFRHSESLTSEENNRRELMKKIPNLQKNELRQPVVEKILNQMINIYNGLSDESMYGKIDEVRIELARELRQSKDERKKSSLENSKREKDNQRIIKLIQEEGVRPSRNTILKYRLWEESNKLCFYCNQPIGVKYFLEGSDAEREHIIPKALLFDNSFSNQVCACRNCNKEKKNRTAFDFMRTQLGFEDYLQRVNTMFLDKRISKAKHEHLLASYEDYIQRKKNGKETEEDKLLWEAFIDRQLRLSQYIAKKAQDILFQGCRNVWSTSGSVTDFVRHIWGFDTVLHELNLDRARMAGQTEIREIEHKGQQSQKESIVNWSKRLDHRHHAVDALAIACTKQSIIQRLNNLNASREKMSDEINTPKQEWHDEYNLLEEWVKEQQPFSHKEVVDAVSGIFISMKAGKKVVAPSKRKVFKNGKPKTVQTNILVPRGALHEEQVYGRIQQYAKTNGNTCKENRIVFKYKLGVGGMGFVFNGKETIAVVKDKKTGELSIIDDLKKSLNYVVDHGIRKILKDRLNEGFPENTTYLTNAELALAEGKTYDGTSDAQKALDKLRNLTEKPLYFNKKQHTIIRSVRCFTGLSAVQPVRYKDGKPISFVLTKNNHHSALYVDSQGKIHEMITTFWHAVERKKYGIPTIIQHPSEVWDDILQKAVDLPEEFLKLLPQQDWTFVQSFQQNEMFILGMSDEAISDALNSGNKAEISSHLYRVQSISNGDYWFRLHTETMNDKTPSAKQSMKYIRIKSISALQQQNPYKMRISVLGKIINS

SEQ ID NO: 3626 - protein, 1612 aa, unidentified
  REGION 1..1612: note = Description of Unknown: Cas Enzyme sequence
MAENKIISFDLGSNSIGATIRNPFEEEQFEKAIVVTFDTGVGKDKENKYTVSLAANRTSKRSVRRLYQSRKYKLWSLLEALIQDRGNLYCPIQPESLRRWKHYDKEQAQKGNGGRQYPVDDIAFNNWIKLDFNNDGIPDYISPYQLRHELAINKLDFSKEENRFKLGRALYHIAQHRGFKSSKIVKNKDDEKESKNGELTSDAAIESAIGAERKKQERFYDEVAKLNFTINREEDTVGSIFALIENKGIHHHERKTEGLRIRKELHQFVTRKLLIKEVKKIFEFQDLDFGSIFKDKKGNSVAIHNSTIFKQRPLRSQKGLIGICTLENKLLEVKDSKGNIHLKQVGKKRCPVSRPEFEEFRALGLINNIASKRKNDKNAAWEFLPQEKRDELYKGKFFVQKDFGFEDIYKYTPLLEWLNQKYGKDNWELNYNYKTNVPSCSISTRLQKILGSKWNENVLKKDRNGKEILIIHADQDGTVLKQYPLMQPYFEDVWHVLFESDDEDFIKAYAQKHNLDENALVNLWYAMPVAYAQLSLKAIKNILPFLREGYIYTDAVLLAKVPEILGAKLWDENKKLITESLKTEVIAKNRDEKRIFNIVNNLIAQFKASKKKELKDYIVGSLDHLLPEKSKERDSIKILTAIEDGFGKETWKSVPEEGKEKIIAEVTNYYQQFFNTTERAFYSLPRLGDAMKKFICNKFESQFEEGIERNSFLERIEKLYHPSMLDIYPKAKAEYYKQYGIEKQMVLLGSPKIGAWKNPMALRTLHELKKLTNYLIATGEIDEETRVIVEIPREGTLEDTNKRWAYETYHRMREEENKEFAAAILELVKREGINASPDNDSDLDKFRLWYEMLDSAEGYDKSNKFISVDEDRAYGEVKKKTNKQGKKKAEFENEEQEEERYYIFSENHFDKIKKEVWLKLKKAKDNVEERYRLWKEQQCFCIYTGKPIKISDLFDANLIDVEHTIPRSMSFDNSLANKTVCYADYNRNIKKNKIPADLGDDYIGIKQGIAKWEQKVKDLEVRVEFWKGKSKQASTKDYKDNCIRQKHLWQFELNYWRNKVERFTMKEVKAGFRNSQLKDTQLISKYAFHYLKSYFNKVDVQKGEVTAEFRKIFGIQKTDTPKDRGKHSHHAKDAITLSVIPVAAIRDRMLEVWYKIKEQKKLLQSNTEKDKSAIEEEIKQLEEELNQLKIQCFPKGLNKLNNTINKLDETLLINNIARNRSLLPASKKVKVKGKLRTATGDAIRGQLHKDSFFGAIKLVKKDKNGKWIKNEKGEFEFEPIKYVIREELVYKVNNQSPGFKDLADLKKQIVDKDLFTIIEKQVKNFYNGDFKEAVKQGIWMLNKKGERVNKIRRVRIFLSVREPLEIKQQSNINLSTSKILPDRKHKQLYYAENGRGANILCALYQKTTKNKKSGEEKFDRVLEIVSLKEAADLLKMGLINKIEDIENSLYRKDNKGNILIDETGNKEKPYAILKPDMKVIFYDENIDELKKKNNETDFDYNKRISYRTYKIVKFTGGRITFQHHLEARNDKELEKAYPEKNIFKINEKNKEVAYGGMGTSGFTQKVSDALKYNSYNNYEPWPKLLYSVDWLNMAIEGKHFDIKPDGTINLKF

SEQ ID NO: 3627 - protein, 1505 aa, unidentified
  REGION 1..1505: note = Description of Unknown: Cas Enzyme sequence
MKNILGLDLGTNSIGWAVVNGSVNDNGSEQLVKIQASGSRIIPMDAAMIGDFNKGNSISQTAERTRLRGIRRLSERYLLRRERLHRILDILGFLPSHFAQDLDRHGKIVKGKEPKLAWRKNEAGQFEFIFQDSFKEMLEDFKLNHPNLITDDKKVPYDWTVYYLRKKGLTSKISKEELAWILLNFNQKRGYYQLRGEEEEENNNKLVEFYALKVVAVEDSGEKKGKDIWYNVHLENGWVYRRTSNMPLDWVGKTKEFIVTTDLEKDGTPKKDKEGNVKRSFRAPKEDDWSLVKKKTEADIDQTHKTVGTYIYDTLLGNPSQKIRGRLVRTIERKYYKEELKLILDKQKEFHPELQDRALYAACVEELYTINEAHRNNIGNRDFTYLFLEDILFYQRPLKSKKSLIDNCPYEENHCLDKETGEIKSFPVKCIAKSHPLFQEFRLWQFIVNLRIYRKGLAQDVDVTNELLKTEEDYVALFDWLNGKKEIDQKAFLKYPLFGLKKEVENYRWNYVQDKPYPCNETRSSMLARLEKCDISIEFLTKENEEALWHILYSVEDKNEIVKALQKFADKHDLNASFVDVFRKFPPFKKEYGSYSAKAIKKLLSLMRMGKYWSENSIDKGTRERIDKIITGEYDEKIENRVREKAIHLADVSDFRGLPLWLVCYIVYGRHSEAKEITQWKSPADIDSYLKSFKQHSLRNPIVEQIIIETLRVVRDIWKQVGNIDEIHVELGREMKNPADKRKKMTQQMSENENTNLRIKYLLTEFLNPEYEVENVRPYSPSQQDILRIYEEGVLNSVSDLPEEISDILKKFTETDLKKRPSRSEVLRYKLWLEQKYRSPYTGEVIPLGKLFTSAYEIEHVIPQSCYFDDSFSNKVICEAEVNKLKSNLLGHEFIVKHHGEIVELPFGKKVRIFTVDEYEQFVKDNYSRTRGKMKKLLMDDIPEEFVTRQLNDSRYISKVVKSLLSNIVREKGEEEAISKNIIPCTGGVTDRLKKDWGINEVWNKIILPRFQRLNELTGTNKFTTKNVGIQEIPTMPLELQKGFNKKRIDHRHHAMDAIIIACANRNIINYLNNESATAKAELSRYDLQKLLCDKAKTDNNGNYKWVIRKPWASFTQDTYLALENIIVSFKQNLRVINKATNHFLHYNEEGKKIFVKQGKGDNWAIRKSMHKDTVFGEVNLRRIKTVALNEAMKNPQSIVVKDFKRKLLELWNLGFDAKRIKKYFEDNRETWSDINLSKIEVYYFSKDTKDRFFATRKPLDTSFDRKKIENNITDTGIQKILLRHLELKDNNPDIAFSPDGIDEMNRNIIQLNNGKYHQPIIKVRWYEQADKFAVGQTGNKSSKFVEAAKGTNLFFAVYESNILDKKTNTTIIKKRNYATIPLNVAIERQKQGLPVAPEDENGNDPIFVLSPNDLVYLPTAADLANGIIAQPLDRGRIYKMVSCTGNEGHFIPARIANPILQTIELGSNNKAQKAWTDEMIKEICMPIKVDRLGNVLESSSSYKK

SEQ ID NO: 3628 - protein, 1528 aa, unidentified
  REGION 1..1528: note = Description of Unknown: Cas Enzyme sequence
LGKIYKAMKPKHILGLDLGTNSIGWAVINASKNEEDKEQLDGINCDGVRIIPMDASVLGDFDKGNSKSQTADRTKSRSVRRLYERNKLRRERLHRILDLLGFLPSHYSQQLDRYGKFITGTEPKLPWYKNEQGHWSFIFQDSFDEMLADFYQKHPDFISKGQKVPYDWTIYYLRKKALTQKVNKEELAWILLNFNQKRGYYQLREEEQQERLSKTRLYFDSQIVTDIIDTNQTYKGMKVFSVILEDGTRGKIFKKEIPDWIGQKKDIIVTIDLDKDGKDKYDETGELSCRFKIPSEQEWEEQWELIKTKTQKDLDDSGKTVGAYIYDTLLQMPKQKIRGKLVRTIERKYYKEELRRILEKQKEFHPEFQDQTLYEACLEELYPQNDAHRNLISNRDLVYLLVEDILFYQRPLKSKKSLISDCPFEEYTHVDKETGEVCYYHPKCIAKSHPLFQEFRLWQFLSNLRIYQKEKMVNGKLCLDVDVTSDFLKNEEDYTDLFDWLNRQKSIKQDSFFKCPLFGLKKKDITNYRWNYVEDKTYPGNETRALILGRLEKAGITADFLTLEIEKALWHILYSISDKRELEKALNSFARQHSLGEKFVKEFLGIPPFEKEYGSYSAKAIKKLLPLMRTGKYWNETCIDEQTCDRIDKIISGEYDEGIQARVREKAIHLNDMSSFKGLPLWLACYVVYNRHSEAKDIQKWEKPSDIDAYLKSFKQHSLHNPIVEQIILETLRTVRDIWKQVGHIDEIHVELGREMKNPSEKRKKMAQQIQENENTNLRIKALLTEFMNPEFEIENVHPYSPGQQDLLRIYEEGVWNSVDEVPDEIATIIKKFNESDIKKRPTTSEVLRYKLWLEQKYRSPYTGEMIPLSKLFTPAYEIEHIIPQARYFDDSFSNKVICESEVNKLKSNMLGYEFINKHHGEKVQVTGGKSVEIFSVGSYEQFIKDNYSRNAAKMKRLLMDDIPEQFIARQLNDSRYISKLVKSLLSNIVRETGEQEEMSKNVIVCTGSITDRLKKDWGINDVWNRIILPRFLRLNELTESNRFTSVTASGNVIPAMPLELQKGFNKKRIDHRHHAMDAIVIACANRNIVNYLNNESASKNAQTSRYDLQHLLCDKQKTDDKGNYRWFIKKPWDTFTQDVYTALQEIIVSFKQNLRIINKTTNHYQHYEAGKKTIISQKKGDNWAIRKPMHKDTVYGEVDLRRIKTVSLKEALINLNAVVEKDLKKKLKELLSHNQNEKQIKKYFEENKDVWSEVNLKKIDVYYFSKETKDRFFATRFGNDLVSVFKDCKDMDKAKDKIKKITDTGIQKILLRHLEANENNPEWAFSPEGIETMNKNIIELNDGKWHQPIYKVRVYEKADKFAVGQNGNKSTKYVEAAKGTNLFFAIYETEQEDQSTGEVIKKRSYATIPLNIVIDRQKHGLPPAPEDENGNPPKFVLSPNDLVYVPTEEEIQNGNITYPLNKTRIYKMVSCTGNQCFFIQFHVSNMVIDKYEYSALNKMERAITGEMIKEICIPIQVDRLGNIIQKL

SEQ ID NO: 3629 - protein, 1512 aa, unidentified
  REGION 1..1512: note = Description of Unknown: Cas Enzyme sequence
MKKILGLDLGTNSIGWAVVCHSDTDGQTERKWIEMAGSRIIPMDAAILGDFDKGNSKSQTSERTGFRGIRRLRERVLLRRERLHKVLKLIGFLPQHYIDSLDFSNHSGKFQLGTEVKLPWRKNEIGKYEFLFQNSFNEMLADFAKKQPELVAMGRKVPYDWTIYYLRKKALSEKITKEELAWILLNFNQKRGYYQLRGEEEEEKKNRLEDFYALKVVEVEQTDDKKGKDIWYNVHLENGWIYRRSSNVPLDWKDKIKEFIVTTELNEDGTPKVDKDGCVKRSFRMPKEDDWKLLKKKTEADIERSHKTIGCYIYDTLLQSPQQKIKGKLVRTIERKFYKDELRLILDKQQAFHPELQDRELYKACLDVLYPMNVAHKNNVANRGFVYLFMEDILFYQRPLKSKKSLIDNCPYEENQYIDVTTGEIKKAPIKCIAKSHPLYQEFRLWQFIDNIRIYQKEKKVDGKLLTDIDVTTEYLSSKDDYVALYEWLCVRKEIEQKTFLKYPAFGLKKEIENYRWNYIEGKSYPCNETRSLILHYLEKAGISSTFLSTKIEESLWHILYSVEDRIELETALRTFASKYQLSCNFVEVFKKFPPFKKEYGAYSAKAIKRLLPLMRMGKYWKVDAIDGNTAERIEKILSGECDEKILNKVWEKTIHLSETSDFQGLPLWLACYVVYNRHSEVKEVAKWKSPEDIDIYLKSFKQHSLRNPIVEQVITETLRVVRDIWKRVEQIDEIHVELGREMKNPSEKRRQMTERMLENENANIRIKALLTEFMNPEYEMENVRPYSPSQQEILRIYEDTVLNGAGDIPEDIEIILKKFKENDIKKRPGKSDFLRYKLWLEQQYRSPYTGEIIPLGKLFTTAYEIEHVIPQSRYFDDSFSNKVICESEVNKLKDNMLGYEFIKKHAGEIVELGFGKSVKIFSVEAYERFVGENYYKAGSKKSKLLMDDIPEKFIERQLNDSRYISRVVKGLLSNVVREEDANGEYESEAISKNVIVCSGSVTDRLKKDWGVNDVWNNIVYSRFERLNRLTESQQFGHWENREGKRFFQTELPLEYQKGFSKKRIDHRHHAMDAIIIACATRNHVNYLSNESASKHARIARYDLQRMLCDKSKADRGGNYKWIIQKPWATFTQDVYRTLLDIIVSFKQNLRVINKMTNYYQAYDDAGKKVFKKQKKGDSWAIRKSMHKDTVFGQVNLRKIKEVRLSVALESPEKIVDKKIKEKVLQLFAYQYDKKKIEKYFKENASLWKEVNLAKIPVYYFTDESSELLVAVRKNLDTGFTEKKIRESVTDTGIQKILLNHLSNKGDKPELAFSPDGIDEMNRNLVILNGGKPHQPIYKVRVCEPLGNKFKVGTNGNKSAKYVEAAKGTNLFFAIYVTDDGKRTYETIPLNVVIEREKLGWLPVPEKNDKGGNLLFWLSPNDLVYLPTEEELMNGIISDSIDRNRIYKMVSCTGNEGHFIPENISNPIIPTLELGSNNKAQRAWTDEMIKETFIPIKVDRLGQITEIINKIR

SEQ ID NO: 3630 - protein, 1511 aa, unidentified
  REGION 1..1511: note = Description of Unknown: Cas Enzyme sequence
MEKRHILGLDLGTNSIGWAVIRAFLNENSEWILNKIICDGSRIIPMDAAILSDFDKGNSKSQTADRTKSRSVRKLYERSHLRRERLHRVLKLLGFLPEHYSKQIDRYGKFAVGTEPKLPWCKNEGGHYSFIFQESFNEMLTDFYQHQPGLVSKEQKVPYDWTLYYLRKKALTQAIRKEELAWILLNFNQKRGYYQLREEQEEKQPSKTRQYFESQIVTDIVDTRQLNKGKKVLVVTLANGTSGKFFWKEIPDWVGQKKDVIVTVDIDKDGKDKYDETGELSCRFRIPTEQEWDEQWELIKAKTQNDLDVSGKTVGAYIYDTLLKMPKQKIRGKLVRTIERKYYKEELHQILESQKKFHQEFQDKALYEACINELYSQNDAHRNLISNRDLVYLLEDDILFYQRPLKSKKSLIANCPYETYTYIDKETGEIKPYSPKCIAKSHPMFQEFRLWQFLSNLRIYQKEKVVDGKTCFDVDVTSEFLKNEDDYVNLFDWLGRQKNIDQKTFLKYPLFGLKRNDLSNYRWNYVEDKSYPCNETRSVILARLEKAGIASGFLTREMEEALWHILYSISDKEELKKALTSFAEKQGLGESFVAQFQNTPPFPKDYGSYSAKAIKKLLPLMRMGKYWNESNIDEHTRNRIDKIISGEYAEDIRTRVREKSIHLTNVSSFRGLPLWLACYVIYDRHSEAKDIKRWKNPSDIDDYLKSFKQHSLHNPIVEQVILETLRTVRDIWKQVGHIDEIHVELGREMKNPNDKRRKMTQQILENENTNLRIKALLTEFMNPEFEIENVRPYSPSQQDLLRIYEEGVLNSVETVDDEIATIIKKFNESDVKKRPTTSEVLRYKCWLEQKYRSPYTGEIIPLSKLFTPAYEIEHIIPQARYFDDSFSNKVICEAEVNKLKSNMLGYEFIKEKHGQIVPLSFGRTVKIQSVEAYEQFVKDNYSRNPGKMKKLLMDDIPEQFIARQLNDSRYISKLIKSLLSNIVREEDEQEDTSKNVIVCTGGITDRLKKDWGINDVWNKIVLPRFLRLNELTGTTRFTSVNTDNKVIPAMPLELQKGFNKKRIDHRHHAMDAIVIACATRNIVNYLNNESASKDAKISRYDLQRLLCDKQKTDDKGNYRWLVKKPWDTFTQDVYIALLDIIVSFKQNLRVINKTTNYYQHYEDGKKKMISQKQGDSWAIRKPMHKETVYGEVNLRDVKTVPLKEAMKNPKTIVEKDLKEKMKELLSQGFNEKQIKKYFEDNKDVWQDVDLKRIKIYYFSKETKDKFFAVRKPLDTSFDKKKIEGSVTDTGIQKILLRHLEANGGDAEKAFLSEGIEEMNRNIISLNNGKYHQPIYKVRVYEKADKFAVGQTGNKSSKFVEAAKGTNLFFAVYETEQEDKDGRIIKKRTYATIPLNVVIERQKQGLSSAPEDENGNLPKFVLSPNDLVYVPTEKEIQNQIINYPLDKKRIYKMVSCTGYQCFFVQSYIANVIVDKYEYSALNKMERAITGEMIKEICIPIKVDRLGNITEAL

SEQ ID NO: 3631 - protein, 1436 aa, unidentified
  REGION 1..1436: note = Description of Unknown: Cas Enzyme sequence
MKRILGLDLGTNSIGWALVDEAESKDERSLIVKLGVRVNPLTVDELTNFEKGKSITTNADRTLKRGMRRNLQRYKLRRETLVEVLKEHKLITEDTILSENGNRTTFETYRLRAKAATAKISLEEFARVLLMINKKRGYKSSRKAKGTEEGTLIDGMDIARELYNNNLTPGELCLQLLDAGKKFLPDFYRSDLQNELDGILEKQKEYYPEILTDVLKEELRGKKRDAVWAICAKSFVWKESYTEWNKEKGKTEQQEREHKLEGIYSKRKREEAKRENLQWRVNGLKEKLSLEQLVIVLQEMNTQINNSSGYLGAISDRSKELYFNKQTVGQYQMEMLDKNPNASLRNMVFYRLDYLDEFNTLWEKQAEYHKELTEELKKEIRDIIIFYQRRLKSQKGLIGFCEFESRQLEVEIDGKKKIKTVGNRVIPRSSPLFQEFKIWQILNNIEVTIVGKKSRRRKQKDNSPALFNALDDAEQLELDGRRNLYQEEKELLAQELFVRDKMTKLDVLKLLFDNPQELDLNFKTIDGNKTGYALFQAYNKMIEISGHEPVDFKKPIEKIIEHIKTIFDLLNWNTDILDFNSNEELDNQAYYKLWHLLYSFEGDNTPTGNGRLVQKITELYGFEKEYATVLANVTFQNDYGNLSAKAIHKILPHLKEGNLYDVACAYAGYRHSESSLTKEEIANKVLKDRLMLLPKNSLRNPVVEKILNQMVNVINAIIDTYGKPDEIRVELARELKKNAKEREELTKSIAQTTKKHEEYKALLQNEFGLKNVSRTDILRYKLYKELESRGYKTLYSNTYISQEKLFSKEFDIEHIIPQARLFDDSFSNKTLEVRSINIEKGNKTAYDFVKEKFGESGIGNSLEHYLKNIEDLFKLGKISKTKYNKLKMTEQDIPDGFIERDLRNTQYIAKKALSMLNEISHRVVTTSGSVTDKLREDWQLVDVMKELNWEKYKALGLVEYFEDRDGRQIGRIKDWTKRNDHRHHAMDALTVAFTKDVFIQYFNNKNASLNPNTNEYAIKNKYFLNGRAIAPIPLGEFRAEAKKHLENTLISIKAKNKVITGNINKTKKKGGVNRKVQQTPRGQLHLETIYGSGKQYLTREEKVNASFDMRKIVTVSKSAYRDALLKRLHENDNDPKKAFAGKNSLDKQPVWLDKEQTRKVPEKVKTVTLETIYTIRKEISPDLKVDKVIDTGVRKILTDRLNEYGNDAKKAFANLDENPIWLNKEKGISIKRVTISGISNAQSLHVKKNKDGKPILDENGRNIPVDFVNTGNNHHVAVYRRPVIDKKGQLVIDEGGNPKYELEEVVVSFFEAVTRANLGQPIIDKDYKMNEGWQFLFSMKQNEYFVFPNEKTGFSPEEIDLLDAENYGLISPNLFRVQKFTHKNYVFRHHLETTIKDTNSNLRGITWIDFRSSKGLDAIVKVRVNHIGQIVSVGEY

SEQ ID NO: 3632 - protein, 1565 aa, unidentified
  REGION 1..1565: note = Description of Unknown: Cas Enzyme sequence
RPAYKMLTCIYLCRTLLFFAPYADFLYKKNSSFGKNNNTMKKILGLDLGTNSIGWAVLNAADDNSLKYIEAAGSRIIPMDAAILGDFDRGNSISQTAERTRIRGMRHLRERYLLRRARLHRILNLLGFLPFHYAQDIDRYGNFSADMEPKIAWCKNLEGELEFIFIESFNEMLEDFRKNQPELVADNKKVPYDWVIYYLRKKALEKKISKEELAWILLNFNQKRGYYQLRGEDDDESMKTAKTRQYFDKQIIKNIIDTNQTYKGQRILIVELQNGDKGKIFKKEIPDWIGQEKNIIVTVDIDKDGNDKYEESGSLSCRFKIPTDAEWESEWKLIKMKTQKDLDESNKTVGTYIYDSILQNPTQKVRGKLVRTIERKYYKAELKQILEKQTEFHSELQDKDLYIECLNELYSNNDTHRNAITDRDFVYLFMNDILFYQRPLKSKKSLIDNCPYERNIYIDKETGEIKYSPIKCIAKSHPLFQEFRLWKFISSIRIYQRESVVEVVDKQLDLFSSQSTSVQKLVTDVDVTDKFLTCENDYVALFEWLNKKKIIDQKEFLKYRPFGLKGDIDNYRWNYVEDKSYPCNETHAMILTYFAKAGISEDILTKEMEEALWHILYSVEDRQEITKALRTFASKYHLSDSFVKVFSNIPPFKKEYGSYSAKAIKKLLSLMRMGKYWSEDAIDVNTRGRIDKIVTGEYDEKIRDRVREKTIRLNDIRHFRALPDWLACYVVYDRHSETREITEWKSPEEIDEYIRNFKQHSLRNPIVEQVITETLRTVRDIWKQVGCIDEIHVELGREMKNPADKRKRITSQIIENENANLRVKALLTEFVNSEFEIENVRPYSLSQQDILRIYEDGVLNSVAEVPGDIAGILKKFNENDAKKRPTTSEILRYKLWLEQKYRSPYTGEMIPLSKLFTSAYEIEHVIPQSRYFDDSFSNKVICEAEVNKLKDNALGYEFIKKHHGEKVELGFGKIVEIFSVSVYEQFVKDNYSRNRGKMKKLLMDEIPEQFIERQLNDSRYISKVVKTLLSNVVREKAEQEAVSKNVIVCTGGVTDRLKKDWGINDVWNKIVLPRFLRLNELTNSTNFTAKNAAGNEIPAMPLELQKGFNKKRIDHRHHAMDAIVIACANRNIVNYLNNESASRKAKISRHDLQAILCDKVRTDDKGNYQWRVKKPWDTFTQDVYVALENIIVSFKQNLRVINKTSNYYWHYENGKKVLVKQVKGDSWAIRKPMHKDTVFGEVNLRKVKSVSLNEALKNPQFIVEKDLKRQLLSLLQQNFDIKKIKKYFEEHKDIWSDISLSKMNIYYFTKETKDRYFATRKPLDASFDKKKIESCITDTGIQQILLRHLELKENDPERAFSPDGIDEMNRNIIQLNKGKGHHPIAKVRVYEKADKFEVGQRGNKSSKFVEAAKGTNLFFAVYETEYPDEKTNSIVRKRNYATIPLNIAIERQKRGLSTAPEDEKGNVPSFVLSPNDLVYLPTSEDIVNGHITQPIDKSRIYKMVSSSGSQCFFIKHNIANIIVDKYEFSPLNKMERAISNEMIKEICIPVKVDRLGNIVKLGKSE

SEQ ID NO: 3633 - protein, 1511 aa, unidentified
  REGION 1..1511: note = Description of Unknown: Cas Enzyme sequence
MEEKHILGLDLGTNSIGWAVIRALRNEDGIETLSKILGANSRIIPMDAAVLGDFDKGNTKSQTAERTSRRTVRTLYERSQLRRERLHRVLAILGFLPEHYLARLDRYGKFIAHSEPKLPWTTDEQSRPCFLFQESFHEMLADFRQNQPDLLANGRKVPYDWTLYYLRKKALTKKIRKEELAWILLNFNQKRGYYQQRGEEEDKKSSKTRQFFDSQKVTDVIDTGRVYKGLKVITVVLADGIKGKIFKAEKPDWVGQKKDIFAVVDLDKDGKDKLDENGEPSVRFKIPTEQEWEEQWKLIKVKTENDLDDSGKTVGAYIYDTLLQMPRQKIRGKLVRTVERKYYKDELARILETQSRFHPEFQDRSLYEACINELYPQNDAHRNLISSRDLSYLLSEDILFYQRPLKSKKSLIADCPYEGYTCVDKHTGEVKSYHLKCIAKSHPLFQEFRLWQFLANLRIYQKEKVVDGKSCFDVDVTVEFLKNEDDYVCLFDWLNNRKDIKQDAFFKYPAFGLKKDAKNYRWNYVEDKVYPCNETRAVMLARLDQAKVSEDFLTREKEEALWHILYSIADKGELRKALSTFAAKQGLGPEFVEKFQTTPPFEKDYGSYSAKAIKKLLPLMRRGKYWSADAIDAQTRERMAKILSNECDDRIRSRVRGKAIHLTDMSSFRGLPLWLACYVVYNRHSEAKDIRKWETPSDIDAYLAGFKQHSLHNPIVEQVILETLRTVRDIWKQVGHIDEIHLELGREMKNPKDKRAKMTRQMQENETTNLRIKSMLLEFMNPEFEMENVRPYSPGQQDLLRIYEESVLNSVENVPDDIREIISKLSESDLKKRPTTSEVLRYKLWLEQKYRSPYTGEVISLSKLFTPAYEIEHIIPQARYFDDSLSNKVICEAEVNKLKSNMLGHEFISKHYGEKVLLAGGKCVKIFSVSDYETFVKDNYARNPVKLKKLLMDDIPEQFIARQLNDSRYISKLVKSLLSNIVRKENEQEDVSKNLIVCTGGVTDRLKKDWGVNDVWNKLILPRFLRLNELTGTTDFTALNANSKMVPTVPLGLQKGFNRKRIDHRHHAMDAIVIACASRNIVNYLNNESASKNAKVTRLDLQRLLCDKQRIDDKGNYRWFIKKPWPTFTQDVSVALQNVIISFKQNLRVINKTTNYYQRYVDGKKKFVPQEKGDNWAIRKSMHTETFYGEVNLRDIKTVSLKEALKKPKAVVERDLKKKLQELLSQNLNEKQIIAYFEANKDIWHDIDLKKIQVYYFTKETTKRYFASRQSLDTSFDEKKIREKVTDTGIRKILLRHLEANGNDANLAFSPEGIERLNENMQTLNDGKYHQPIYKVRVYEKADRFAVGQTGNKKSKFVEAAKGTNLFFAIYEMEKVDKETGEKTIKRIYETIPLNVVIERQKRGLSSVPEDKDGNPLKFVLSPNDLVYVPTREEIESGHIIYPLDRTRIYKMVSCTGNEGHFIPNYIANPIVQILELGSNNKAQRAWSGEMIKEICIPIKVDRLGNLMQLL

SEQ ID NO: 3634 - protein, 1559 aa, unidentified
  REGION 1..1559: note = Description of Unknown: Cas Enzyme sequence
MKKILGLDLGTNSIGWAVVKAEEKLRDNETSYLQPVGISAAGSRIIPMSADILGDFDKGNSVSQTAERTGFRGVRRLHERNLLRRERLLRVLNLMNFLPEHYANQIDRNGKFINHSEPKLAWAKDETGKFRFIFEDSFNEMLADFAKNQPQLVADGKKVPYDWTIYYLRKKALWQRLTKEELAWILLQFNQKRGYYQLRGEEEEAQDKKVEFLEQKVVRVEATEEKKGKDTWYEVHLENGMVYRRPSSVPLDWEGKVKEFIVTTDLEKDGSPKKDKEGKIKRSFRAPKEDDWTLVKKKTEFDIDNSHKTVGCYIYDALLQNPNQKIVGKLVRTVERKYYKDELRQILDIQKALMPELQDENLYKACIEELYPNNEAHRNNIAKPDFANLFVNDILFYQRPLKSKKSLISNCPYESHFDKDGNEHPIKCIAKSNPLFQEFRLWQFVQNLRIYQREKEVADKLLTDVDVTNEILKSEDDYVALFDWLNDRASIKQDTLLNSYFKFKKEKGKDKYPYRWNYVEDKEYPCNETRADILKGFDKCGVSADFLTKEREMQLWHILYSVEDKTEISKALEKYAEKNNLPELFADVFAKIKPFKKEYGSYSEKAIKKLLPLMRMGKYWSADAIDAKTKERIDKIITGEYDEKIRDRVREKAINLTCENHFRGLPIWLACYIVYDRHSEAKEIEKWEKLEDIDKYLKAFKQHSLRNPIVEQVVTETLRTVRDIWKQEGNIDEIHVELGREMKNPADKRKKMTENIQQNENTNLRIKAMLMEFMNPEMGIENVRPYSPSQQDILRIYEENALDNLSKDDPDFDFVNKISKLAQPSKSDIVKYKCWLEQKYRSPYTGEMISLAKLFTHAYEIEHVIPQSRYFDDSFSNKVICEAEVNKLKDRQLGFEFIKNHKGEKVQLSQGGTVEILSVEAYEKFVKDNYSNNRTKMKKLLMDDIPDGFIERQLNDSRYISKLVKGLLSNIVREKLPNGDYEQEAVSKNLISCNGSITDHLKKDWGLTDVWNSIVLPRFKRLNELTGKDVFTAVSAEGHEIPAMPLELQKGFSKKRIDHRHHAMDAITIACATRDHVNLLNNEAAHSQKHDKSYRHDLQRKLRRFEKTLINGQEREVAKEFLKPWNSFTTDAKQALENIIVSFKQNLRVINKTTNHYQHFDESGKKIMTKQEGGDSWAIRKSMHKDTGWGEVNLRFKKQVSLNEALKTPQYIVNADFKGNVVKWLKLGMDAKAIKKLVEGQKDVWSDIDVKKIWVYYFTKETNDRYFATRFLSDLVGYMSGVKDYDKAIAKIEGITDTGIQKILKAHLKAKGDNPELAFSADGIDEMNRIIVDFEKIKNYQLKKVHKPIYKVRRYECGNKYSIGQIGCKAKKFVEADKGTNLFFAIFSSEKFNKETGEMESVRSYLTIPLNVMIDCQKKFGSKWRDNIEAYLKENNLVSSDVKLLFILSPNDLVYLPTKEELKDGIKVVDKKRIYKFVDASGVAANFIPYNIAQAIFSMTKDDQNKVFGEYVYNIQNEIGVGSRPSKSPNEFFKGKESIKEICVPLKVDRLGNIIEIGK

SEQ ID NO: 3635 - protein, 1512 aa, unidentified
  REGION 1..1512: note = Description of Unknown: Cas Enzyme sequence
MSPNIILGLDLGTNSIGWALIEKKDQPIQGKILAAGSRIIPMSQDVLGNFDRGISISQTAERTGFRGIRRLRERHLLRRERLHRVLNILGFLPEHYAKQIDFEIHLGQFAYGTEPKLSYAFNTSTNQWDFIFKNSFNEMLSEFGRLHPLLLEAGRKIPYDWTIYYLRKKALKEKIEKEELAWLLLNFNQKRGYYQLRGEDEEENTNKIVEFYSLKVSKVVATDEKKGNDEIWYNIHLENGWIYRRTSKTFLNWAGKTKDFIVTTEINEDKTVKTDKEGKEKRSFRAPAEDDWTLLKKKTEYDIIKSDKSIGTYIYEHLLLDPTQKIKGKLIRVVERKFYKAELDAILKTQQLFHTELTDINLYKLCIDELYEYNEAHRNNIGEKDFVNLFLNDIIFYQRPLKSKKSLISNCKFESRTYFKEGKPQSEPIKCIAKSHPLFQEFRLWQWLQNLKIYERETDKNVTHELLPSEESRVNLFDWLNNRKEVDHKALFNHLLKPLKLKANNYRWNYVYDEVKDESKNYPCNETRAQIQNRLDKSKNISETLLTKENEESLWHILYSVEDKIDLEKALKTFANKHGLADDFVENFKKFPPFKKEYGSYSAKAIKKLLPLMRIGKYWNEDDFHVLTKDRIDKIINGEYDENIRDRVREKAINLKGIQNFKGLPQWLASYIVYDRHSEDGESVKWKTAKDITHLEQHSLRNPIVEQVINETLRIVKDIWMKYGNGEEDFFNEIHIELGREMKNPSDKRKEMTNRMNENENTNLRIKALLAELLNEGIVENVRPYSPMQQEIFKIYEEGVLNAEEGNIPDNIMKISKQAQPSSSDLLRYTLWLQQKYRSPYTGEIIPLTKLFTPAYQIEHIIPQSRFFDDSLSNKVICESEVNKDKDNLLGYEYIKANYGKAIELSGGKEIRIFTVEAYEKFVKENYSKSRGKLKKLLMDDIPESFIQRQLNDSRYISKVVKNLMSNIVREAGEQESVSKNIITCTGAVTSILKQDWGLNDVWNELITPRFERLNKLTKTTDFGELTKKGGKHIFQTQVPIALQRGFNKKRIDHRHHALDAIVIACASRNHINYLNNESAVGKKTKEEKDKKRYDLKHKLCYKKYNEESNQNYKWIFNKPWDSFTQDTKDTLYSIILSFKQNLRIINKSINYYQAWRKDEHGELKKKLVKQTKGINWAVRKPMHKDTVSGLVKLKFKKKVSLSIAIENWTMLVDKKLRNKIKDLIKLEYDKKKTLNFFKDLNYKWLDDDISKVEIYYWDEENVASRVKIDDSFNSAMIKCITDSGIQRIMSNHLKKFNEENNSKIIEHPEQAFSIDGIDDMNKNLIELNGGKKHHPIQKVRTFEPKGNKFNVGENGNKMHKYVEAAKGTNLYFAIYKNEAGKRNYVTVPLNVVIERQKQGLPSVPEKNDDGYLLFTYLSPNDLVYVPTLEEIENKCMANLTNLNQVQTTRIYKFVSCTGNEGHFVPHSYAKEIVKNEMGTNNKSQNSLDGIQIKMHCIKLNVDRLGNVRTSK

SEQ ID NO: 3636 - protein, 1436 aa, unidentified
  REGION 1..1436: note = Description of Unknown: Cas Enzyme sequence
MKILGLDLGTNSIGWSLIERDTDLETGRILGLGCRIIPTDSELLSKYETGQAASKNAGRRQTRGARRLKQRYKLRRERLIKSLIALGWLPENFQPGHSLPVSEQSLTEMKQLFGTQEISDDWVVYYLRHKALTTQVSKGELARILYHMNQRRGFKSNRKTGNEVPGDQGDENEGGKRKREKKVEIVTIRSIEDTGEKLKGNNIYKITLQDGRTGTMTRKLKPEWENKEIELEITTIPPTKNDAARYEFRMLSNSDSDKWAKQKIAREEDIRRSGLNFPGNYYFHELKKNPRYIIKDVSIDRQFYIDELTAILTKQIELAPELNDRYAIERIAEMFYPRNLEKQKEIKNNDILHLFIKDIIYYQRPLKSKKSSISDCRLAFRNYTDPTTGKKIPFKAAPISSPVFQEFRIWQTINKIRVLKREMRDASGRLQVDIDVSKDYLSTPVLEKLYELFDQKDKVTQKQILKELGLGEKEFMINLFRNNEEKELPGNQTKHVIRKFFKKAGYESEGEKILNNPEKLYKLWHILYSLEEESHIQSALQKQFGISTTESEIISKIPPFKLQYGSLSHQAMSRLLPLMRCGRYWSWEAIDTSTRSRLEKIFNAEFDEGISDNIRELFKKYQIAAETDCQGMMVPMASYAVYGVHSERNTTQYQHPDQLIPTEPLNLRNPIVEQVVNETLRLVRDIWKNDNLGRPDEIHIELARDLKKNAKERKEISEMISGNENENKRIAAILRELKWGNPNSLADIERLKLWEKQADEKTREDFKNIKFKKPSEPNREEIQKYKLWAQQKFISPYSGELIPISKLFTREYDIDHIIPRSRFFDDSIENKVVVETRLNKEKGNKTALEFIKSGNSKGYPMLSVSEYETHVTKYFFRKKRQLLLSEDVPDKFTNRHLVDSRYISRKLNELLAPVSINQKDPIIVTSGSITSELKSAWGLGEKMKELVKWRFERLTEKTEEEYVWYDDEKGQDEKPTGRKILRLKGFEKRIDHRHHALDALIIACTTRSHIKYLNDLNAAQYRKNPKDEDLKQQLPKLLEPGKDSYLQSRKFKKPWKGFVTEAFEKMESIVVSFKNNVKLYGKKANKNWRYVQQPDGTYKKQLKPVFDADGNKKLSPYVRQSLHKATIVGKIQLREYKAVNIGEALQTPDSIANKQEKTHLKKLLTDAGNDVKKALKLYKQNPLKDETGAELKKITIITQVPYFVNRVDITSGFDEKRIKKIPDLVLQKQLLDHLKQIEQINLQRGKDEQIDPWSSEGVEILNKNRNFPIRKVTTKEESDSKFEIRPGAYTEADKGTNLFFVIYEHLHNAGQRKFESIPLRTVIEAKAAGSGFVEEKPDYRWFTLTPGDLVYMPDEEENMSNIDWENTRPLTKKIYKLVSCNKAQAFFVPQTVAKIILDKVEFDSMNKMERAIDGRMIKQHCIKLTVDRLGNIQPVK

SEQ ID NO: 3637 - protein, 1220 aa, unidentified
  REGION 1..1220: note = Description of Unknown: Cas Enzyme sequence
MKKILGLDLGSTSIGWAFLEENNEKLNIKKMGVRVVPYTGDENDKFIKGQAVTVNKDRTLKRTARKNQQRYKQRKQKLIRKLTELGMLPSHDLLVKMSPLELYALRAKAVKEKLTLQEIGRVIFHLNQKRGYRGNRFANNEEDSGKKMSDYLGEMQVRKSTIQAENKTIGQYFYAQLNSDRHFRTKQQVFPRECYIDEFNRICKTQSLFYPELLNNSTITYLRDEVVYYQRNLKSQKGLVSECAFEKHHKVAPKSSPLFQLEKIWESIHNITLVNKKNERYPINMDQKLAIFNWLDTKEKLTSRDLLKILDLKSTSGWTPNEQIKKSGLQGNTTKTLIIKVLQSLELDPTLFIRFDLKVDHVFNKETGEVKEYSIVDASFEKEPLYQLWHVIYSIDDPIQLNKVLMNKFGFSEEQASVLNKIDFKKQGFGNKSARAIRKLLPQLMSGMDYTRASSAAGFNHSNSITAAENDQRELNKKLELYKRNSLRQPVVEKVMNQLVNVVNAILVDDNLGRPDEIRIELARELRQSKEERERTQKMGDARNKEHLEIISRLNDEFPGMAVTGKVLEKYKLFVQQDGECMYSGKRMELSMVLKGEGVDIDHIIPQSRMFDDSFQNKVLVFRKLNQDKNNQTAFDYLKGVSNEEFDAYLERVERLYSNSKISRAKRQRLLMSEQEIPNDFISRQLNETRFISKEASKLLKQICRNVYSTSGSVTEFLRNQWGYNEVLKQLNYSKYEQAGLANDGKIDKDKWSKRDDHRHHAIDALVVAATKQGVIQKLNTLNSSLTRDELLAGIEGKVKEGWQAKRSLLEQYIQVNQPFDVETVKKAVSEIIISIKAGKKVATKSINKSNGQITLVPRGQLHKEFVYGKIKRYSNAKTALNGRFKLDFVEQIVNAYEKECIKNRLEQYGNDPKKAFKNLEKNPIWLNPKKNKQLTEVTLWEEHFVIKYDLNINFKEKDIESIVDHRIKELIKNRFAEKTGSKEHPLKDIQNNPIWLDKSKGISIQSVRCFTGLNDLVPLHASDNGYTFAERHKKNDSKMVDYVAPRNNHHIAIYKKPDGTYADIAVTLWEAVKRKQLGLPVIINDASKTWSHILDKGIDDQDLLVNIPIEGWEYIESFVQNDYFILGLSSTEIADSVSRGNLNQLSKFIYRVQKLSRAGGVINISFRQNLETRVDDNKMGGEMLSKKIGKLIVVQSLGALFKANPKKVFVDSLGYIKLV

SEQ ID NO: 3638 - protein, 1379 aa, unidentified
  REGION 1..1379: note = Description of Unknown: Cas Enzyme sequence
MKRILGIDLGTTSIGWAYVLEAEAANEQSEIVRLGVRVVPLSVDEETKFEKGQSITTNADRAARKSMRRNIDRYQMRRDELVAVMREEGWITEETTLSEHGTRSTFESLRLRAEAVEKEVTLAQLARILLQINKKRGYKSNRKADSQEEGPVIDGMDVSKQLCERSMTPGQWVYERMQRGKMTVPAFFRSDLQQELDHIWTLQHACHSAWMTDELRVALTQADSRRAQQLMDAHGVIPETVKGKERRQILYGWRSAAAMGGLPAAQLAAVLIQIVRDINASSGYLGQIGDRSKELYFRHETVGQYMWRHIQANPHESLKTLVFYRKDYQNEFDALWASQARFHPELTERLRKRLRHILFFQRPLKSKKGLVNRCELVHYSIPENAADGGGKRRDVGPKVCPKSSPLFQEFRMWQVLNNLMLIHVPTQEVRPLADEEKEMLAAELCYRVRMKKNDVLKLLCDHWREWDLNYKELEGNRTLAAFYKVYEQVIAQTGHGEYDFEKMRAAKVRELVGGVFGGLGFEVGLLSFDAELDGLAYEQQPLYRLWHLLYSYEGDSSATGDKCLLKRLCALTKMDEDVARLFLTVHFEDDYGSLSTKAMRRILPFLKKGYMYDVACEQAGYCHSVRSRTREELDKRTYKDRLDLLPSKSLHNPVVEKILNQMIHVVNGVTSAYGKPDEIRIEMARELKSCAAERERRTASIAKATKENAEIEKILRQEFGLSYVSRNDIVRYKLYEELKENGYKTLYSNTYIPKEELFSKAFDIEHIIPQARLFDDSFSNKTLEARQVNIEKKDRTAWDFVNDCYGSEGAALYRCRVDELFNKGIISKDKHKYLLMPGDKIPEDFINRDLRNTQYIVRKALELFEDFVLGVLATSGAITSRLREDWGLVNVMKEMNLPKYERQGVVETCSDREGHVFKRIQDWTKRNDHRHHAMDALTIAFTKRAYIQYLNHLNARKDVTSQAYAIQQKEMECDGDHRWRFKCPFGDRSRFRREAMRQLDQILVSIKSKNKVLTPSLNRSKKRGGYNRKIEWTPRGPLHKETVYGRIRRYVTKNVRVGSSFTQAEIEKVANTCFRRALLARLAEFGGDPKKAFTGKNSLEKNPLYCDEAHTQTVPLLVKLVELEEVGTIRKEITPDLKVEKVVDRRIRTLLEERLALYGQDAKKAFSNLGENPIWLNQEKGISVKRVTIIDKSDVVSIHEKRDVDGRLMHDEHGRTIPCDYVQTRNNHHAAIFCDAEGNLQEHIETFFDVVERVRQQRIEGRAVEVIDKNYKRDEGWQFLFSMKINEYFVFPDEKTGFDPRSVDLTDPANYALVSPHLFRVQKLSSKDYYFRHHLETTVEDTKALKDVTWKRINTLEKLKNIVKVRVNHIGQIVAVGEY

SEQ ID NO: 3639 - protein, 1656 aa, unidentified
  REGION 1..1656: note = Description of Unknown: Cas Enzyme sequence
MKTKNVLGLDLGTNSIGGALIKLPEEYANYGSYGEINWLGSRILPDSDYKKAFDLGQTNSPNVNTPAANRRIKRSSRRLKHRYKLRRSRLIKVFKTIGWLSEDFPEDFKKTARTITSERFSISDFLPFSNKTIQEFNNDFHNNNTIIASNAERSSLKTNVPEDWIIYYLRKKALTEKIEIAELVRIIYMFNQRRGFKSSRKDLKDSHILTYEKFKELKEKKEYDEKGIETKFVSITKVLDIIQLDDKPNKGNFKFKIIVDDERIDSEQFILERKIAPDWKGKELTLLVTQKVDKNHKFTQNKPDIPSENDWALCTTALDEKIQAVQYPGKYFYDELKKAYHEKKSYKIRQFPVYRWRYQKELEAIWLKQCELNPELNRINNDKNILRKLAEVLYPTQAKNRLPKLKEFMDRDLLHIISNDIIYYQRELKSQKKLVNECPYEKYVGKQRTDNNTFIETGKYGLKCVPKSSPVYQEFRIWQDILNLRIIKNEMKVNGVTKLDIDFTEKFISDEVKVALFELFDKKPNISELEILKLIQYYNPDNDIIISKKKETPHSHRINLFAKRDTLKGNETKCRYRNLFEKNDFDGEYILNNEALLYKLWHIDYSISSADESIAEKGIMSALGWEKNNQEWKKKENWQLFKMPLEVALDISKLPELNKEYGAYSSKAIKQFLPIMRTGKYWTIESIEEKTKNKIEKIINGEFDEDIVKNDTIIKIKKWEKENRALTKVEDFHGLPNWLAGYIVYGLHSEQEFVNCKNSQEFNDKVILKLKNNDLRNPVVESIIRETLLLVRDLWRNLEEKNERIDEIHIELGRNLKNNSEEKKNIAKTQEENYKEKKRIKEILMELLKNESFTEEVDEVEPKYENGELIFSTKKETAKFIVKPDPENPNDIEKFRIWKSLSKFSDEVWDKKVKDEKIPSDQQIKKYILWLSQNCRSPYTGKIIPISKLFDPNQYEIEHVIPRAKMKNDSKNNLVIAEWGVNKAKGSQLAANFIKNSNGKCSYGDITYNLLTYEAYEKLVNEIFKFNRSKRKNLLATEVPSDFVERQINDTRYITKKVAQLLKSVVGDETQIIFTGGAITSELKKNWGLTKEWKKLMLPRFKRLEKMYGFTLIKPNENDNSDFDINVPENEKLDIKRIDHRHHALDALIVAATTREHIRYLNSLNAVDNNEELQKVQRSLVKGKIRDFKLPWSTFTKDAKDQLESTIASFKVNNRIISKPRNLYTSWGKKGNQLVKIKKEQQPNKRWLAIRRSLFKEPLGTIWIKQTKEVSIKDAFEIEINRQVKANNQESLKLLPYIYDKTARKVIKNIIMQCQYSIDETDALKKEIESYLKKNKKEKGTYALNGMTYGKITIAEFKLFKTKRMSFNNKEYMEKLTLEKMLNDFPYFNTIGKSQFNSLLPEAQNFILEFNRKAKDDKKRIFISESKKMNDLNWLFLSHILHYNNNPKEAFGTDGIIEFNKKAKQIPSIGKEIKSITRMDGEIDPEDMFNNKFYETDKGAMAYFVIYENLKTRERTEFQSIPTHKAIEKIIAGKPIAEDIEGYKKMVLSPGDLVYVPTFEIIEKLNSGLTINEITNLLDKKELVNRIYKIVSFSKKDAYFIKANISEAIIPTNIKNKTMGEIYWHNKSPRTMEDDVNIKDVCIKLEINRIGEISFF

SEQ ID NO: 3640 - protein, 1556 aa, unidentified
  REGION 1..1556: note = Description of Unknown: Cas Enzyme sequence
MKRILGLDLGTNSIGWALIKQEIEANSNEIIKLGSRVIPMSEDILGKFDSGITESDAAKRTKFRSIRRLRERHLLRRQRLHRILNILNFLPIHYSREIDFLNRLGQYNKETEPKIAYCFNDETKHFEFIFKNSFAEMVEDFKLYQPNLLKNGKKIPHDWTIYYLRTKALSQKIEREELAWLLLNFNQKRGYYQLRGEEDEDATRTAQTRMYFVTENIESIEDTGQTYKGLKIIHIKLATGVTGKYFNKELPDWINQKKNIIVTIDLDKNGNDRTEEDGTVKRKFSIPSDEDWEKKWKLIKIKTEKEIFDSGKTVGKYIYDTLLQNPSQKINGKLVRVIERNFYKNELLQILKNQQNYHPELKDKNLFKRCIEELYKNNEPHKGALETKDFIHLFIEDIIFYQRPLKSKKSLINDCKYESRVFIENGEKKIQPIKCIAKSHPLFQEFRLWQWVRNLKLYEKNSGIDITVDILKTPSDWASLFDWLNDRKEIDNKSLLNHLLKPLKLKSSNYRWNYVYDSIKGESKNYPCNETRSQILSRLSKVKDIAADFLNKETEEALWHILYSVNDKLEIPKALKSFAQKHKLGDDFVEQFKKFPPFKNEYGAYSAKAIKKLLPLMRIGKYWNEENIHEQTKNRIAKIITGEYDGTIKDKIRDKSILLTELEHFQGLPLWLTSYIVYNKYFENGDITKWETPQDLEKYLQEFKQHSLRNPIVEQVITETLRVVKDIWNNYGKGIENFFDEIHIELGREMKNPADKRKAMTDQITINENTNQRIKALLAEMMNDVEVENVRPYSPSQQEILRIYEDGVLLSGLEIPEDILKISKTAQPSKNDLIRYKLWLEQKYRSPYTGILIPLNKLFTSAYEIEHIIPQSRFFDDSFSNKVICEAEVNKLKDNKLGLEFIKAHGGQIVELNFGKKVEILSVEAYEKLVNEHYANSQGKRKKLLLEEVPEKMIERQMNDTRYISKMVKNLLSNIVRAGAKDDGITSVNVLSSNGQITTILKQDWGLNDVWNEIIAARFERLNKITNSDNFGTINEKTKKFMPTVPLELSKGFSKKRIDHRHHALDALVIACATRNHINYLNNQSALEKGKNNEQKQKSREDIKHMLCYKKNNEGSNGNYKWIFKKPWETFTQDAKEQLFTTIVSFKQNLRVINKTVNKYQNWKIKNSDVEKIITTQTKGASWAIRKPLHKDTVSGLVKLRFKKVVQLSNALDNWEDIVDNNLRKFIKGLVDANLNKNALQKYFKTLNNTWNDRDVSKVEIYYWDIDNQGNPNNVASRVRLDESFNESKIRTITDTGIQVILINHLSKEKYQNVKDEKEKILAPETLAFSIDGIDELNKNITETNNGKFHQPIYKVRTYEATGNKFNVGQTGNKKDKFVVAADGTNLFFAVYKTENGTRKYETIPLNIVIENQKQGALENIKPKNCSVPLINENGDALLFFLSPNDLVYLPTLDEINNPNSVSLETINLEQLTRIYKFIDGSGTTANFIPNTSATTIFNMNKKEQAKRGLNYPIQNEYGIGSPQSKNQKSLDGTMIKEFCWKLEVDRLGKIVKIIK

SEQ ID NO: 3641 - protein, 1563 aa, unidentified
  REGION 1..1563: note = Description of Unknown: Cas Enzyme sequence
MKKILGLDLGTNSIGWALVSENETEKGILGMGSRIIPMSQDLLGKFDSGNSISQTAERTGFRGVRRIRERYLLRRERLHRILNILGFLPEHFAKAIDFENRLGQFKPDNETKLVWEEAQAGVFNFIFKSSFNEMVEEFKVTQPELFTSKESGEERKIPYDWTIYYLRKKALHNRIEKEELAWLLLNFNQKRGYYQLRGEEEEDNPNKLVEFHALKVVNVIADEPQKGKNDIWYSMILENGWIYRRLSKTPLFDWKDKIKEFIVTTDLNDDGTVKTDKEGVEKRSFRAPSEDDWTLRKKKTESDIVNSNKTVGCYIYETLLQNPAQKINGKLVRTIERKFYKQELQSILEKQKSYHAELQDKELYNVCLEELYQNNEEHRKTLQNADYTKLFIDDIIFYQRPLKSKKSLISNCPYEFRAFKNELGELKKESVKCIAKSHPLFQEFRLWQFVQNIKIYERERNINGKLQTDVDVTNDFLKTEDDYVALFDWLNDRKEIKQDTLLSSYFKIKKTKGATNLPYRWNYVEDKEYPSNETHSQIKNRISKLSEVPDNFLDIEKEMMLWHILYSVQDKTELEKALKSFSDKHNLGTDFVEVFKKFPLFKKEYGSYSAKAIKKLLPLMRMGKYWNENDIHERTKQRIDKIINGEYDETIRDRVREKTINLTDVKYFRSLPLWLACYIVYDRHSEANELKKWKTPQDIEDYLKNEFKQHSLRNPIVEQVISETLRVVKDIWKNFGEKDKNGEYHKLFDEIHIELGREMKNPADKRAKMTAQISENENTNLRIKALLAELKNYSEVENVRPYSPSQQEILKIYEEGILNSTIEVPDDIARIVKSGQPTKSELIRYKCWLEQGYRSPYTGEMIPLTKLFTSAYEIEHIIPQSRYFDDSLSNKVICEAEVNKEKDNALGYEFIKKNEGRIIELSYAKKVKVFTITEYEEFVKRQYGKNRSKMKKLLMEDIPDAFIERQLNDSRYISKVIKSLLSNMVRENGEQESTSKNVISCNGGVTSILKHDWGLNDVWNNIIYPRFDRMNEKTNSNGFGHWTNKGGKKVFQTEMPLELQKGFNKKRIDHRHHAMDALVIACATRSHVNYLNNESAKANAKETRYDLRRKLRRIEKIQIEKLVDGKKVLQTIDVAKEFYKPWETFAQDAHTALENIVISFKQNLRVINKTSNYYESYKDESGNLRLNKNGKPQKDSIKQVKGDNWAIRKPLHKETISGQVNLRFKKQIMLSAAIDQWEMIVDKNLKTKIKQLINEGLNKKKIQKFFADCENIWAGKDISKPELYYFSNGKEVLVASRTSLNESFKSKTIESITDTGIQKILKTHLSNFDEKKEGKIVEHPELAFSSEGIDDMNKNIKELNKDKAHQPITKVRTYEAKGNKFNVGIKGNKKVKLVVAATGTNLFFAVYIDDAGKRSYETIPLNEVIEHQKWRANLPREQVKTTSLIPTKMEKGRLLFSLSPNDLVYIPTEEQTTQISIAEIDRSRIYKFIDSSETTANFIPASSASTIFNLNKKDQEKMGINFGVQNEFGVGSPQSKNQKALSGEMIKDICIKLKVDRLGNISY

SEQ ID NO: 3642 - protein, 1683 aa, unidentified
  REGION 1..1683: note = Description of Unknown: Cas Enzyme sequence
MKKILGLDLGTNSIGWALVEIDHEKRIVRILGLGSRILNMDSSEIAKFESGAKLSSAAAQRTERRTPRKLNERYLLRRDRLHCVLNLLNTLPPHYKLSIEFENEKGKRSGKFKSGTEEKFAYSKDENGKDHFLFMNAYEKMEADFKLRHPELFYQKRNGNITKIPYDWTLYYLRHKAVTDPSFELTKEQLAWITLSFNQKRGYEKVIGQDEKVQKEGERSDTFIGKVKSVQKLQEKDIYEIVLSDINNEALELFRYKEESTIPITEIGDLKEIERVSKFNDTGEIDNSKTEYIVNEIRELLITNVQNTWQKRKENFVFEIELETGWIKEQQSRFTPKWKDTKRDFIIKTKYDEQGDRILKGADKGRNIGIPKEEDWTLMKLKTETSITNFNTKNNTVGIASFVYYNLLQNPRQRIKGDLVTVIERDYYREELDRIFVNQEKFHPELKNRILYEQAIKLLYPNNINHQKTIKELDFNYLIKEDILMYQRDLKSKKSLIADCVYEKRRYRNGETHEMVDVPIKAIHKFNPLFQEFRLWQFVKRLKILKKQDVVNNETKLNIDVTSQYLNSIEIKEKLFDYLNDKDFVTEKNILDFLSKTYNDKTIKSENYKWNLASEKEPCNTTRHEFILRTKRVNGFDYKSFLSSETEYKLWHFFYSVKRKEEFYKGLNSLFSQILEKSGLSKDYLPELVRNFSSFGGYPNDYGTYSEKAIKKLLPFLRLGKYWDAKEVENNLKKDLPDEISKKVIDKESINGEINDFQGLWVSSACYLVYGRYSEVGEVEFWNSPYDIEKYLQNEFKQHSLNNPVVEKVLVETLHLVKDVWKYYGEKLSEDEKGNPVYAKLFDKIHIELGREMKKNNKQKEKDDKQNKENRKANERIIEILKELKKENTSLEVKSPFQQEKLRILEEGLLSSIEFDKDTTEYNLPEGKISKKQIKEITTKEISKVSRSDFERYKLWLDQRYQSPYTGQIIKLSDLFDRKKYEIEHIFPQERITLNALSNKVICETEINKIKGSNTGYGFIIGANEREIFCAAHNEKIKILSVDRYEQLVTQNFIDKKREILLSKDIPGDFTNSQKVNMQYISKMAMKLLSNVVRDQDDDSYRSKNVLATNGTITSELKRHWKLNEAWNELTSPRFKRLNELTNSNLFGDYRKINGHDVFVNDVPEATKKDFDPKRIDHRHHAMDALVIASTTEEHVQYLNNISSQEENDEQKLKTRKGLKYILTNSRRGFNDEKEWYFLPPAQTKSSDGISEFEYHYKEVKSKVFKDIAKEALDNTVASFKQKNRIIRQRWNKYLKYNENGQLDIHEEENLKLKKKYNVRQALHLDTFYGKVKIQNNEKTNTNVVEVDLGTAIKDNYDFFETEIIDRIRILRDQKQSNSEIISLLSIEYPKVRVFAKFVASRFGNELTSLASSDMILKAIESITDTGIQKILLNHLENYKEKIDEEGKEIAPQTLAFSPEGIKELNQNIKSLNNGKSHQPIYKVRMADAMGKRFFPVSEELAKSSKYVATAGDSNAFCGIYENGKMRKYYVPTLRESLINLKEGYDPCPQKHPEDTDYSLLFVLNPNDLVYVPTIEESERPKLVDFNNLNSEQMTRIYKFRDGSINKHGGVQYNFMPSNWATMIFKSTKELEKIKMSNESELKGEITLTTDKDKSQNSLEGNQIRSICWKLKVDRLGNISRIN

SEQ ID NO: 3643 - protein, 1248 aa, unidentified
  REGION 1..1248: note = Description of Unknown: Cas Enzyme sequence
MKKILGLDLGSASIGWAMITEKEENGETKCEILGLGSRIIPYEGTEGKDFAKGTGESRNSLRTKARTARKGYDRYQLRRKYLVDSLLKNKMYPDETLKSLPKMQLWELRVKAVHSEISLPELGRLLLWLNQKRGYKSSRSDANMDKKDTEYVATVKSRHEKIKELNVTIGQYFYQELVKDEFFRIKENIFPREAYIEEFVAICKTQQQYHSAVLNDELIEKLRNEIIYFQRPLKSQKGLVSVCEFEGFYRIGKDGKEYFVGPKVAPKSSPLFQLSKIWENINNIKIGSRTGEDIEMTLEQKWAIFEHLDNSEKLTPSDLLKILNLKKDNCYINKQLAKGLNGNITKHAIRQCLGDSTIYESLLKLDLRVIETEKEGYIYDKKTGEIFESKPIKYIDPLIEREPFYQLWHTIYSIQDQEECSNALQNKFDIEPEIADKLAGIDFSKHAFGNKSVKVIRKILPYLMEGDGYSEAMSYAGYDHSNSLTKDENLKRKLLDQLKPIAKNSLRQPIVEKILNQMVNVVNAVIEKYGKPDEIRVELARELKQSKEERKDTEKAMNERERENERITKRLKEFGLRATRNNIIKWRLYEEIDNENIKLNAICVYCGQPISVIQAIKGNDVDIEHIIPKSKLFDDSQSNKTLAHRHCNKDKNDRTAYDFMKSKSEEALNEYVDRVNMLYANRVINKSKRDKLLMTESKIPNNFIDRQLRESQYIAKKAREILQTICHNVWTTSGTITAELRHLWGWDDVTMNLQLEKYKALGQTHIVEWESEHGKNKHEKEVITGWTKRDDHRHHAVDALTIACTKQGYIQRFNTLSASKTREDMKFEIEQRSINFKEKLSLLDKYIIGEQPLEVGEVERAVANILVSFKSSKKVAVVGKRKTGRRGDKKVVQTGIIIPRGSLSEESVYGRIKTLEVKKPIKYLFENPQLIFKLNIKTLIEERLEKYNGDTKEAISSLKKEPIYLDQEKSIILEYATCFKEEYVKKYDVNTDFNKVDKVIDGKIKEILQARLKKFDSKAKEAFKDVQGENKTLKKWYEDEGLDRPIKSVRCSTGLSAIVPVKKDPEGKDIGFVKPGNNHHIAIYKDSEGNCFEHTCSFWHAVERKKYGVPVIIRDTNQIWDKIGMQPEGTFPESFLAKLPSVRWNLSVSMQQNEMFILDMEKEEFGNLLYKNDNSLLSKSLYLVWSLSESDYWFRHHLETKNSELKSIEGAKESKRYYRFKSLGAFLKMNPIKVRINHIGQIVSVGEY

SEQ ID NO: 3644 - protein, 1442 aa, unidentified
  REGION 1..1442: note = Description of Unknown: Cas Enzyme sequence
MKTLGIDLGTNSIGWSIRNADLQENQIEKYGVTTFDKGVGEGKSGEYSFAAERTKKRAGRRLNQARKYRLWATLEVLITNNCCPMTIEQLDRWRKYNKETKRQYPNIEDFEQWIRMDFDCDGKPDYTSPYQLRAELINQKLDLALRINRYKIGRAFYHIAQRRGFKSSRKDAQPNESGDLKEIKSESKKGGEFEKGLQKQFNKSLSDFKTIGSALAYIESQGQRVRLDWIQHTFRKQYKEEITTIFEFQEIGVDSDFYKALVEKSTNRFNGAIFYQRPLRSQKGLVGKCTLEPDKARCPISHPEFEEFRALSLLNNVQYKLNGVLQRLDNNLKQEIYHTLFFRKSKPNFHFEEIRKKIEKELNLKLDYKLKTINYNDKTNISGCPVSAYLKDIFGENWKEYRRESPIIRTTVNNKSGESKCHLISYSSQDIWHILFSFDDEEIINDFALEKLGLNEDYAKKLLSAWKTLPDGYAMISLNAIKKINFFLKQDFNYSESVLLANMPEVLGGALWEENKELLMSNITSLIEQNKYEKKIRNIVNVLISHYKSLPDHQQFAFRNTQYTLDEKDKSEIIKSIIDSFGEKSWGKEAPDNKETITNKVTALYQSFFNHSKREFYTLPRVADTILNHLSEMFPQIPIKKLQKLYHPSMIEIYPESKRSDDGNIYLKSPKTDVFKNPMAMRTLHELRKLINYLIETNQIDEETRIVVETARQLNDANKRWAIEAYQRQKEAENNEFKSALKELRNNGIAAEPESDNDIDKMRLWYEQLYHNDEVNQGKGEYAQQKWGNNSTKLMVESLATKTDLEKYRLWREQQCICMYTGKFISLSDLFDENKIDFEHTIPRSISFDNSLANLTVCYAEYNRKIKKNQIPTQLPNYENEWQGYTAIKSRLKAWTEKVDQLKNNIEFWKGKSKSASDKDYKNDAIRQRHLWQMEHEYWQNKLNRFTMNEITSGFKNSQLVDTHIISKYAFHYLKTVFNKVDVQKGSITAIFRKILGIQNMYEKKSRDKHSHHAIDATVLTLIPIAAKRDELLQLFFEAQESKKMGRKDLADQIMEQVRHKLTSLSIPNIEVILNAIEENILINNIVVDQSLTPGIKIIRRRGQIVYLRNKAGNLIKGTDGNQIPKMAKGDCIRGQLHLDTFYGKIKVVKRDNNLKLMRDDFGNWIYIDKNDGFKFVLRKPITSITKIEQIVSVELQDMIKRQLNNRSLETALKEGVYMLDNNWNPIGNQIRHIRCFTDDVTNPISVKKQSYPSKHDYKNDYYSKNGENILYALYWDGISRTRGYECRSLMELANLSKINSTHSLEQFFEPFKDLGRGKSKISMPLFAILKPDMRVLFYKGNREELFELSNPEKLKRLYKINRIFDPNQGLLQFQFHLESRDDKALLIVYPEKEFGKRGKNGFSEFNYENSLPKLLLSPGKFDFLIEHKDFEIKPDGEILFL

SEQ ID NO: 3645 - protein, 1544 aa, unidentified
  REGION 1..1544: note = Description of Unknown: Cas Enzyme sequence
MKKILGLDLGTNSIGWALIEQDFDQKSGNIIGMGSRIIPMDQTSIGDFEKGNPVSQTADRTNFRGIRRLRERFLLRRERLNRVLYQLGFLPQHYSDQIDFEHHFGKFLNDKEPKIAYKLNIDTNRCEFIFKSSFEEMIEEFQKCQPKLFLNNKKIPYDWTIYYLRKKALSSPISKEELSWLLLHFNQKRGYYQLRGEDENENTNKLIEFHALKVVDVQDSGDRKNKEEIWYNVILENGWVYRRTSRLPLDWVGKIKEFIVTTELNDDGSFKMDKEGKEKRSFRSPGADDWTLLKKKTEDEIEKSNQTVGSYIYNTLLQSPEQKIKGKLVRTIERNFYREELKLILEKQQAFHPELLNKANYKLCLEELYKNNEDHRATYKDKDFVHLFVNDIIFYQRPLKSKKSEVSDCRYEFRTFIDEHGIKQTKILKCIARSHPLFQEFRLWQFLQNLKIYQREKYIDGRLYTDVNVTSDFLKTEDDWVELFDFLNDRKEIDQKAFLKYPAFRLKKNVDLYRWNYVEDKTYPANETRSQMLTKLKSSNLAPEFLTKDVEEHLWHILSSVEDKIEIGKALATFAKKYSLSGEFIENFRKFAPFKKEYGAYSAKAIKKLLPLMRRGKYWSEDGISPNTRIRLEAITERLKSINYDKNRIDEITDDDIPKQVLKSFLDCQNPFKALNTYQACYAIYGRHSEESDVVKWTTPNELDYYLKHTFKQHSLRNPIVEQVVTETLRVVSDIWQQFGNGNIDFLDEIHIELGREMKNTADQRKRITETVSVNENTNLRIKALLIELKNDPSIQNVRPYSQSQLEILKLYEEGVLNATEAIPEEISKISKNSQPTSNELTRYKLWLDQQYQSPYTGEIIPLGRLFTSSYEIEHIIPQSLYFDDSLSNKVICESVVNKDKDNRMAYSYIQQNQGKIIELDFGKQVKLFTLDAYEDFVKTRFLKNKSKLKKMLMEEIPEDFINRQLNDTRYISKLIKNLLSNVVREEGEVETTSKNVCVCSGSITSILKQDWGLNDVWNELITPRFERLNEITKSPKFGQWTNKEGKRVFQTEIPLELQKGFSKKRIDHRHHAMDALVIACATRNHINYLNNEHAHKKDDKVRFDLREKLRRIERMDIQKIENGQKIRRTINVAKEFIKPWESFTQDTRLKLSTTIVSFKQNLRIINKTCNWYQKWERQPDGSIKKIFTKQEKGDHWAIRKLMHKETVNGLVQLRFKKFVQLNAALDQWEMIVDKSLKNQIRILFKQGFEKSKIRKFFKVLEDKWDGKEISKVELYYFEKEMVASRSAITESFNSIGILSITDTASQKILLNHLVKYNEIKAGKIIEHPEIAFSPDGIDEMNRNISDLNDGKFHQPIFKVRTFETKGSKFKVGSTGNKVNKYVEAAKGTNLFFAIYQNNEDKRSYESIPLNIVIERQKQGLTPVPEINDKEEHLLFHLSPSDLVYIPTNEEQINNQSFGIQNISQIQNCNIYKMVSSSGSQCFFVRHEIASPIWNKVEFSALNKTERSIEGIMIKDVCYKLSINRLGFVKGIINGLITNNIIKD

SEQ ID NO: 3646 - protein, 1385 aa, unidentified
  REGION 1..1385: note = Description of Unknown: Cas Enzyme sequence
MEKILGLDLGTNSIGWAIRDLSEKGNQIIDKGILTFDKGVGEGKSGEYPLVQKRTESRGKRRNYQAEKYRKWTLLKALIEQKMCPLSINELNSWQKYTKGIGRKYPQSEKFIQWLRFDFNGDGKPDFEQFGFDKHENHFLFRVLAVSETGHHIQIFHNYPQILGRVFYHLVQRRGFRGRDEEEAKTILQGSKESGTIGVNAIKPFIEKYKTLGAALYYLKKERNERIRKRYNLRVDYENELKEICRVQNISDELYKKLWKAIIWQRPLRSQKGLVGICTFEKNKARCPISHPLYEEFRTWVFINNLKIDLPPEINRLTYIKEKIYPLFYHAAKDFKLSTIIKELKKVNGSLLSKFNSKSDNDTKVISVSLLYQLESLMGADWKDKYGWHETLQNQKKPCAYSFEDIWHVLFTFDSKEKLKEFAIDKLDLNHENAVKFSNIKLQQGYATLSLSAIKKILPYLYLGFIYSDAIYLANLHKVFGEKHYTHEIAEEIVTKIRYEIITKHNNEKNLSNVVNSLISDQLNSEYRFGMDKNYELVDSDKNDIEKKLKDIFGEKTWGDKSKEQKESDIEFVSSRYLEFLRKPITANKGEVFTKQNRLHDKIFDYLQKAYNISSDNKKYLWHPSEQDTYSDAIETNGKKLLGDPQPISRGFKNPMALKTLHELKSLINYLILKEKIDYDTRVVIEIARELNDANKRKAIEKWDNAREKENADYKIKIQEIIDEHKLNINAVNKDILRKYRLWEEQGKRCIYTGKPINCTELFDGTKYDFEHTVPASMSFDNELKNLTIADSNYNREIKQKRLPTECPNYDKDYTYKSVTYTAIKPRLEFIEQKVENLEMLFDEWKKKASDTKEIKDSIIQRRHMIKMDLDYWRKKLETFTCIEYKAGWRNSQLRDTQIITKYAVPYIKTAFSKVDVQRGTVTAAFREIFQVIPKLEKKDRTKHSHHAIDAAVLTLIPQAAIRDKILLKYFEEKDNHTNHIYHEKPREWSNFQTDYILSIEEEVLINFQPKHRTLTKTYKNVRKRGTQQFVKTKLSNGKWQYKLNEQGKKIPLIAKGDTIRGQLHGESSFGMIKLPEFEYNNAKKKFIPTTDGKGNFTLQKDEIGNDRLFVVKKKMILTDFKKIEDLKIIIDPNIRLYLEDEIKQRIESGKTFTEAITEPIWAFGRKNDKNGNPIEPLRHIRAKVAAGIGFLTPQKAIEIHNHDFQSKYEYKQKVYAQNEENPLCLFYEGRFEDKIERSFYNVGLFELSQLRLNKVDNLKQDNYYKKIEIGRGKNKKEIPLISILQSGQKVILYKNSIEELKDLSNKELLRRLFIIYKFNDVGSTRYIYLQNHIEARPDKELGDGDIEVVFDKYQPRLKLRANNFLCAIEGKDFEVKPDGEIVFK

SEQ ID NO: 3647 - protein, 1541 aa, unidentified
  REGION 1..1541: note = Description of Unknown: Cas Enzyme sequence
MKRILGLDLGTNSIGWALIEQLFSDRSGRILGMGSRIIPMDQSSLGDFEKGNPVSQTADRTSFRGIRRLRERFLLRRERLNRVLYKLGFLPDHYSKQIDFDHHFGQFLDHSEPKIAYQLNSETGKYEFIFKTSFDEMIEDFQKYQPQLFENNKKIPYDWTIYYLRKKALTYPIAKAELAWLLFHFNQKRGYYQLRGEEEDENKNKLVEFYELKVVEVLDSGDKKSKDEIWYNVILENGWIYRRTSRIPLDWIGKTKEFIVTTDINDDGSIKTDKDGKEKRSFRSPGADDWTLVKKRTEAEIERSKHTVGTYIYDTLLKCPGQKIKGKLVRTIERKFYRDELRLILEKQQTFHPELQDRKNYSICLEELYRNNQDHRIAFGQKDFVHLFINDIIFYQRPLKSKKSEISECRYEFRKYMDKEGVPQIEALKCIAKSHPLFQEFRLWQFLQNLNIYQREKYVDGRLYTDVNVTTDFLKSEEDWVALFDFLNDRKEIDQKAFLKYPGFNLKKNAEQYRWNYVEDKTYPANETRSQLLNKLKASNIAGEFLSRDIEELLWHILSSVDDKTEIEKALTTFAGKHRLPKEFVENFRKFIPFKKEYGAYSAKAIKKLLPLMRRGKYWSEESISKETKNRISAIVERLDTIGYDKSKINNIADDDIPKQVLKSFIDCRNPLTSLNTYQACYAVYGRHSEEGEVTKWALPSDIEHYLKHIFKQHSLRNPIVEQVVTETLRVVADIWRQYGNGKNDFFDEIHIELGREMKNTADQRKRLTSVVTENENTNLRIKALLIELKNDNTVQNVRPYSPSQQEILKLYEQGALNSVTDIPEEILKISKNAQPSSAELTRYKLWLDQQYRSPYTGEVIPLGKLFTTSYQIEHIIPQSRYFDDSLSNKVICESEVNKDKDNKTAYAYIKEYHGKIIELDFGKKVTLFTLDAYEDFVKNRFAKNRSKMKKLLMEDIPDDFINRQMNDSRYISVLIKNLLSNIVREEGEVETTSKNIAACNGSITSTLKQDWGLNDVWNELITPRFERMNDLTKSNNFGQWTNKDGKRVFQTDMPLELQKGFTKKRIDHRHHAMDALVIACASRSHINYLNNESAKSTSKDTRYDLKQKLCFKTKPDENGNYKWQFTKPWDTFTQDAKHTLSTTIVSFKQNLRVINKTSNWYQKWGKQDDGSLKKIFVKQESGDHWAIRKPMHKETVAGLVQLRFKKMIQLSAALDQWEMIVEKSLKNQIKTLVKQGFDKIKLRKFFRELDDKWDGKIISKVEIYYFEKEMVASRSSVNEAYNTNFIKSITDTASQKIMINHLEKYNEIKDCKTIEHPELAFSPDGLDEMNKNIVELNDGKFHQPIYKVRSFEPKGNKFNVGTTGNKNKKYVEAAKGTNLFFAIYQNSEGKRSYESIPLNIVIERQKQGLKPVPESNEQGDLLLFYLSPNDLVYIPNEAEKTSQLNNNQFKVLSTQETRFYKFVSCTENEGHFVPHYYSSPILKNEIGSNNKSQNSINGIQIKAVCWKLQVNRIGQIIAVNGKRVNIEPVKIEELPTEVNL

SEQ ID NO: 3648 - protein, 1553 aa, unidentified
  REGION 1..1553: note = Description of Unknown: Cas Enzyme sequence
MKRILGLDLGTNSIGWALIEHLSNERNGKILGVGSRIIPMDQASMGDFEKGNPVSQTADRTSFRGIRRLRERFLLRRERLNRVLFKLGFLPDHYSRQIDFDHHLGQFLDHSEPKIAYHLNSETGKYEFIFKSSFDEMIEDFQKCQPQLFENNKKIPYDWTIYYLRKKALTFPIAKAELAWLLFHFNQKRGYYQLRGEEEEENKNKLVEFYELKVVDVLDSGDKKSKDEIWYNVILENGWIYRRTSRIPLDWIGKTKEFIVTTDINDDGSIKTDKDGKEKRSFRSPGADDWTLVKKKTEAEIERSKHTVGTYIYDTLLKCPGQKIKGKLVRTIERKFYRDELRLILEKQQTFHPELQDRKNYSICLEELYRNNQDHRIAFGQKDFAHLFMNDIIFYQRPLKSKKSEISECRYESRRYLDKEGIMQSESLKCIAKSHPLFQEFRLWQFLQNLNIYQHEKYIEGRLYTDINVTAEFLKSEDDWVALFDFLNDRKEIDQKSFLKYPRFNLKKNAEKYRWNYVEDKTYPANETRSQILAKLKASNIPAEFLTKDIEERLWHILSSVEDKIEIEKAITTFAEKHSLPKEFVENFRKFIPFKKEYGAYSPKAIKKLLPLMRRGKYWSEESITNETKSRISAIVERLDTIGYDKIRINNIADDDIPKQILKSFIDCRNPLTSLNTYQACYAIYGRHSEEGEVIKWELPSDIEYFLKNTFKQHSLRNPIVEQITTETLRVVADIWKKYGNGHKDYFDEIHIELGREMKNTADQRKRITSGVIENENTNLRIKALLSELKNDNSVQNVRPYSPSQQEILKLYEEGALNSVTDIPEEILKISKNAQPSSSELTRYRLWLDQQYRSPYTGEVIPLGKLFTTSYQIEHIIPQSRYFDDSLSNKVICESEVNKDKDNKTAFAYIKECQGKIIELDFGKKVKLFTLDAYEDFVKNRFAKNRTKIKKLLMEDIPDDFINRQMNDSRYISVLIKNLLSNIVREEGEVETTSKNIAACNGSITSILKQDWGLNDVWNELITPRFERMNDLTKSNNFGQWTNKDGKRIFQTDMPLELQKGFTKKRIDHRHHAMDALVIACATRNHINYLNNEHARQKDDKIRFDLRNKLRRIEEVEIDKIEYGQKVRKKIKVAKEFYKPWDTFTQDAKHKLSTIIVSFKQNLRVINKTSNWYQKWKQQDDGNLKKVFFKQDSGDHWAIRKPMHKETVTGLVQLRFKKTVQLSAALDQWEMIVDKSLKNQIKTLVKQGFDKPKLRKFFKELEDKWDGKIISKVEIYYFEKEMVASRSAVNEAYNTNFIKSITDTASQKIMLNHLEKYNEVKDRKIIEHPELAFSPDGLDEMNRNIVQLNDGKFHQPIYKVRSFEPKGNKFNVGTKGNKNKKFVEAAKGTNLFFAIYQNSEEKRSYESIPLNIVIERQKQGLKPVPEINEKGEALVFYLSPNDLIYVPGEDEKNNLQSLNLRNFTQHQTSGIYKMLSSSGTQCFFIRNDIASPIWNKVEFSALNKTERSIDGIMIKDVCWKLKVNRLGQIIEVNGKPVNIEPVKIEESSEGVNL

SEQ ID NO: 3649 - protein, 1293 aa, unidentified
  REGION 1..1293: note = Description of Unknown: Cas Enzyme sequence
  MOD_RES 312: note = Any amino acid
  MOD_RES 1122: note = Any amino acid
LQRYKLRRENLIEILKEHNFITDDTILSEDGNTSTFETYRLRAKAASEQISLEELGRVLLMINKKRGYKSSRKAKNQEEGQLIDGMEVAKELYEKNITPGQFVLQLLKQGGKFIPDFYRSDLQAEFDKIWEFQKMFHAEILVDDFKKQLEIKGKLNSSKIFLGRFGIYTAENKGNDKRLQAYQWRVDALTKELTKEELAFVISDLNGIISSSSGYLGSISDRSKELYFNSQTVGQFLMAQLDNNPHTSLKNKVFYRQDYLDEFNTLWENQAHYHKVLTSNLKSEIRDVIIFYQRRLKTQKGLISFCEFESRXSRKIEVEIDGMKKIKTVGSRVCPKSSPIFQEFKIWQILNNIELFEKSSKAKRFLDQEEKELLFKELSIKSKISKSDVLKLLFKNSRELDLNYKEIEGNRTQSALFDAYSKIIELSGHGEYDFSKMEASNIIELVQDVFTGLNYNTEILYFNSSLEGKNFENQPMYRLWHLLYSFEGDDSKSGNEKLINKLSELYGFEKKYSIILANVCFQEDYGSLSTKAIRKILPYLKEGSQYDVACEYAGYRHSKSSLTKEEIENKILKDQLEILPKNSLRNPVVEKILNQMINVVNALTESYGKPDEIRIELARELKKSAKEREELTASIGETTIKHEKYRTILENEFGISHVSRNDIIRYKLYLELENRGYKTLYSNTYVSQEKLFSKEFDIDHIIPQSCLFDDSFSNKTLESKSVNIEKGNDTAFDYVFAKYGQTGLSDYIIHIEELYKDGKISKTKLNKLKMKSNEIPSDFIARDIRDTQYIARKAKNILEETVRNVLSTSGSITDRLREDWQLIDVMQELNWEKYSALGLTEIYENREGHIIRRIKDWTKRNDHRHHAMDALTIAFTKRSYIQYLNNLNARSDKSGSIYGIEAKELYRDDHGKLKFKPPIPLNEFRAEAKKHMENTLVSIKAKNKVATININTTSTKEGKNKKRQLTPRGQLHLETIYGSIQQYVTKHEKVGASFNEEQIMKVAKQKYRRALLNRLREFDNDPKKAFTGSNSFEKNPIYLDVLQTQKVPDKVETLSTEIIYTIRKDITPELKTEKVIDKKIKTILQSRLNEYSGDSKKAFSNLEENPIWLNEEKGIAIKRVTXILDNEGRTQAVDFVNTGNNHHVAIYKDERGDLHESVVSFFEACTRVNLGEPVIFRDYNKSDGWEFLFSMKQNEYFVFPNEKTGFYPHEIDLLDSENYHLISPNLFRVQKISSKNYVFNHHLETTAITGETLKNKKQLSAVTYHFIQSLPPIKDIVKVRINNIGQIVWVGEY

SEQ ID NO: 3650 - protein, 1209 aa, unidentified
  REGION 1..1209: note = Description of Unknown: Cas Enzyme sequence
MKKILGLDLGVASIGWALINVENDIPIEIVNMGSRIVPLTTDDANEFSSGNAISKNQNRTKSRTQRKGYDRYQMRRKNLTDFLRKYNMLPTEELIKLDVLELWGLRAKAVNETISLTEIGRILYHLNQKRGYKSAKSDETEDKKQKDYVANVNNRYKKIKELNKTIGQYFYDQLLKDKHYRTKDQVFPRAAYVEEFDKIWDFQSKQFPSILTEENKSIVRNEIIYYQRSLKSCKHLVSLCEFEKKSYINKEGKTVFDGPKVAPRTSPLFQVCKIWESANNLVLKNRKGEELYITAEQKLRIFNHLDNNDKLTLNDLYSTLQIKKTDGWWGGKAIGRGLQGNTTKIQLKKALGETSHFEKLLQFNLHQIDTKLVDPETGEIVQQIDSGFINEPLYRLWHTVYSIHDKKEFENTLIKNFGITEPEIIEALYKIDFVKPGFSNKSSKAIRKILPYLQIGLKYSEACEAAGFRHSESLTVAENQARQLLSKLPQIKKNELKQPIVEKILNQMINLVNQIIEQYGQLAEIRVELARELKQSRDERNATDKNMRLREKENDIYAKRISQEYELAATRTRIQKFRMWEEAKQKCFYCGQPVNVKEFLNGFDVEVEHIIPKSLLFDDSFSNKVCSCRKCNSEKGNRTAFDYMTSKSEIEFDDYLQRIEEYYKNGDISKTKKERLLTPKDKIPTDFIDRQLRETQYISRKAKEILSQVARNVWATSGSVTDFVRHTWGWDNILHDLQFEKYKITGQTEIVEYQHKNQTHTREQIKGWSKRLDHRHHAIDALTVACTKQSYIQRLNNLNTERDAMFQELKNQNEELKEKFTLLEKWLNEQPHFSKEHVQSKVAEILVSFKAGKKAASTGKRIKYANGKKIVLQEGIIVPRGALHEEGVYGRIYRYKKNESTNQVVLKPETVKKYNMGVGAQGFLFTGKETYDRKTKTDKTTGIVEFHVEDKIKKVIDSIVDKKIQSRVLERLNRGFEFGQDYKNDVKKALSNLKNLKDDPIFLNEDKKIPIKSVRCFTGRTAIEPIKYNDSGEPIAFVNPGNNHHIAIYKDRDGEIQELSVTFWHAVERKRFNIPTVIKKPEEIWDYIQTHKTVLPDSFLKNLPEPTWTYVTSLLQNEMFIYGMSADEINEKIHEKDFKTLSDHIYRVQNIATKQYFLRLHTETKDLRDSNARGLKLLIQASAKTIVENTVKIKINCLGTITVINENTI

SEQ ID NO: 3651 - protein, 1100 aa, unidentified
  REGION 1..1100: note = Description of Unknown: Cas Enzyme sequence
PISHPLYEEFRTWIFINNLKISLPPDIDKASYLQKSIYPLFYNASRDFKLTTIEKRLRKDEGIIKAKFPADTKVVSCMLLNNLESLLGKDWKENYGWEEALQNQPKKCAYSFEDIWHVLFSFDSKEKLKEFAEKKLLLNEEGAEKFTKIRLQQGYATLSLSAIKKILPYLYQGFIYSEAVYLANIHKLLGDKAITLETIKMFSSIIKDVIKEHNGEKQINNVVNGLISDQLNSEQRFGMDANYKLDDDDRKDIQLKLLNTFGAKTWEETLTEDERKDKYNFAEQHYLAFLQKPITAKKENLFIKSGRLHDKIFDYLKDTYDILDDKKHKALLWHPSEQETYPDAKEKNGIKILGDPRPISNGFKNPMALRTLHELKKLINYLLETGKIDDDTRIVIEIARELNDSNMRKAIEKFQRDREKENDEFKKKIDEINKECNTSYNREDKNLIDKIRLWNEQYFQCIYTGKIINSCDLLDGSKYNYEHSVPATLSFDNELKNLTIADIDYNMNIKGNKIPFDCPNYDKDVIINGIEYTAIQPRLKFIEEKVEHLESLLDEWINKTKFASTKEIKDACIQRRHLIKFDLDYWRKKLKSFIDKEYKAGWKNSQLRDTQIVTKYALPYLKTIFKKVEVQKGTVTAAFREIYKIQPRLEKKQRTKHSHHAIDAAVLTLIPPAATRDKILLRYNEEKDKNSNNTYHETPRNWKNFETHFVLSIEDEVLNNFQAQNRMLNDTKKNVRKRGKQQYLKYKDANNKWHYKFDEQEKRIPLIAKGDTIRGQLHKESFFAAIKLPEVEEKNGKFIPKTDNKGNFIFQTNEKRKDNIFIVKREEDLSSFTKLEDLDIVIDPNLRQYLKIEIQSRINEGKNFAQAMTEPIWAFGKPIDKNGNPIKPIRHIRTKVKGGGGGYVTNPAIIKPINSFISKQEYKRNTYALNGETAVCAFYQGIINDELERIIQPYSILEIAQLKNGNNYESIVSPHFEKTIKKAQHLIPLYAILKTSQRVLFFEEDIDELKKLSIKELGERLYMIVKFEDGRISFKHHLNSMSEEDLKKEMKKHGLADVGASAFNFKTSIPKLRLSKSSFNFAIEGKHFEIKPDGKIFFKF

SEQ ID NO: 3652 - protein, 1123 aa, unidentified
  REGION 1..1123: note = Description of Unknown: Cas Enzyme sequence
MKKILGLDIGVSSIGWAFIHEETETDHEEFEPDFIEMGSRIIPLTDNDRNQFSQGLSITKNKERTQKRTARKTNNRYKLRKHQLTEVLKTQGIELNPELFNLTASELYSLRVRALHEPVTLSELARIWYQFNQKRGYQSMRGIVNEEEDAKSDYLTAINERSKALRENNLTVGQYLFQRVKDYEQNRGLIEPVTNVIFTRQDYFNEFNQIWEAQKKTYPEILTDNLLAQIRDRIIFFQRPLMSQKHLVSNCTFEKFHKAAPKSSPLFQVFKIWQDLNNFEIKTKRGAIVDFTVEMKQNILQVLDNQFDINKTTFFETIGLSPRDHRLNFKKIRGNVTKAKVIEAFQQLNINRPDLLFFDPHGLPDEQPLFRLWHLLYSINEKNADEILLKTLKNTPYNFTETEAIGLIQKVSFKNDFGSLSSRAMRKILPFLEQGLNYSDSCEAIGIRHSNYRTKEENENRSLDEKLLPLPKNSLRQPVVEKIVNQVINVVNAILADPDLGRPDEIRIELARELKQNINQRKRTEKRNNQRQKDRKDVVKEIMKTFPDMKEKEVTNRMIMKYELYQETNGICVYTGEEMELGAVLLGQGYDIEHIIPKSRRFDDSFMNKTIADSPTNRFKNDFTAYDFMRNKGITAFEKYVEIINNLHKLKKISDVKLDNLLTTLNPIWIAEQEAKALSTDFIARQLKETQYITKQVKIELDKICKKITVTSGGITDYLRHQWGIDDVLKTINLDKYEAAGKVVDEDYQDRQGNWRTRQKIENWSKRDDHRHHAIDAVVIACTKPAYIKRLNDLNQEYDSYNAMKKDSDVKVSLTRFPQPKLKGGFLHNVIKATENVLISFKAGKKAASTSKNKKTGTVTIIPRGQLHKETVYGQRIDTNSNKPFYVVRKPLAFNKQGYFNNLAQIDKIQDDIIRNKVLKRINEYGGDIQKALSTVIYHNEEQKIPIKRVTVRSTITNPTPLGNHEGAFVNEDSNHHLSIFQKINGKYTSEINSVWDTLKRKQNGLSLLMKEHKEGHRFISTYQQGELFIYNLCYEEIEKAIEINNRKLLSKYLYRIISISRETEVGIDVYFRHHLETKKDDSDIAKNLQKFIRVKSIGKILSFTKVKINHLGKIIKVYTEGE

SEQ ID NO: 3653 - protein, 1391 aa, unidentified
  REGION 1..1391: note = Description of Unknown: Cas Enzyme sequence
MSKKILGLDLGTTSIGWAFVTEAQNDNEQSTIEKIGVRVNPLTTDEQTNFEKGKPVSVNADRTLKRGMRRTLNRYKQRRANLIDALLKKSIISGDTIFAENDKQSTHSTYSARAKAAAEKVTKEEFARVLLMINKKRGYKSSRKAKNEDEGQVIDGMAVAKRLYEEDLTPGQLCYELLKEGKKHLPDFYRSDLQAELNKVWDFQKQFYPEILSDTFRKEIEGKGQRATSAIFWKTYDFNVAEIKASREEKKLQAYEWRSKALHTQLSKEQVAYVITEINNNINNSSGYLGAISDRSKELYFNKQTVGQYLYAQLQACPHTRTKDKVFYRQDYFDEFETIWETQSKFHIELTEELKKEIRDIIIFYQRKLKSQKGLVSYCEFENKKIIVEQEGKMVSKTAGYKVCPKSSLLFQEFKIWQNLNSLIARNKSTGNVGSFDTETKQILFNELNLKGNLNKEEILTTIGYSSKEWELNYEVVEGNRINQALYTSYFKMMEIEGHEEVDWKHMPASDVKNIIKTSFASQNINENILEFDALLEGKMFECQLSYQLWHLLYSYEDDNSTSGNEKLYELLAKKFGFKKEYAQILANINFQQDYGSLSAKAIRKIFPFIKENKYSEACRLAGYNHSSFLTKDENNNRILKNQMDLLPKNSLRNPVVEKILNQMVNVVNAIINDPTLGMPDEIRIELARELKKNAKERQEMTANIAKATIGHDKIKGILITEDGIKNPTRNDIIRYKLYQELKDNGYKTIYSNTYIPREQLFSKEFDIEHIIPKALLFDDSFSNKTICVRKENLDKKNKCAFDFIGPYFGEDKVPDYCSRVEMLYQLNVKNNENGISKAKYKKLKLKAEEIGKGFIERDLRDSQYIAKKAKEMLFELCRTVVSTTGSITSRLREDWDLINVMQELNIEKYRKLGLTELIEKKDGGSKERIIDWTKRNDHRHHAMDALTVAFTKHNHIQYLNNLSAKSDKGSNIYAIEQKETEIIGENGSRKRKFKSPMPNFREEAKKHLENVLVSCKAKNKVVTKNKNKFKIKNGEKTKVELTPRGQLHKETVYGKLKQYRLKEEKIGANFNKETILKVASLKYRNALLQRLSEFNNDPKVAFTGKNSLSKNPIYVDFSKIEMLPEKVKIVFFEDDFTIRKDVNADNFKDLKSIDKVIDVGIKNLLIERWMVYKANPKEAFSNLEKDPIWQNREKGIAVKRVTISGVKNAEALHNKKDHLGKGILDENGNKIPVDFVSTANNHHVAIYRDENGELRERIVSFFEAVERANQGLSVIDKTYNNWEFLFTMKQNEYFVFPSNGFDPHDIDLQNFKNYKIISPNLFRVQTISIVQYGNTTIRDFKFRHHLETTVDDKRELKDITYKQIKSLTPLEKLVKVRINHIGQIVKVGEY

SEQ ID NO: 3654 - protein, 1333 aa, unidentified
  REGION 1..1333: note = Description of Unknown: Cas Enzyme sequence
MHDIYKNTIMSDKTLGIDLGTNSLGLAIRENDEISWFGVRIFQKGVGFNKSGEFSRAAERTSHRASRRLYNARRYRKWATLKVLIKHDYCPLSMQELNTWKDYDKGRKYPIENKQFDQWIKLDFNKDGIQDYKSPYQLRKELIETKLDLENIQDRLKIGRALYHIAQRRGFKSSRKSGANEKSSVYEGSKETPTVPVNEYIELIEKHGTLGAALAVLENKGERVRQRYTLRKHYEEEVVKIANFQNISFEEEIRKAIFYQRPLRSQKWAVGKCTLEKNKTRIPISHPLFEKYRAWCFLNNIKFRKSAEEHWEPLPIEVKQQLLKDEFYKLSPSFKFKNIIQNLNKKKYFKFKIYHNSKNDCNINFSPETTVSSSYISARLAKVFGEKWEDYTIEVSGKDHAKTTVYSIEEIWHTIYSYDDEDIFHDWCSNRLKTTEEQLEQLIKLWNSIPQGYGNLSKRAITNIMPFLEEGIIYSRSVLLAKIPDLIGTKTFKKSKDEIYEALEIIIHQVKRHNLCANITNNLIASYHNLPPSEKFAYKDFDYTLDATDLENIDKGIIKFLGKKTWVAYEKEKQQKWLESVKEMYQSFFKDSKRSFIKRIRQYDELQLFLMDNFDISKKNVEKLYHPSQTTLYPKVASNDDGHFLLPSPQTSSFRNPMAMRTLFELRKAVNALIKNNLIDEHTRIVVEVARELNNANERNAITRYQKNRETENQKFREEIRAHLKTESINVSPEMVRKYRLWMEQEKKCIYTGKTIGLSDLFNGNKIDFEHTIARSQSFDNTLANQTVCFSDYNRGIKKNKLPCDLPNYENDTADGEAIKPRLVIFEKQIQKFKKRMEAANSAVKGASTPDQKDKAIQNRHIAKMHVRYWNDKLYRFRMTEIKEGFKRSQLTDTQLISKYALQFLKSAFQRVDVQKGAHTSDFRKIFGIQERTEAKNRSKHSHHAMDAAVLTLIPKGKAKEVILKQYYSALEKGKSFTRKPYPNFKYDTIAKIETECLINHSTKDQALNQTRKKEKVRSKTLWKQGDTIRGRLHQDSFYSKIRVVERDKDGKPLRNVDGTWKYQTGKKEYQFAKRQAVENITDLKKIVDPHLAKMISKQQKGRSLAKTLKEGVYYLDKKGKPLHKIRHVRCWSKVTEPLIIKKHLHQSKKDYKQFYFAPNDTNYAYLLYEGIVKDKLIRKYDIINLFEASQLIDSEQKAGFEHPKSVIINKKGDSIPIKAVLKQGAKVIFYRTEREEILEYSRSDFSNNLYHVLKFRKDGLITFQYHLEARNEEQLAIDFPVLDFGKRGRNGFSAIQEEFIAPRLLLSPSNFNFIIEGIDFKIDEIGNVRLHD

SEQ ID NO: 3655 - protein, 1337 aa, unidentified
  REGION 1..1337: note = Description of Unknown: Cas Enzyme sequence
DEGQLIDGMEIAKKLYNENLTPGQFCLQLLRADKKYLPDFYRSDLQVEFDRIWIKQAEFYSDFFTEKLKDDLCGKNEKATWAICKENFKWQETEKVWNNDGGKNEEVVTEKTLVGIKREGNAQEQKVENFEWREKALFEKMHMEQIAIILSKVNSQINNSSGYLGAISNRSKELYFNKQTVGQYQMAVLAENPNVSLRNMVFYRQDYLDEFNAIWDKQTEFHSQLTEDLKQEIRDVVIFYQRRLKSQKGLISFCEFESRKIEVEIDGKKKTKTVGNRVIPRSSPLFQEFKIWQRLNDIEIFPANEKNKKRKPNARKLEQEEKELLFTELSVKEKLSKDKILSLLDLQEFDMNFNSIEGNKTQYELFEAYKKIIELSENKIGDDFTVETIKEIFEKLKINTDILCFDSQNLLDEEPLYKLYHLLYSFEGDKSNSGDENLINKLKELYGFEKEYARILAGVEFQSDYGNLSAKAIRKILPLMKMGQDYAAACSNIYERHSASSLKKEELEKKVYKNQLDILPKNSLRNPVVEKILNQMINVVNSIIADPQLGKPDEIRIELARDLKKSADERFLLTDNVKGNTEEIEKIHKTLKEDFGITNPSRNDVIRYKLYKELLVNNAAHTLYSNTYISPAELFSKKFEIEHIIPQSRLFDDSFSNKTLELKSVNIEKGNKTAIDFVKEKYGESGLTDYLNRIIAIFGTKATKKVLTNRATGNKSVKSETKTFDTLQKEYIKSLKKKQKEEWENLSENDKKIRIINKYFSNKLKKLVITENELPEGFIERDLGNTQYITKKAKTMLGDLVKFVVSTTGSVTDRLREDWQLVDVMKEINFPKYEQLGLVENEERIDYETGEVRYVKKIKDWTKRNDHRHHAMDALTVAFTKRQFIQYLNNLNARRTSEEQSISNTSKDDQDNFAITSEDIILNTRDVLGIEQKELYRDKKGKLRFKPPMPLNEFRAEAKKHLENTLISIKAKNKVVTQNINVTKKSGETNKKTQQTPRGQLHMETIYGSQKQYVVKEEKVGTTFDEAKIATVSKPVYREALLKRLQENGNDPKKAFGGKNAPAKNPVFIDDARTEQLPEKVKTVTFETVYTIRKEISPDLKLEKVIDVGVRKILENRLKEFDNDPKKAFTNLDENPIWLNKGKGISIKRVIISGISNAESLYVKRDKDGKLVLDENGNKQAVGFVNTGNNHHVAVYRDAEGNLQENVVSFFEAVTRKNLGQPVIDKHHNASVGWEFLFSMKQNEYFVFPNEKTGFNPKEIDLFNPENYALISPNLFRVQKFSNKNYVFRHHLETTVANFSPNLKGVTWTDFRSSKGLDKIVKVRVNHIGQIVSVGEY

SEQ ID NO: 3656 - protein, 1501 aa, unidentified
  REGION 1..1501: note = Description of Unknown: Cas Enzyme sequence
MKKILGLDIGTNSIGWAFIETNAYENPETLTGKIYQLGSRIIPMDGDAMSKFESGNPESKAAGRRQARSARRLNQRYKLRRTRLIEALKIVGWIPKDFPRDFKNLSSHSINNYLPLSEELKKEAAEFFNTSKRKTTKGVAYEISDDWLIYFIKTKALHAQVTLPELARILYHYNQRRGFKSSRKDNKLMIDEVNEIKYPIYDKWVEIVTVTAIEDKGKGEGKDREFTFYELTCKTANLEFKAIKKRRNPLDWLNKNIEVEITRKTTKDLTVNFTISEVDPNAWESRKAALEKDIAKEDLSISEYYLNNIKKALQENSAYRIKQRIVDRKFYQDELKKIWATQSQFYINEFTNKDAVSEIANSFYIYNKEKNKELKGKDLFHIFFNDIIYYQRGLKSQKGLLANCHYETKSYKTKEGQKKVAGVKVISKSAPCFQEFRIWQTIHNLRLIKKEEIVDGKLKLNIDVTNLFLTEENKEKLFALFDSTTEVSHDSILRLFGFKKDIIENGEKTFSYKLNYPENKDFQGNETKSLFRRIFKKHGFEEKGEKYLENPQLLNHLWHIVYSLPEEKEIINALSNKKYFDFPESIITHISKLPEFKSQYASFSSKAINKLLPLMRTGKYWNKDFNQQTLNRIDKILTGEFDENIPDKTRDEVNKLNLKSVDDFKGLPTYIAAYIVYGRHSERANETKYETVDDLKVKELIPYNSLRNPVVEKTIRETLSLVKDIWSNEKLGRPDFIHVELGREMKNNNEDRKKIADVNFKNMIEKERIAALIKELKYPNFNENSIADLDKFRVWKDNGGQEGDQKFEELFKSNKAEFVKDAEIEKYKYWAEQNYRSPYSGKAIPLSELFTEKYQVDHIIPRSKFYDDSASNKVVVESTLNDLKGNRLAIQFIEDSQGRDLGVQSMGDYIKFVDEVFTNKKKKRHLKLYEVPEDFIERQMNDTKYISRTIAQFLRPVAIGNETDEGVVYTSGNITSDLKGKWGLHKLWKEMLKPRFERLEEILGEQLIFPNEEHNGDYRFGKDYKRVDHRHHALDALVIACTSRSHIKYLNSLSSLSNNKKDIAKYGEWAKWKYLLNKRKQLENKEAGMTEFDVPWDGFYEAAKEALNEVIVSHKPTSKLISKAINKYYKWKETDPGKWEKKIHYQAAPKDDDKYWVAVRQSLFGQPYGKIHIAEYKKGVDIKSAIKAQIQFLKRDEYKWNTEDWRIAKSSIRKKADAVICKFNKDEKQILKHFEVNPLLDEAGSKIEKLDLLQFKKYASKRVAIDESFTEDKIKNMPFAELEKNWLTKLLKEHLAEYGDSKAAFKGEALEMLYRKSPFPINKVTRKESGEKIEKNNKLLDGDKGVNQYFIVEIRKEIDKKTGEEKTVRKYSTPNFLDCIERLAKGLPVHDENPNSQYIVLSPGDLVYVPKDGETAANIDWNNKKAVAERIYLMKSSGESKCYFLPAFVSSLLLYYDAKAKKGEFESTNKSEKTIDGTQTIKENFIKLKIDRLGNIKPAEH

SEQ ID NO: 3657 - protein, 1598 aa, unidentified
  REGION 1..1598: note = Description of Unknown: Cas Enzyme sequence
MKKNILGLDLGTNSIGWALIEQDFENKEGRIFGMGSRIIPMSQEIIGDFNKGNSTSQTAERTRLRSARRLRERYLLRRERMHRVLHVLNFLPEHYSEKIDFDNRFGQFINESEPKLAYKPYWNNERNKYEHKFLFTATYEEMLDDFRKNQPELMDRKNRKGEHYKIPYDWTLYYLRKKALTDKIQKEELAWLILNFNQKRGYFQFFDDNVDNDSNIKEYVATLRVVKVEKGEKDKKNDKKNWYSIHLENGMTYSAPFADEPQWLNTEKDWFITEELDESGNIKIVKDKKNDKEGKEKRRITPLPTFDEIELLSKKEQDKFYGKIKIRTEVTIDRSGKKVGEYIYDTLLKKPNQKIIGKLIRTIDRRFYKDELTAILEKQIQLQPGLFSDELYNDCIRELYRNNESHSIALSKKDFTHLFTEDIIFYSRPLKTKKSTIGNCSLEYRWYFKEDKDRNMVKTKAYLKGIPKSHPLYQEFRVWQWMYNLRIYRRDNDSEVTNDFIRSKKDLEELYDFLMSRKEINCKDIIQHFLKPLKLKTKELRSEIEKYRWNYVFDHEKGESKSYPLNETGYNIRKYLSKVIENPDDFLTREIEQTLWHIRYSVSNPDEYKSALTHFAQKHHINKDSFVDQFIKYPLIDREYGSFSEKAIKKLLPIMRIGNYWSWDAIDQNTQSRVEKIITGEYDEKIKDRVREKAIHLTERTDFQGLQLWLAQYIVYGRHSEAETIGKWRDVSDLDKYLQDFRQHSLRNPIVEQVVTETLRVVKDIWLQFGKGAESYFDEIHIELGREMKNSSDDRKAITDEITKNENTNLRIKSLLVELNNQHSISNVRPHSPSQQEILKIYEEGVVASIKGKTYKESEKLQEEEDAIMLKIATTAQPEKKDLNRYLLWLEQKYLSPYTGRVIPLSKLFTEEYQIEHIIPKSRYLDDSLSNKVICESAVNQLKDNQLGLEFIMNHHGEKVETGSGAVVEILSEEGYKKFVNDHYLKSRSKHSKLLLTDIPDKMIERQLNDTRYISKFISNLLSNIVRSDNGSDDGLNSINLIQCNGKITTQLKRDWGLEDVWNELILPRFERLNINSKSTHFTSWNDRHQKYLPTVPLELSKGFSKKRIDHRHHAMDALVIACATKSHVQYLNNENAKSQKFHLQQGLARKLKHIESVQITKMKKDGSGVWVKGGEKFIKEVPKEFIKPWDTITQDTLYALSEIITSYKHNNRVIRKANNEYEKYSEKRGKKSKVLVKQIKGDNWAIRKSLHQDTVSGLVKLKHIKVPDGKNLTATRKRITDEFTVKTIESITDTGIQKILLRYLEAKNSDPKLAFSAEGLYELNKDIGKYNNGKSHQPIFKVRIFELGSKFQLGQTGNKKDKWVEAAKGTNLFFAIYENESGKRNYETIPLNFVIERQKQRLGPVPELNRQGWRLKFYLSPYDLVYVPTRDQIENNGTIDWSNKKEISERTYQVRKFTNKSCYFLQSRIAHLIVPYSAESKFGEFESQNLSEKSLDDLKIADVCIKLNVDRIGNIINNKASVYTKSEAHSAVSEFNAGFQHSVLKTAGSFDEMNESDAAEKASIPPELHMKNAVEQIKRIYKNELNKPIDKKLKFRK

SEQ ID NO: 3658 - protein, 1333 aa, unidentified
  REGION 1..1333: note = Description of Unknown: Cas Enzyme sequence
MKTILGLDLGTNSIGWALIKENNNILQNIEGLGSRIIPEKEEHRDYESGREISKNAERRRNRGSRRLKERYHLRRDNLIRLCKILDITPKGLEPLFRNISLSSKLKLPNGAFKKGDVQYKPHELYELRTRALVEKISLSELFRIIYHLNQRRGFKSNKKANSQDEQNENILVDDGTKKPEVTIERVRIVSVEPTGERKGKQNKEEFRVTLEDGRAATTDKSIFKKFEGETTILEIKKEILKSTKETKYNFSIPSKWKRNRKELNDAIIASGGFPGKYFYEEYLKAKNEGRLYEFKVRESIVNRELYENEFQAIWDKQNELWKNEGKDINFLPSYQKAIESIVPANNREEKNKWVQKGLGEFIKKYIIYYQRDLKSQTKNIGDCRFEERYYEVIDEKTGEITLKRDGPKCCPKSHPLFQEFRIWQQINNLICRNEKEEEFQLDEKSKVALFNYMNEREDAEPEEILKFLKKQNPSVESINVVKTWAGNKTLHFFRKIFKAFDYDGTNILNNPEKYFKLWHLLYSVGDEKGIQNGLKKIDDKFPETLIKKLCEIDYKEKQYSSLSIKAIKNLLPLMRCGELFDESNLTEKCKTRINQFLNDELDDEFDEKTLLKLKEKKNISDFKGLSYYQAVSLLYGKHTAKQGERYEKPEDVLPIPQHSLRNPVVEQVVNETLMLVKDIWKKYPELKNGEIRIELARDLKSSKEERQKISEAQERNKQANQEIVREIRRHKGENYNPTLAEIEKVKLWKEMKLRSPYTGKVLTISEVLSENTEIDHIIPRTRFYNDGLINKVVCESHINADKGNMTAYEYMNSGTRCQNEKLSYEDFLLLIKDFPYSKRRMLTLKEIPDDFIERQKKDTQYIVTRIKEELGKIVGIQNVKTTTGSVTDYLKEQWGISELMKRLIRPRFELLQKKFNIPLVSEENVVGRDDKPTGKKRTVIKGYSKRFDHRNHAIDALIVACTRQGIIQQLNLLNQITKGKTKQIEETIGDSLRKFIPPTGREDKNANMFCRLVEEAVNSIIVSYKNRKRLVSKGINWYQKYIPENGKIGRVKQDNAKLWAVKGQLHKETNYGIINYKGTMRFTSRCELSALTENKIDNIPDESLQKEIREHINKPEYGDIKKAFGPEGIIEFNKNRKVPIFSVTVMEDGAADEVKGKTFLYDKERKLAVEKGGNYCVAVYEHTETKERKFDVVSFFDAVLLKTSGENPFQTEKGIEYEKDGYKFLFTLTHNDLVYVTDDEESIEHVDWNNKRALFNKIYRLVKFSGTDLYFQPHNYAKEITIHEGKANTAKDYKGEFNKGTNGTYYVIGTHKLIRDHCIKLNVDRLGNIKPAV

SEQ ID NO: 3659 - protein, 1717 aa, unidentified
  REGION 1..1717: note = Description of Unknown: Cas Enzyme sequence
MKKILGLDIGTNSIGAALINIPKEFSDYGKEGNIAWIGSRIIPTDGDYLQKFESGAQAETKAAFRRSKRGARRLKHRYKLRRTRLIKVFKALGWLDENFPLDDSKQFNKNINENGYSLKISDYLPFSGETISEFEKELGIDGKKSKKGKSIVPEDWIIYYLRKKALTTKITIHELVRVIYMLNQRRGFKSSRKDLKTTNVLPYNEFIEKNNKKEWGEEGIETQFVVITKIKSVTFKEEKKDKKGYVVSNTYAIEAEDQRMKTWEESRKEKPKWADDKDDNNKEIEKKEFTFLVTHKVDKDGKLTQLKPQLPTNDDWALCTTALSEKMQEGNQHPGEYFYNQIKEAYKANRNFKARQYPVYRWRYKNELDAIWEKQCELNKELNKFNAANATLTKLAEVLYPTQAKNNMPKLSEFQKHDLLHIISDDIIYYQRELKSQKNSISECRYEKRKGIDGEYYGLKCIPRSSPLFQEFRIWQDIHNIRVLEREVKVDGKTKLDVDVTASFVNDEIKEKLFDLFNSRATVNEKRILTLLKENHPNSNIKLDIDKKEKIHSHRINLFARRDELKGNETLSRYRSLFDKAEFDGKEIVNDKEKLMKLWHIDYSITSSDEEKSRKGITTALNKLLPDNSNKEKVIELFTKLSELKKEYGSFSTCAIKKMLPVMRCEKYWNEQDITPTIKERATQIKQRLDDINHSIKRISEIADDDVQKQVLKSFIEKTDLAKGLNTYQAGYLIYDKHSEKDKAVINSIEEFGKYIQREIPNNSLRNPIVEQVVKETMFLVREIWKKYGEIDEIHIELGRNLKNNSDERDKISKAQDKNFTEKQRIKKLLYELINNGFHQYKEGTEIEDVKFEVTPNPESPADIEKFRIWRSLSKGTEKEFKDLLEKEKKDNKEYIPTTGEIKKYALWLSQHCRSPYTGKIIPLSKLFDINQYEIEHIIPRSKMKNDSFNNLVIAEWGVNKAKDKQLAANFIADSKGKCKYGDTEYKLFTYEEYDVYCKDVFKFQKAKRKNLLATEVPEDFVERQLNDTRYIGRKLSELLAPVAKNENGILFTGGMITSELKNNWGLNRVWKELMQPRFERLEKITGNNYIVHDKDEHNNPVIHFNVKENEKLDLKRIDHRHHALDALIIAATTREHIRYLNTLSAADTDEEIKNFKRTLVKSKIRDFKQPWDGFTKQAKDKLEETIVTFKTSNKIISTPTNRTASWKTESEKQPKKIFKEQKQNAKWMAVRRSMFKEPLGVIQLKETKMVPVKDAFEIEIERQLIDKDLEKRKTASYVYDQYARQIIKELIKRCNSGIDEKDSLINEIEEYLTKNSKKIETGKVNKKGKPQYKTLYQLAEKEYEAIEVAHFIPYKTKRMDLTKKDYVEKLTIEKMKNDFPYFSFINKNYFDSLPNEKQLIITDADLTISPNRKTSAFNLLMLDHILEYNNVPKEAFNAEGLEKLNKKAIENPKIGKEIKSITRLDGTVDIEDMFNGGFYETDKGAMAYFIMYENPKIKKRTDYRSIATHKAIEKIVKGDPIAEDRDGFDKIILSPGDLVYVPTKEEIEGKKEINWINKKEISERVYVMRKSTGKQCYFLKSRISDLIISYDSDSKTGEYGSQNLSEKSDDGIKIIDVCIKLKIDRLGNISKTGSYQTSSTTNNNAVSEPEVSYTKRNWTLKSFNSFEAMEDDQLAYYAAMPPIERLKALKELTLNAFGFKHESEMNAPDRKLKFDE

SEQ ID NO: 3660 - protein, 1470 aa, unidentified
  REGION 1..1470: note = Description of Unknown: Cas Enzyme sequence
MKTILGLDLGTNSIGWALTKQDFAAKSGEILGMGSRILPMSMDVLGEFEKGNSISQTAERTRLRSVRRLKERHLLRRERLHRVLNVLGWLPRHYAASIDFDKRLGKFLPDTEVKFAYGPDGFIFKTAFEEMLADFRHQQPQLVTGGKKIPYDWTIYYLRKKALTLPVSSQELAWLLLHFNQKRGYYQLRGEDADEQSNKSEEFYTLAITDVTADEPQKGKSEIWYNVTLENGWVYRRASKTPLFNWKGSVRDFIVTTEFDEDGNVKKNKDGVEKRSFRSPAEDDWKLRKKKTESEIDRSRKTVGEFIYDTLLQMPDTKVRGALVRTIERKYYKDELQRILSFQATVNPVLRNATTLKACIDTLYPHNAAHAAALGAKGLEHLFVNDIIFYQRPLRSQKDTVSDCPLESRTYIEDGIKVVRPLKCVSRSHPDFQEFRLWQWLSNLRIINRRTDADETDQLLPDSQSRAALYHKLSQRKEIDQKTLLKELGKKEATHRWNYVEEKRYPCAETVHLIVSRSAALEEASLFNDHNLRLELWHIIYSVTDKVEYEKALRSFARRHSINEDAFCEAFRKVPPFPSAYGAYSLKAIRRLLPLMRVGSCFNEADIDTRTLSRIDKILTGEYDESIRTRVREKAMALNAVSDFSGLPEWLAKYAVYDRHAESSDTDRWTSVADLEEFLRTFRQHSLRNPIVEQVITEALRVVKDIWRRFGDGKEGFFDEIHVELGRELKNPAGAREEMSRRNLANENTNLRIKTMLAELLYDNTPNVRPHSPMQQEALKIYEEGVLLAATDLPDDIARISKMATPSRAEVQRYLLWVGQRYRSVYTGAVIPLSRLFTPEYEIEHIIPQSRYFDDSLSNKVICEAAVNKLKDNQTGLEFIRHHHGQIVSLSNGNSVKILSEEAYTTFVNEAYAQNRTKKVKLLSEDIPEKMIERQLNDTRYISRYVMHLLSYIVRQHTNDDGVIAKNVLAPTGQVTSALRHDWGLDHLWNELILPRFIRLNDMLKTDQFTAYSERNAKLLPVVPPQYQRGFQKKRIDHRHHALDALVVACATRNHINYINNSSALSEKRGRKDATGRYDLRASLCEKVYNQGEAGNYSWRFVLPWNAFVPDARDMLSKIIVSFKQNTRVINTTRNATAKIENGSRTHAPQTKGEHWAMRKPLHKDTVFGKVALTLKKEVSFAQAADMPQCITDSALRKHLLQLQADGLDKKKIVKLFKDNNYLLGGKTYSRVEVTYTDDTNVAVRKPLDTSFTDDKILSITDTGIQQILLVHLRKSGSAELAFSPEGIEEMNRNIVQLNIGRPHKPVLKVRVFEPMGNKFAVGQTGNKTTKYAEAAKGTNLFFAIYADENGKREYETIPLNVVAERLKQQLGPVPPLNDKGKKLLFYLSPNDLVTVYENGDNHAGDSEFIYKIVSFTGGRLYGIPHFVATSVVDKVEFTQLNKMEVSLTQISLKENCRKIILSRIGEVIR

SEQ ID NO: 3661 - protein, 1434 aa, unidentified
  REGION 1..1434: note = Description of Unknown: Cas Enzyme sequence
MPQKNILGLDLGTTSIGFAKVIEDENYQNSSVGLIGVRVNPLTTDEQTNFEKGKPVSVNADRTLKRGMRRNLDRYQLRRDSLIEVLKTHKIITNDSILAEDGKGTTHSTYALRALAATAQISLEAFARVLLGINKKRGYKSSRKAKNDDEGQVIDGMSVAKRLYEENLMPGQLAYQLLKEGKKHLPDFYRSDLNAEFDKVWNFQKQFYPEILTAEFRKHLEGKGQRATSAAFWGKYAFNTADIKGSREEKKLKTYEWRSRAVNTQLSKEEVAFVITEINNDLNKSSGYLGAISDRSKELFFTGQTVGQYLYKQLAENPHIRLKGQVFYRQDYLDEFEKIWETQAQYHAQLTPGLKEEIRDIIIFYQRKLKSQRGLISLCEFESKEADIEINGKKTKKRIGLRVAPKSSPLFQEFKIWQVLNNLQFKNKETKEVFVPDLGAKQQLFNELNIKGNIAASEAIKILGYKSKEWEANYNILEGNRTSYVLYNAYLKILELEGHDENLLKLAGSDDVDVSKIEKPASDIYKMVQSSFEVFGINSSILDFDAELDGKAFEQQSSYQLWHLLYSAEDDSRKYSQEDIFTYGNDNIGLKKKLCEKFGFKPEHAKLLANIAFKEDYGNLSSKAMRKVYPFIKELTYDKACLEAGYKHSASSLTKEEIANRALKPRLDLLKKNDLRSPVVEKILNQMVNVVNTLIDDENAKRKVQGLPEDFHFDEIRIELARELKKNAAERAEMTSNINSAKALHEKIVKELQSEFGVPNPTRNDIIRYKLYEELKNNGYKDLYTNTYIPREILFSKQIDVDHIIPQMTLFDDSFSNKTVIFRKDNQDKGNQTAYDYILTKYGEKGAEDFINRITLLHELGKKNKEDGINKAKFQKLQKRQSEIGDGFIERDLRESQYIAKKAKTMLLEICRSVVSTSGEITARLREDWGLINVMQEINMPKFRALGLTEMIEKKDGGQKERITDWSKRNDHRHHAMDALTIAFTKHNHIQYLNYLNARKNEQHKQHHNILAIEAKETEIVVDDLGNKKRRFKSPMTGFREVVKEHLENVLVSHKAKNKVVTKNKNKTKSKNGEKTKTELTPRGQLHKETVYGKYRYYESKEEKVGIKFDTATIAMVANPLFKKLLAERLSGNDNDPKKAFGGKNALSKTPIYLDEERRDIVPEKVKLIWLEDDYSIRKDVTPENFKDEKTIEKVLDIGIKRILLKRLKEFNNDAKKAFSDLEKNPIWLNEARGIAIKRVTISGVKNAEPLHYKKDHFGNAILDENNKPIPVDFVSTGSNHHLAIYRDADGNLQDRIVTLFEAVELSNAKEPIVDKAYNHGLGWKFLFSMKQNEFFVFPNEKTGFDPNNIDLLNPGNKRIISPNLFRVQKLSRVEYGNAVVREFVFRHHLETTVEERKELKDITFKNIKSLGYFENIVKVRVNHIGDIIKTGEY

SEQ ID NO: 3662 - protein, 1769 aa, unidentified
  REGION 1..1769: note = Description of Unknown: Cas Enzyme sequence
MKKILGLDLGTNSIGWALIEQNFDKKEGSVIGMGSRIIPMSQDIKDEFGKGNSVSQTADRTKFRSVRRLRERHLLRRERLHRVLNVLGFLPEHYANDIDFEKHFGKFKDETETKLVWKKNGKKPNGKDKFEFAFQSTFEEMLNEFKKSQPDLLNKKNKKGEEFKIPYDWTIYYLRKKALTQKLAKEELAWLILNFNQKRGYYQLRGEEEEENQNKLVEFHSLKVVEVKAEIKYILTLENNETYYRLSETPLLDWKDTNRDFVVTTYLETDGTVKKDKDGKEKRSLFLKDDLVFIKKKTTKITKSTKNKNETVEEKSIKIIDVKEEKQNEIWYSLILENGWIYRRQSKVSLEDWKGKVREFIVTTDLNDDSSIKTDDEGKESRSFRAPKEDDWTLIKKKTEDDLSKYIGEYKTKNGIDGTVGTYIYDNLLRKPNQKIKGKLVRTIERKFYKYELREILKKQIVLQPELFSDDLYNDCVRELYKNNEAHQLQLNKRDFIHLFLDDIIFYQRPLRSQKSSIGNCSLEFRLHKINKKDDKGNSIKNEFEKDENGKDIEVKEYLKVIPKSNPYYQEFRLWQWLYNLKIYKKEDDTNITADFITSNDDKITLFDFLNSRKEIEQKPLIEFLVKQRELKNPANNNLNKKVQTALSKKIKEETEKYRWNYVEDKKYPCNGTGTQIRTRLERVTNVSVSFLTREIEQHLWHIIYSVTDKNEFEKALKSFSKRHQIDETSFVENFKNFPPFISEYGSLSEKAIKKLLPLLRIGKYWNENAINDKIKKRANSISERLKSISKKEDIENISDDDIQKQILKSFYGLTDLTQGLQLYQASYLIYGRHSEASDLQSWNSVADLEKYLKEFKQHSLRNPIVEQVVTETLRVVKDIWTHYGKGVENFFDEIHVELGREMKNTAEDRAVLTKQVTSNENTNMRIKLLLAELKNDTTIEGVREYSPSQQEILKIYEDGVLNSNVEIPNDISEILKKFKESDIKKQPTKTEVNRYKLWLEQKYRSPYTGQMIPLSKLFTEAYQIEHIIPQSRYFDDSFNNKVICEAAVNQLKDKQLGLEFIKNHSGQIIDLGQNQSVTLFTEQQYTDFVKEHYDKNRSKRTKLLLDEIPDKMIERQLNDTRYISKFISSVLSNIVRANKDDDGVNSKNLLPGNGKITSELRQDWGLNDVWNDLILPRFERMNELSQSNHFTATNKEGHTIPAIPLELSKGFQKKRIDHRHHAMDALVIACATRDHVNLLNNQSAKSDNSRYDLQRKLRKVEKWTDKEGKERDKFTDFYKPWSTFTQDTKNELEKIVVSFKQNLRVINKASNHYEKIINGKKVLVKQEGSNWAIRKPMHKDTVSGLVQLRKTKTVSLSVALENYNDIVDKTLRKHILSLINQNYDKKKLTKYFKDNENKWNNRDISKLDIYYLENDNVASRVNLDISFNKERIEDTITDTGIQKILLKHLINYEGQTDEKGKAIAPETLAFTPEGIDEMNKNIITLNNGKSHQPILKVRTYEPKGNKFTIGETGNKKDKFVEAAKGTNLFFAIYEDENGNRSYETIPLNIVIERQKQGLCSVPEQNEKGHALHFHLSPNDLVYVPQVDENLDAINFGELTIEQSNRIYKFTDGSGIMANFIPSKIAEVIFNINKLKQESLKINYPIQNEIGVGSQGSKNERAISGEQIKSICIKLNIDRLGNITPSKKTNQKSTSSFVNEEHSIYYNKVTFNNLQQSDEKMFMHTANMNPEERMAYLQKLRETTQENISEAEKRAILNQIKINPPDENT

SEQ ID NO: 3663 - protein, 1521 aa, unidentified
  REGION 1..1521: note = Description of Unknown: Cas Enzyme sequence
MRKKILGLDLGTNSIGWALTEINGNAGFIINAGSRIIPMPQDILGKFDSGVSISQTAERTGFRSTRRLRERHLLRRERLHRVLHTLKFLPEHYAEKIDFKRRLGQYFPGTEPKIAYRYNEESKKATFIFQKSFEEMLEDFAKHQPQLLKEGKKIPYDWTIYYLRKKALTEKIENEELAWLLLHFNQKRGYYQLRSEEDEEIANKLVEFYTLKVIDVIDSGDRKGNDETWYNVHLENGWIYRRTSKVPLDWIGKSKEFIVTTDLNDDGSIKIDKEGKEKRTFRSPAENDWTLVKKKTEQEIEKRKETVGEYIYESLLLNPSQKIRGKLIRTIERKFYKDELKRILEIQQSLNPALQNREIYKACLEELYEYNENHKKIINEKDFVHLFLNDILFYQRPLKSKKSLISDCRFENRVFVKDGKKEIQSLKCIAKSHPLFQEFRLWKFLQGLRIYQREKEIDGKLQTDIDVTVELINSNNKMTSLFEWLNDRKDVEQKPLLNWLLKPLKLKADDYRWNYVEDKTYPCNETRALILSRLAKVKNISDSFLTEEKTEALWHILYSVDDKIDIEKALNTFANKNNLAKEFVEVFKKFPPFKNEYGSYSAKAIKKLLPLMRIGKYWNVEKIYPETKDRINKIISGEFDKTIRDRVREKSKYLEAIDDFQGLPEWLATYIVYDRHSEAALTNKWNKVSDIKPLEQHSLRNPIVEKVINETLQVIKEIWKQYGNENQKFFDEIHIELGREMKNTKADREKISKQISENENTNLRIKALLMEMLNDTSYENVRPYSPMQQEILRIYEEGALNAELGKTPEEILKISKQAQPSFTDLTRYKLWLQQKYRSPYTGEIIPLNKLFTPHYEIEHIIPQSRYFDDSFSNKVICESIVNKLKDNQTGYEFISNFKGTIVTELSTPTKQVKIFNIEGYERFVKENYSKSRGKMKKLLMDDIPEAFIQRQLNDSRYISKIVKNLVSNIVREDNELETVSKNVISSNGTITSVLKQDWGLNDVWNEIITPRFERLNSLTNSNKFGEWVNKEGKRVFQTQVPLELQKGFNKKRIDHRHHALDAIIIACVTRDHINYLNNESALGNKTKEEKESRRYDLRHKLCFKKYNDDATVNYKWVFKKPWESFTQESKAMLKNIIVSFKQNQRIINKTVNKYQKWAKEQNGEIVKKYFKQDQKNNWAIRKPMHKDTVAGLVKLKFKKDSSLSVAIDNWSMIADKSLRNEVKKLVELGYDKKQITKYFKDNNFQLNNKDISKVEIFYWDLDKQGFAANAASRVKIDESFNESMIKCITDSGIQKIMFNHLKKYQEENNGKIIDHPELAFSVDGVDKLNNSIRELNDGKSHQNIYKVRTYEPRGNKFNIGQAGNKKDKYVEAAKGTNLFFAIYKGQNGKRNCETIPLNIVIERMKNGLSAVPEKNEMGESLLMELSPQDLVYIPTEDELINSGNISFSDAIKKKIDRIYKIVSFTGNRLSAIPYYVAAPIVDKIEFTQLNKLETSLDKLSIKENCIKLKIDRLGNIKKIFQ

SEQ ID NO: 3664 - protein, 1445 aa, unidentified
  REGION 1..1445: note = Description of Unknown: Cas Enzyme sequence
MKNILGLDLGTTSIGWAHVIEGEMPELSEIKQIGVRVNPLTVDEQTNFEKGKPLTTNADRTLKRSARRNLDRFKIRRKNLIEILINSKIIHSTSTLNEDGKDTTFETWGLRSKAADERIELNELARVLLAINKKRGYKSSRKAKNEEDGKAVDGMGIAKKLYEENLTPGQFVFERLKNGKKVIPDFYRSDLQNEFDRVWKFQKQFYPEILTDEFYKELQGKGQRATSAMFWTKYQFNTADIKDIDDDLKNEKTIKLHVRDQKKLQAYKWRSSSVSKQLEKEQVAYVLTEINNNLNNSSGYLGAISDRSKELYFKKQTVGQYLYHQLLENRHTSLKNQVFYRQDYLDEFEKIWDTQAKFHSELTDTLKAEVRDVVIFYQRKLKSQKGLISFCEFEQKEILADGKKKTVGMRVAPKSSPLFQEFKIWQNLNNVLIKKAGSKKRTVKKDNQQTLTEGEQEIFDLSLNAKQILFDELNIKGNLKSSAIIELLGYKPKDWEVNYSNLEGNRTNQALYNAYLNILEIEGYNQELLKLSDKDEINVAELKTPAHEIKEMVKSIFAVLDINTSILEFNAELGGKGFENQLSYQLWHLLYSAEDDTKKYSEEDKLIYGNENIGLKKQLCQKFGFKPEHAKILAGISFQDDYGNLSTKAMRKIYPYIKESKYSNACDLAGYRHSKHSLTKEELEKRVLKNKLEPLQKNSLRNPVVEKILNQMVNVVNTLIDKENDKLEAEEKERNFRFDEIRIELARELKKNTSERKELTERINKAKSENDNIKAIIKRDFPNVPNPTKNDIVRYKLYQELAFNCYKDLYTHQKIDYYKLFGKDYDIDHIIPQAKLFDDSFSNKVLVPYQANRDKGKKNNATAYDYMSTKSQEEFENYLATVESLYKEGKISSAKYQKLLKKESEIGDGFIERDLRDSQYIAKKAKEMLFEITKSVVSTSGSITDRLREDWGLVNTMKEINLPKYRALGLTEMEERKHGQKVEVIKDWTKRNDHRHHAMDALTVAFTKHNHIQYLNFLNARKNENHKFHTNIIGIENIETELIEDNKGNKKRVFKEPIPNFRQLAKEHLENVIISHKAKNKVVTKNKNKISGQSKTQEVLTPRGQLHKETVYGQYHFYQQKEEKISAKFDRETIEKVSNPLYKKLLLQRLEENDNDPKKAFSGKNALSKTPIYLDDKKGKTVPESVKLIWLEKDFSIRKDITPENFKDEKSIDKILDDGIKQILKERLKEFGDPKRAFSDLEKNPIWLNKEKGISIKRVTISGVSNAEALHYKKDHFGKPLLDKKGNKIPVDFVSTGNNHHVAVYRDEKGNLQENVVSFYEAVARVNQGLPIIDKFYNQHLGWQFLFTMKQNELFVFPNEKTGFNPNETDLLDPKNRKLINPNLFRVQKIATKNYFFRHHLETTVETPKELAGVTYKPQLGLSGIVGIVKVRINHLGDIVSVGEY

SEQ ID NO: 3665 - protein, 1520 aa, unidentified
  REGION 1..1520: note = Description of Unknown: Cas Enzyme sequence
MGKILGLDLGTNSIGWALRNPALTENQIEKFGVLTFNKGVGLGKTGEYSYAAERTKKRSTRRLYQARKYRLWATLEVLITEGYCPLTINDLNKWRHYDKEEARKNNNGGRIYPVWNTAFDAWIKLDFDNDGKPDYSSPYQLRKELAETKLDFTREVNRFKLGRVLYHIAQRRGFKSSRKGADDIQEKETDDNEVMDLQYSEKKKNKVIAELFEKYINAKTIGWLFALLETDKIRIRESISQYAIRENYKDEIKFIFKTQELGLEHPLYLSMCVVFKTVRNGKEKSYIGGTIFYKRPLRSQKGLIGLCTLEQETRIDKETGKQVQVGKYRAPISHPAFETFRAWAFLNNIKYKENNEWKSLPLELKQEAYSELFFRKSKGYFPFSEISAFLKKKGKDWQLNYSLKTTVTACPVSARLKDIFGDDYLNTQIKKEKKSKSGKDYYNIEDIWHVLFSYEDQEYVAEFAEQKLKLEPEKVKQFMIAWNALPVGYGMLSLNAINKINVFLHKGLIYTEAVSMANIPEIMGRNLWQQNEQLLLNSIGDVIAENRQQKTILNIVNNLISKHKNLVANEKFAHKDNNYKLIESDFNDIKTTIEEQFGTNKWNDLSGDKKKAISDTVKDCYQAYFSKQGIVRNNGNEERIVTIQSGNKKYHKTESGYYRLPKLIDTLKEFLQDHFEHLDEAKLSKIYHPSEINIYPPAREIDGVLKLGSPKTGSFKNPMAMRTLHELRKLMNYMIETKQIDNETRIVVEVARDLNDANRRWAIEAWQRQREAENQEFAEAIKQLLNEDKNLKASAESNDDIDKMRLFYEQNAEQTLPAVVKVEEDENGKKRKKKSTEKNEAIRWSGHGKKLIDKYRLWKEQGYQCLYTGKYIKLTDLFNENVIDFEHTLPRSKSFDNSLANLTVCYHDYNRTVKKNQIPVQLLNYDKEYDFGGSIGKCSAITSRLEVWKDKVERIKQQIDFWKTKSKKAADKNWKDDAIRQRHLWQMELDYWQNKLDRFTIAEITSGFKNSQKVDTQLISKYAFHYLKTYFDKVDVQKGSITAEFRKIYQLQAADEKKDRGKHSHHAKDAAVLTLIPVAAKRDAILEKYYEAKENKEKFNAEPPFAGFKREFVWGIDDSVLINNISSNQALTPARRKVRKRGKEVFIEKPDGTKVSKWATGDSIRGQLHQETFYGAIKPAQKGDKGNLLKDDNGKFIQEKEVKYVVRMPFQYKKDANIPGFRTIDEIKKQIVDEGLKAHIVKQVKDAGGLKEAFEKGMYLLDKDGKPHGNKIRHIRVWASVSEPLAIKKQNNLSNKTYKQSYWAANGENIICAYYKNDTADKTGKIKKDRELEIVNLFDAANLKKFGLVNGKGGLQLYRKDKNHRVIIDDKGNKQTPYVILKAGMKVIFYDEKLEELKKQENEAESAYNKRIGYRTYKIVKFTGGRLTFQHHLEARNDKELGKAYPENMVFKTDEKNKEVTYGGRGTSGFTEKASDALKFNRHNNYEPFPKLLYSVNWLDFAVEGYDFVIEMDGIVKWKA

SEQ ID NO: 3666 - protein, 1488 aa, unidentified
  REGION 1..1488: note = Description of Unknown: Cas Enzyme sequence
MSKILGLDLGTNSIGWALVDTNEKKILGMGSRIIPMGTDKQDYENGVGITKNATRREKRTIRRGNKRYKLRRNKLIYILNELEMLPEQFHLKNGIPEATKLQELELLPISKKTKQLDALGLLELKVKALEEPVKLKEFGKILYLFNQLRGYSGGNNNEDKKKKKDENEDAEKKKYEVVIQKVEILKVEQSDNTFTVRGGKNKGEKQYYFDITINFDGEEVEGQTELQNLKEKEGQEEELEIRITRKKDDNVTYRFALPQKSNWRKAMELSEKTLKEEKLFISQLRLRDLQQNKWAKIKNRVFLRNRYVEEFDKIWETQEKEFPFLKNCPKETLEKITNYIFPGNSESQQLLRKTALEEGLKYIIKEQVIYYQRPLKPQTELIGNCRFEKEEKVIPTSHPFFQEFRCWKQINNLFITSKTLVGNKYAYQNRYLTADEKLAIYEKLQTQKEVGFATIIEILNQDKSKGKLDKEQKDYFLNGLNVKAKLKGCDTILSIKKELGDYYNDFIAQDKQLVEQLWSVIFDVKNHDGSEYDIESKRVSSIISVLKSYANEKTAKEMSLKLAQRIKFPRKYASLSEKAIQNILPLMLPNSLSIPETTQQHFRNIQHLIETGEIINDLNYNLEDYVIDFVKNNPNVLQDGGLMESFAISLVYGKHTAETIKPQIKNYHDIKYEVRNLRNPIVEQLSNETMQVIKAIWKQYKFNPEELEIRVELARDLKNSAAEREKIWKGQQNSKKINDRIKERLAELNQEYSSRNIELYKIWSRQNIEDYPRQSKEPTKEEIQKLRLWEEQKCISPYTGKPIPLSKLFSPERLYDIDHIIPKSRYYDDSISNKVVCETNINEEKSNRTAWEYITGQHSSNVRSTEDFVKYVNDNFFGKKKKNLLAEKIPSNPVERQLKDTQYISVAIKNELAKIVGSENVKTSTGEVTDFLRSRWGLRKLFMELTESRFKQMELWDLDENGNPKTKWVNRYVDENDKNQYEIKNWSKRYDHRHHSIDALVVALTSQSHIQRLNNLNKYYQDELTARKDEFGIEIKEGESIFEGFFNLEPDRRDKILRQIESSRYFEMPFENLVDQAKNQLETMVVSHKPKDKLGIKIDEKTNKKQLKIRGALHQETYYGKLNGRDTKRVEISSLSITKNKTTNQEEIVELIDKVLEKEIIEHKRKYDSMKEAFTGEGLKIFNEKRMVDDKQPAYKVKVWYNKEEKSESGLQRLYGNNPKQSVITGDNYLFIAMIKKLQNKEDRVFTVATLYDSVTVANKALRNNNLDFIKAIIEVKRLELRSDIIKEFEKKQTELIQKIEKTKEKSKKEIIKQELKENNDNLEYFLDESSELKLTPLFTLQQNELVYLPLSKNDNISGFSIDEFKDWIKMKENKTAFCNQIYKVVKIDNPGLCHFIPQNYANHISVAKDLSKGEIELLKQEQEEKGKKKISKKDMNFVEFSSYGNCSPYEVGETFVNYLKNGSKIKPIRIQDSCLKLNIDRLGNISL

SEQ ID NO: 3667 - protein, 1434 aa, unidentified
  REGION 1..1434: note = Description of Unknown: Cas Enzyme sequence
MSLKTILGLDLGTTSIGFAKVIEDEDYNNSTVELIGVRVNPLTTDEQTNFEKGRPVSVNAARTLKRSMRRNLNRYQLRRDNLIKALKSHQIINDDTILAEDGKGTTHSTYAFRALAASEQISLEAFARVLLSINKKRGYKSSRRAKNEEEGQVIDSMAVARRLYEENLTPGQLAYLLLQEGKKYLPDFYRSDLNAELNKVWTFQRTFYPDMLTDEFKKHLEGKGQRATSAAFWGKYGFNTAEIKGSREEKKLKAYEWRSKAPHTQLTKEEVAFIITEINNDLNRSSGYLGAISDRSKELFFHKQTVGQYLYKQIQRNPHTRLKAQVFYRQDYLDEFEQIWETQARHHSHLTPALKEEIRDIIIFYQRKLKSQKGLISFCEFESKEVEIDVNGIKVKKRIGLRVAPRSSPLFQEFKIWQVLNNLELKNKENKTVFVPDLETSQRLFDELNMKGNMSASDAIKMLGYKSKEWEANYNTLEGNRTNSLLYNAYLKILEIEGYDEDILKLAGSDDIDVAKIEKPASEIKQMVQSIFGLLGINTAILDFDAELDGKAFEQQPSYQLWHLLYSAEDDTRKYNQEDVFIYGNDNIGLKKKLCEKFGFKPEHAKILANLAFGNDYGNLSSKAIRKIYPFAKELTYDKACLQAGYRHSASSLTKEEIANRTLKPRLDLLKKNELRSPVVEKILNQMVHVVNTLIEDENTKRKAGGIAEDFYFDEIRIELARELKKNAAERAEMSANITSTKALHEKIFKILQSEFGVLNPTRNDIIRYKLYEELKNNGYKDLYTNTYIPRETLFTKQIDIDHIIPQMTLFDDSFSNKTVVFRKDNQDKGNQTAYDYILNKYGEKAVEEYVSRITSLFELGKKNKEEGINKAKFQKLQKRQSEIGDGFIERDLRESQYIAKKAKNMLLEICRSVVATSGEITARLREDWSLVNVMQEINMPKFRALGLTEIIKKKDGGTKERITDWSKRNDHRHHAMDALTIAFTRRNHIQYLNYLNARKNEHHKQHGNILAIEAKETSLIVDDSGNRKRKFNAPMPNFREVVKEHLENVLVSHKAKNKVVTKNKNKTKSANGDKVKIELTPRGQLHKETVYGKYQYYESKEEKISTKFDNDTISKVANPLYKKLLHERLAANDNDPKKAFSGKNALSKSPIYLDEAKQEILPEKVKLKWLEEDYSIRKDITPENFKDETLIGKILDAGVQRILLNRLKEYGDDPKKAFSDLDKNPIWLNKTKGISIKRVTISGIKNAEPLHYKKDHFGKTILDSSGRPIPADFISTGNNHHVAIYKDADGNLQDRIVTLFDAVQLSNAKEPIIDKAYNHGIGWVFLFTLKQNEFFIFPNDKTGFNPNEVDLLNPKNRKIISPNLFRVQKLSRVGYGNTVVRGYVFRHHLETTVDEKKELKDICYKNIKSLGYFENVVKVRINHIGNIIKVGEY

SEQ ID NO: 3668 - protein, 1476 aa, unidentified
  REGION 1..1476: note = Description of Unknown: Cas Enzyme sequence
MNKIFALDLGTNSIGWALRNPDLILNQIEKVGVITFNKGVGIGKSGEYSYAAERTKKRSTRRLYQARKYRLWATLKHLIDEGYCPLTIDNLNKWRHYSKEEARNNNNAGRVYPIDDLAFDAWIKLDFDDDGKPDYLSPYQLRRELTEIIFDFTNERNRFKLGRALYHIAQRRGFKSSRKGAEEVNDKETDNDEIVDLQYSERKKNKIIVDLFEQYSEAKTVGALFAYLENDGIRIRESIAQYAIRENYKTEIKHVFQFQGISIASSLYEKIVETGANKNDGSIFYKRPLRSQKGLIGKCTLEPSKYRVSVSHPGFEIFRAWSFLNNIKYKPLDGKKDNWKPIPQALKRKVFEDKFFRKSRIYFPFSEIAEFIKKEGYKWDLNYKPKTTVTGCPVSARLREIFGSDYLNIRIPKQPSSKSQKEYYDIEDIWHILFSYEDQEYVDEFAREKLKLGQEKVKQFVTAWNSMPIGYAMLSLNAINKINVFLQKGLIYTEAVLLANLPHIIGKEIWNENQQLLIDEIGNLIEENRVQKSIINIVNNLISKHKNLAFNEKFGYKNNNYVLEQSDIIEIENCIYEQFGKNSWDEKSEIEKQRIFDSVKLCYQNYFVGSGFKRKDINNERFLIIEFNDMVYYKSDSGYYRLPKLKDTLAEFLQLNFSISDDQIQKIYHPSEINIYPPARLDKEGDLKLGSPKTGSFKNPMAMRALHELRKLINYLIETKQIDSDTRIVVEVARDLNDSNRRWAIETWQKQRELENMEFALAIEQLVNEQGANANSQSIEDIDKIRLWYEQNDEESVPPISDDKKEVKGIKWIENKRNSYKEIASKKDMIDKYRLWREQECQCIYTGKVIKLSDLFNDNIIDFEHTIPRSLCFDNSLANLTVCYADFNRTIKKKQIPYNLNNYEEILFRIGKWKEKVDRIRQQIDYWKTKSKKASTKDWKDEAICQRHLWQMELDYWKNKVDRFTMEEVTSGFRNSQKVDTQLISKYAFHYLKTYFEKVDVQKGSITAEFRKIYSLQVADEKKDRSKHSHHAKDAAVLTLIPIAAKRDEILKEYYEHKELKKSFTVEPYSGFKREYVWSIDDSVLVNNIINDQAATPAKRIVRKRGKIQVIQGTNIPKMAAGDSIRGQLHLDTFYGAIKSAIIDEKGDILRDNERKIVTEEKLKYVLRVPFLYKSKADGLGFRTLEDIEKQIVDKALYKQIKSQADRAGGLKEAFEQGIYMLDKNGDKVNKIRHLRCWASVTEPLKIKKQTYLSAHEHKNYYWAANAENIICAYYKNDKLDKKGNIKKDRELEIINLYDVAKLKSFDLIGKKNELEIYRKKNGEIIINEDGTKEKPYAILKPGLKVIFYEDNINELKQQLGEFKKGFQKNVSDRMYKIVKFAGVQVVFLHHLEARDEKQHMLEYPENDYFKIDSKGKELTFGKRGKNGFTERISDYIKYNGGKPWHKLIYTKDWLDFAVEGKDFLINIDGTITWMV

SEQ ID NO: 3669 - protein, 1229 aa, unidentified
  REGION 1..1229: note = Description of Unknown: Cas Enzyme sequence
QKGKADIWYSLLLENGWVYRRSSKTPLFDWKGKLRDFVVTTDLDEDGNVKTDKEGKEKRSFRAPGEDDWTLVKKKSEQEIERSDKTVGAYIYDTLLQNPKQKINGKLVRTIERKFYKEELYAILKTQSRFHSELRDDNLYNECIRELYRNNEQHQIELTKKSILHLFVDDIIFYQRPLRSQKSSIGNCSLEYRRYKDGKGVEQTDYLKVIPKSNPLYQEFRLWQWIYNLGIYKRDDDANSVTGTFLNSSEDFVQLYDFLNERKEIEQKPLIKFFLEKQGLKGKMLTAEVEKYRWNFVEDKKYPCNETGSQIRARLDKIEGIKPEFLTREIEYKLWHLIYSVTDKVEYEKALKTFAEGKLLPVDSFVEHFRKFPPFKSEYGSFSEKAIKKLLPLIRTGKYWTWDAIDVKTKDRIEKLLSGEVDDRIKERVREKAIHLTQEGHFQGLPMWLASYVVYGRHSEAEMAGKWNSVDDLETYLNEFKQYSLRNPIVEQVVTETLRVVKDIWTQYGKGGKDFFNEIHIELGREMKSTADDRKRITQQVTLNENTNLRIKALLAELLNDGDIENVRPYSPMQQEALKIYEDGVLNSMEDIDEDILRISKTAQPSTTELKRYKLWLEQKYRSPYTGQIIPLNRLFTSDYEIEHIIPQSRFFDDSFSNKIICESAVNKLKDKQLSYEFIKNHGGSIVELGLGKVVKILDVDGYDEFVKQNYGKNRGKRNKLMLEEIPDQMIERQLNDTRYISKFISALLSNIVRSELNDDGVNSKNVLPGNGKITSTLRQDWGLNDVWNDLILPRFERMNQLTNSTSFTSWNENHQKFLPTVPIEYSKGFQKKRIDHRHHALDALVVACATRDHINLLNNKHAKSAERFDLNRKLRKFEKVAYKDVQTGKVVEKEVPKDFLKPWENFTVDARNHLENIIVSFKQNLRVINKTTNYYEKWVDKDGVKVKEKVPQTQGDSWAVRKPMHKDTVSGMVILDRIKVPKGKVLTATRKNLDTSFNLKAIESITDTGIQKILKNYLFSKGSSPEMAFSAEGIEDMNSNISQYNDQKPHQPIYKVRIFELGSKFPLGQSGNKKDKYVEAAKGTNLFFAIYGDGQGKRSYDTVPLNVVIERQKQGLYSVPIENEKGWKLIDCLSPNDLVYVPTREELGGNYPIDLTNLSRIQKERVYKMVSSSGAQCFFVRMEAASSIVNKLEYSTLNKMERSLDGIMIKDVCVKLIVNRIGQASSKQ

SEQ ID NO: 3670 - protein, 1429 aa, unidentified
  REGION 1..1429: note = Description of Unknown: Cas Enzyme sequence
MNKILGLDLGTNSIGWALRNPNLTENQIEKFGVITFRKGVGLGKTGEYSYAAERTKKRSMRRLYQARKYRLWATLEHLIKEGYCPLSMDDLNKWRHYDKQEALKNNNAGRVYPVNNDAFNAWIKLDFDNDGKPDYTSPYQLRKELAEKKLDFSRTENRFKLGRALYHIAQRRGFKSSRKGAEESKESNNSDEIQDLQYSEKKKNKVITDLFEKYPEAQTIGCLFALLENDKVRVRENITQYAIRENYKDEIKYIFTEAQKLGIEHPLYKKLVETAPNKNDGSIFYKRPLRSQKGLIGKCTLEPNKYRAPISHPAFETFRAWSFLNNIKYKEGDTLKELPLELKQEIHSELFFRKSKAYFPFSEIVAFLKKKGKDWQLNYSPKTTVTACPVSARLKDIFGDDYLNIKIAKDKKSKSGEGYYTIEDIWHILFSYEDQECVSEFAEKKLKLDSEKVKQFITAWNTLPVGYAMLSLNAIKKINYFLEKGLIYTEAVLLANLPKIIGTELWKQSEQLFLDSIGLIIEENHNQKSILNIVNSLISKHKNLDENKFGHRDNNYKLVDSDLKDIQTAIEEQYGTSKWNSFPEEKKEVVFDTVKDCYQAYFTKQGIVRDSGSAERVVTIRSNNKNYYKTETGYYRLPKLIDSLKDFLRDNFDHLDENKLSKIYHPSEINIYPPSKEDKDGPKLRSPITGSFKNPMAMRTLHELRKLINYLIETNQIDSETRIVIEIAREAKGKLDYANKRWAIETWQRQREAENQEIAAAIKQLLIEYPGIKANPESDDDIDKVRLFYEQNEEQTLPPVIVEGEEEKGKKKKSKKTPQNGEAIRWNGLGKNLIDKYRSWIEQGYRCLYTGKFINLTDLFDDNVVDFEHTIPRSKSFDNSLANRTVCYHDYNRTIKKNQIPTQLPNYDKDFNFGGSIGMCSAILPRLEPWKEKVARIKQQIDFWTTKSKKAADKQWKDDAIRQRHLWQMELEYWQNKLDRFTIKEITTGFKNSQKVDTQLISKYAFHYLKTYFEKVDVQKGSITADFRKIYQLQSPNEKKDRSKHSHHAKDAAVLTLIPVAAKRDAILEKYYEAQENKTSFTIEPPFKGFKREFIWSIDDSVLINNVTNDQTLTPAKRKVRKRGKEVIINGKTRWATGDCIRGQLHQETFYGAIKPAKKDEKGNPLKDENGKFILEEDIKYVQRVPFNADFTSVDKIVDEGLKRQIKEHIKRTGSFKKAFEEGIYLLDKNGHPHGDRIRHIRVWASVSEPLKIKKQTNLSDKEYKQYYWAANATNCYFAIYKDEGKKAATFRNLFETAKILSLNPIKSPEELFEPTLQKQNKLLTLTCVLRSGLKVIFKKDSKEALSLLSNSELTKRLYVYTNFEKDGRLNFRYHLEARNDKDITEKYVYSEIDFDNPKPTLRFGYAKYDFLVENYDFEIKMDGTVTWL

SEQ ID NO: 3671 - protein, 1459 aa, unidentified
  REGION 1..1459: note = Description of Unknown: Cas Enzyme sequence
MLNAKTGIMKRILGLDLGTNSIGWALIEQDFNASKGKILGIGSRIIPMSQEILGDFGKGNSVSQTAERTNYRSNRRIRERFLLRRERLHRVLNIIGFLPEHYSAQIEFKSRLGKFVDNAEPKIAYHNNEFIFKSSFKEMLKEFESCMPSFVKNEKGDRMLVPYDWTIYYLRKKGLTEKISKEELAWIILNFNQKRGYYQLRGEEEEDNPNKLVEFHSLKVTEVVADEMQKGKSEIWYSVILENGWTYRRSSKIPLFDWKDKIKDFIVTTDLNDDGTIRKDRDGLEKRSFRAPSDTDWTLIKKKTESEIDKSLKTIGEYIFDNMLHNPKQKINGKLIRTIERKYYKSELNKILSKQAEFHKELVDEHLYNECIRELYNKNDVQQQFLSKRDFTHLFIEDIIFYQRPLRSKKSLINNCTLEFYTYKNREGLESIKYLKAIPKSNPYYQEFRIWQWMYNLSVYNKSEDINVTSEFFNSIKEWEDLFEFLNDRKEIDQKTLIKYLLEKKGFKGKSLNSEIEKYRWNYVEDKKYPCNETRAILRTRIEKVFGESNNYLTRETEQKLWHLIYSVTDKIEYEKAIHSFAAKHDFNERLFVDAFKKIPPFKSEYGTFSEKAIKKLLPLMRIGKFWSWNMIDYDSQERIKKIISGEFDECIKDRVRDKAKNLKTATDFQGLQLWLAQYIVYDRHSEGASSEKWNCVEDIEEFLQTFKQHSLRNPIVEQVVMETIRVIKDVWFYYGENAKDYFSEIHVELGREMKLPAEERKKISNINIENENTNLRIKALLSELNNDSNVENVRPYSPIQQEILKIYEEGVLNSDIEIEEDIIKISKSAQPSQSELKRYKLWLEQKYRSPYTGEIIPLNKLFTTDYEIEHIIPQSRYFDDSYSNKVICESIVNKQKGNFLGYEFIKECHGQILECGFGKKVRIFEIDEYEDFVKKHYAANRSKRNKLLMEEIQEKMIERQLNDTRYISKYISSILSNIVREQQNDDGVNSKNIIPVSGKITSTLKNDWGLNGVWNDLVLPRFERMNKLTNSNSFTVWNEKFQKHLPTVPLELSKNFSVKRIDHRHHALDALVIACASRDHVNLLNNMYAKSVVRHDLNRKLRLFEKTIYTDNKTGERIERDVPKAFIKPWKDFIVNARDAIEAIIISYKQNLRVINKANNYYDKWVIKDNIIKKDRVKQEGRNWAIRKPMHKDTVSGLIDLPWVKVPKDKILTATRKSLDTTFDFKTISSITDTGIQKILRNYLERKGGNPELAFSPEGKEDLNNNIADYNEGKHHQPITKVRVFEIGSKFPIGEKGNKKAKYVEAAKGTNLFFAIYQNREQKRNYDTIPLNIVIERLKAGLTAVPEINEKGDNLLFYLSPNDLVYVPTEDEKENIKNIDFDNLTKEQKGRIYRMVSCTGNECHFSHSNISALIKSYDSKTKVGELGSLNKSELTLDQSIRIKEQCIKLSISRLGKVI

SEQ ID NO: 3672 - protein, 1054 aa, unidentified
  REGION 1..1054: note = Description of Unknown: Cas Enzyme sequence
LKIFKKDVIQETEVTSQFILSEEDLVELFDKLKDKKEINQKQFLALFKLKEDSYRWNYVEDKSYPCHETRNLFLSKAKQIAGFDLHFFDNQTNTEALWHLLYSISDPLEIDKALNKFAQKHSLTDEFVEVFRKLPPFKNEYGAFSAKAIKKLLPLMRTGTYWRLEDIDSTTLQRIDNLIHGVEDESIRLSFREKARQFSKITQFKGLPLWFASYVVYNKHAESNDLTKWASPADLDYYLKNEFKQYSLRNPIVEQVVTETLRVVRDIWQEFGKGENGFFDEIHIELGREMKNPADKRKQMTLKNIENENTNIRIKAILEELKNQGIPEVRPFSPSQQEILKIYEEGIYAAENRKEELEIVDKIRKSSRPSTTEIQRYKLWLDQGYRSPYTGQIIQLSDLFTTKYQIEHIFPQSRFFDDSITNKVICESEVNALKDNQTAMEFIQNHAGQLVTLSGGKTVRVYTPDQYKDHVQRFFAKNRSKLKNLLSVEIPESFIHRQINDSRYISKVIKNYLSKIVREGEGEKMETEATSKNVVVLSGSITAQMKQDWGLNAIWNELITPRFERLNELTKSNAYGQWEDKQGKRVFQTHVPEEQARGFSKKRIDHRHHALDALVIACTSRDHVNYLNSLQSQRTNYALVSKLRKIEKYTKDGQTRQVAKEFLKPWPTFTQDSKEALKRVVVSFKQNMRVINKTVNRYEKIVDGKKIKVLQTQGENWAIRKPMHAETVSGKVFLKRPKATPIPIGQALEKLDMVQDLGIKARLKALVKEQNGQLDKVKKHLKTNPLLIDGQPIQKVFIFEILEATATRKNLDTSFDEKRIEKITDTGIQKILLNHLHQEAYQQAKDEKGKPIPPHELAFNEEGLDALNQHIVALNDGKNHHPIKKVRIYEEGSKFTLGNSGNKSKKYVEAATGTNLYFAIYSDAQGKRNYQSIPLIDVINNQKKGNDVAPPIDEFGNSLLFTLSPNDLVYIPSEQELDKSELLKTPKLTEEQIGRIYKIVSFTGKRLYAIPFSVSKPIADKIEYTLLNKMELLHEKSICQKLIVNRLGKIIHMY

SEQ ID NO: 3673 - protein, 1380 aa, unidentified
  REGION 1..1380: note = Description of Unknown: Cas Enzyme sequence
MKKILGLDLGTTSIGWAFVHEKEKDTDETSEIIRLGVRVNPLTIDEQTNFEQGKPISTNADRTLKRSARRNLDRYKLRRDNLIEVLQKNNILRDQTILSEEGKDTTHSTYFLRAKSASEKVELEDFARILLMINKKRGYKSSRKAKNEEEGQLIDGMQVAKTLYENNLTPGQYSLQILLSGKKYLPDYYRSDLQNELDRIWKFQQQFYPEILTNELRKEIYGKGLRATSVIFWSKYGFNTAENKGTRDEKKIQAYKWRSEALSEQLEKEVVAFVIAEINGNITNSSGYLGAISDRSKELFFNNQTVGQYLYSQLKKNPHTRLKNQVFYRQDYLDEFEKIWETQSQFHSELTIELKEEIRDIIIFYQRKLKSQKSLISFCEFEKKDIVIEKNGKKVTKTQGLRVIPRSSPLFQEFKIWQNLNNLKLKNTTTDEIFVLDDEAKQLLFEELNIKGNLKKESVLKVLGYNTKNWEINYNEIEGNKTNRALYEVYFKIFEMEGHEEINLSDVPAKDAKEIISIFFDAINVNPEILNFDAELEGKEFEMQPAYQLWHLLYSYEGDNSNSGNELLYKLLNKKFGFKEEHAKLLANITLLSDYGNLSAKAIRKIYPFIKDNTYDKACAEAGYNHSSSLSKAEIESRELKPLLELLPKNSLRNPVVEKILNQLVNVVNAIIQDPELGKPDEIRIELARELKKNASERAEMTASINNAKAENEKIRKLLTTEFAIKNPTRNDIIRYKLYDELKLNGYHTLYSNTYIPREKLFSKEFDVEHIIPQSKLFDDSFSNKTIETRKDNLDKANETAIEYIERKYGNVKADEFLSRIEMLYKQKENGISKAKYSKLKMRSEDIGKGFIERDLRDSQYIARKARELLLTICRTVTPTTGSITDRLRQDWDLINVMQELNFDKYKKLGLTEIIEKKDGGTKERIVDWSKRNDHRHHAVDALTVAFTTHNHIQYLNNLSAKSDRNSNVYAIENTITEVVNRKRRFIAPTENFREDAKHHLENILVSIKSKTKVVTTNKNKIKTKKGTIVKTELTPRGQLHKETVYGRIKQYFQKEEKIGSNFTKEKILQVANESYRKALMSRLKEFDLDPKKAFTGKNNLSKKPIYLNDDKALTLPEKVKTVWLEDVYTIRKDITPDLKIDKVIDVGIKRILENRLKEFNGNAKEAFSDLDKNPIWLNKEKGISIKRVTITGIKNAEALHYKKDHNGKEILDESGNKIAVDFVATGNNHHVAIYKDENGNLQDSVVSFLEVVTRVNQGLPVIDKTLKRELGWQFLFSMKQNEYFVFPSDDFDPNDIDLCDSNNNSVISKNLFRVQKFSKVEYGNSAVRDYVFRHHLETTVEEKKELRGTSYIQLKSLSMFDKIVKVRINHIGQIVKVGE

SEQ ID NO: 3674 - protein, 1636 aa, unidentified
  REGION 1..1636: note = Description of Unknown: Cas Enzyme sequence
MKKILGLDLGTNSIGWALVEQEIENKHGNILGMGSRIIPMSQDIISDFGKGNSISQTAERTGYRGVRRLRERHLLRRERLHRVLNILGLLPGHYASQVDFQQRLGQFKDETEPKIAYSSNNFIFKMSFNEMLEDFRRTQPDLINRKNKQGKDAKTPYDWTIYYLRKKALTQKLEKEELAWILLNFNQKRGYYQLRGEEDEEESPNKLVEFHSLKIISVLADEKPNSKGDLWYTLVLENGWIYRRSSKNDISNWKDNVRNFIVTTDLNEDGSVKTDKEGNEKRSFRAPSEDDWTLLKKKSEQEIDHSNKTVGAYIYDTLLQNPNQKIRGSLVRTIERKYYKQELIAILQKQIELQPELFHDDLYSDCVRELYRNNEAHQQILGKKDFVHLFVEDILFYQRPLKSKKSSISNCTLEYRKYKSEDKEGNPIVKKEYLKAIPKSHPLYQEFRVWQWLFNLKFYKNEDDTEITNELIQGHDGLAQLFDFLMSQKEIDHKSVLKHLLATPQLKGKALTTEISKYRWNYVYDSDKDESKKYPCNETGYEIRRRLAKVSDVPQEFLSPAIEQSLWHIIYSVTDKHEFEKALKSFANKHQLDEESFIENFRKFKPFDSEYGAYSEKAIKKLLPLMRLGKYWSWNHIDPDSKIRIDRILTGEYDAEIKNRVRDKSIHLTEEAHFQGLQLWLAQYIVYDRHSEAALIGKWQSVSDMEKFISDFKQHSLRNPIVEQVITETLRVVKDIWTRYGNGAENYFDEIHIELGRDMKNTADERKKISNRISDNENTNLRIKALIAELNKDSDIQNVRPYSPSQQEALKIYEEYALSSEEKYNPRTNSFESDPISDEILKISKTAEPSNSELQRYKLWLEQRYRSPYTGAMIPLSRLFTEDFEIEHVIPQSRYFDDSLSNKVICESAVNQLKDKQLGMEFIKNHHGEILETGKGKKVKIFTEEDYTDFIKQHYSKNQGKRNKLLLEEVPEKMIERQLNDTRYISKYISNLLSNLVRADKDDEGINSKNILPGNGGITSKLKNEWGLNDVWNELILPRFERMNQLTNTTNFTSNNTHGRIIPTVPLEYSKGFQKKRIDHRHHAMDALVVACTTRDHINYLNNKNAHENSANEKDGYRYDLKNKLCFKTKTDDSGNYKWQFKKPWESFTANAKGELEKIIVSFKQNLRVINKTTNKYESYKDENGKLRIDKAGKPKKGMIPQTKGDSWAIRKSFHTPMPYGKNNYSFQVLDIKDNLGKRKYLDDKELLIKVEEVMDHFDAKIGDAKKWLKLNPIKDKNGNAVNHALFNLPETRFRKRQPIMKLANRGQGGIKKYEDAVKFIHKISDKTIMNDLVQHLHEHNDDIDLAFSAEGIEQFNQKRKIPVYKLPISEASADKFPLGSRLNTKVKFGEADSGTNLFFAVYWSGTQEKRVFETISLKRVISHQKSSTSLPKEQRTNIPENKEKGDLLFSLSPHDLVFAPTQEERMNINEIDFGNLTKDQMERIFIVNDFSSTCYFTPNRLAKNIAPKEVDLSFDSIKNKLTGSYDTKTASFEGFQIKDICVKLQVDRLGNIKLANKPNGPSSTNTNQVQESQTVYSSSKKISVALSPNDSDDSELRFYASLSPEERFRHFLELISRFYTFSKTNWSTKKIILDS

SEQ ID NO: 3675 - protein, 1410 aa, unidentified
  REGION 1..1410: note = Description of Unknown: Cas Enzyme sequence
MKKILGLDIGSNSIGWALINLDFENEQGEILGAGSRIVPMDTDLLNNFEQGNSISKTADRRQARGARRLRQRYKLRRQRLIELLKLVGWLPEDFCAGHRLPVTQDSIRQMHELFESSKIPEDWVVYFLRHKALHEQVTLSELARILYHINQRRGFKSNRKANNEEVHINEDADDDNLPKRESRVEILRITRIRNTEEIIRKKKAIEIEVAHPISDGINKGIILRDTLPDWINQDVELEIRIIRSKKETRIEFAIPDKSDWQKLREALSKDFDNKQLHPGSYFLHEILKDRNYRIRERIIDRGRYEAELKAIWEKQATYHPELYAKDKIPAIAGKFYANNKEKQKELCANDLFYALTKDIIYYHRPLKSQKSSIGECRYEKKNITLTKQMNGKNISYSPGYKVAPISSPAFQEFRIWKTLHNLRVISNKSMIDERWETDVDETDAYIRPKLEDLFSLFNNKEKVKMGEILRLIGVSEKTHKLNYPPETEFPGNETRHTFFKVFKRHNYIVEGEKLLDNKEHLQQLWHLLYSVEDSAAIKQSLEKQFQLPETIALALSKLPPFKLQYASYSSKAIHKLLPLMRIGKYWNEANIACQVKERIDKLSNAELDPSLDESMRARIEKFRSEYQLSELKDYQALPEWLACYIVYGKHSENITGVVCSHPEEVRGLEAKTLRNPIAEQIINETLQLVKDIWKQYGRPDEIRIELARDLKKTADERKHLYDNNRQNKEDKDRIRAILRELKLGNPDSLADIDKIRILEENGNYKYQNSQERFFKKAIEPTRSEIEKYRLWMEQHCISPYTGNTIMLSELFTYKYEVEHIIPRTRFYDDSLGNKVIVESWANKEKDKLTAMQYIQQGSRQDKLLSVEHYLAHVEKNFRGKKRRHLLSTEIPKGFIERQLNDTRHINRKVKELLQQVTEKVWATSGQVTDELKHKWGVNDKMKEILEGRFKRLEELTGESMISYTIDENGERTTHLKGYEKRIDHRHHAMDAIVIACSTQSHIQYINTLEAQTRDESMKYEFRNKLLQSNKTRDFRKPWKTFVADAKNALENIVVSHKNRHRILNKGTNRYIKYVQNEKGEWAKSLVEQSKGELFSVRKSLHKETISGKVKFREYKKVSIEEALKSIDKIADRSAKRQLQDLQQQFGSDIKKIKGAIKANPLKDINGNTVDKVLIWYWESYSLNRVSLDASFTKDKIAKIAEYGNDKQKGLKYHLYQHLLKYGDNPKIAFTGEGLEELEKVVGKPVTKVSIYEPIGSKFEIRQGQMVEAAKGTNLFFVIYENISTGERSYTTLGFREVLTAKMNKLPIVPPKDGHKYILLSPNDLVYVPESEENVKAIDWSNRKSLSSNIYKMVSATGSMCHFVPHHIAKPIIETKELGANNKSERAWDDRMIKKYCIKLKHDRLGNIIPA

SEQ ID NO: 3676 - protein, 1504 aa, unidentified
  REGION 1..1504: note = Description of Unknown: Cas Enzyme sequence
MKKILGLDLGTNSIGWAVVHSDVDRDGNESLLEISSSGSRIIPMDAATLGDFDKGNSKSQTAERTRLRGVRRLLERSLLRRERLLRVLSVMGFLPQHYASQLDRYGKFISDAEPKLAWYKTPDGKYTFLFQDSFQEMLSDFQMFHPELLEKGKKVPYDWTLYYLRKKALTQKVSKEELAWILLSFNQKRGYYQLRGEDEQEDVKKEVKYYALKVVSVEDSGEHKGKDIWYNVFLENGWKYRRASSVPLDWVGKVKEFVVTTDLDENGNPKKDKDGEVKRSFRSPKEDDWGLLKTKTQESIDESGKTVGAYIYDTLLHVPDQKIRGKLVRTVERKYYKEELYKILTKQTEFHAELRDASLLKDCAVELYPQNEAHRNILLSQDFAHLFVEDILFYQRPLKSKKSLIDDCPYESHIYKKDGNLLNTPLKCVSKSHPLFQEFRLWQFISNLRIYQREKMVDGSLKSDVDVTGDFLQSEADYVALFDWMNDRKSVDQKAFLAYKPFGLNKKNQVAYRWNYVEDKSYPCNETRYSISSRLAKVGVAKGFLTGEKETALWHILYSISDKEELVKALRTFAEKNNLDDTFVEAFAKMPPFENEYAAYSLKAIKKLLPLMRMGKYWCKEAIDDKTLSRIDKLLTGECDEAIRSRVREKAMHLTELSSFRGLPLWLACYVVYDRHAEAKDITKWESPKDIDLFLSKFRQHSLRNPIVEQVITETLRTVRDIWKQEGSIDEIHVELGREMKNPADKRKQMTRSSLKNEDTNLRIKALLMEFINPEFEIENVRPYSPSQQDILRIYEEGALNSASEKELEGISDILKKFRETDVKKRPSHSEVLRYKLWLEQRYRSPYTGKMIPLGKLFTPAYEIEHVIPQSRYFDDSFSNKVICEAAVNKKKDNLLGYEFIKQHSGEIVELGNGNTVSIFTVEEYEQFVKEFYVNNRKKKENLLLEDIPDGFIERQLNDSRYISKVVKSLLSNIVREEGEQDAISKNVIVCTGGVTDRLKKDWGVQDVWNRIILPRFLRLNALSDSSYYTAVSACGNVIPAMPLHLQRGFSKKRIDHRHHAMDAIVIACANRNIVNYLNNASARKGEKISRYDLQRMLCDKVKTDEKGNYKWIIRKPWDTFTQDVYVTLQNIVVSFKQNLRVINRTTNHYWRYDEDGKKRLQPQVKGDSWAIRKPMHKDTVHGEVNLRKIKTLSLKEAMKNPVMIVDKVLKRKLMELLHAGFDLKAIGRFFEEHQTEWQGINLKKIEVYYFTKDTNDRYFATRKPLDTSFTQKKITEEVTDTGIQKILLNHLLKNDNDANVAFSPDGIERMNQKISDLNDGKWHQPIYKVRVYEKADKFAVGTAGNKGRKYVEAAKGTNLFFAVYESEIIDKKTGEIIRKRSYASIPLNVVIDRQKKGLSSAPEDENGKLPIFVLSPNDLVYLPTEEEHKSNQVSLPINKERIYKMVSCTGNRLFLVPFSVASVIVDKYEYTSLNKIELTDDKQSVKETCIPIKVDRLGNISFK

SEQ ID NO: 3677 - protein, 1393 aa, unidentified
  REGION 1..1393: note = Description of Unknown: Cas Enzyme sequence
VENVKHTSMKKILGLDLGTNSTGWALVNEAENTAEKSSITKLGVRIIKYDNFVNTETGSESKEPEKDFCGGKGISPNAGRTKGRSARRNLQRYKLRRANLIEYLKKCGLITDSAVLCENGNRTTFQTYRLRAMAVTEEISLEELSRVFLMINKKRGYKSSRKAKLPDEGQLIDGMAVAEQLYENDLTPGQFVFSILQQGKKSIPEFYRSDLQNELNRIWDHQKQFYPEILTDEFRKQIEGEGRPNTAKMFLGKYKIYTADIKGKDKRLQAYQWRSNALTSQLSIDEVAFVVSELNGAINNASSYLGAIGDRSKELRFNKLTVGQYLMKQLDKDPNYSLKNQVFYRQDYLDEFEAIWEKQAQYHPELTPELKKDIRDIIIFYQRPLKSQKGLVSFCEFESRQIEVNVDGKQKLRTIGCKVCPKSSPLFQEFKIWHTLHSLIVKEKKTNAERFLYQEEKETLFAELNIKETLSKLDALKLLYKNYKDLDLNYDKIEGNRTQAALFKAYQTIISMTGRGEYDFSKMMSDEVMEIVEGVFSGLGYNTNILHFDAENELFDKQPMYMLWHLLYSYEGDKSSTGNKSLIDKIFKLCGFEKEYASIIANIIFQPDYGSLSTKAIRKILPRMKEGNEYSLACEYAGYRHSQRSLTKDELDNKVYKDHLDLLPRNSLRNPVVEKILNQMINVVNFVVDAYGKPDEIRIELARELKKSSKERKEMTMAINKTTADHEKYRQILQKEFGLTNVTRNDIIRYKLYLELKSNGYKTLYSNTYIPQEKLFSKEFDIEHIIPKAKLFDDSFSNKTLESRRVNIEKSNLTAYDYVLGVYDEKGINDYEIRIENLYKSGIISKAKRDKLMMKEVDIPSGFIERDLRDSQYIAKKAREILEELVRFVVPTTGTITDRLREDWQLIDVMQELNWEKYDKLGLTEIVKDKDGREIRRIKDWTKRNDHRHHAMDALTVAFTKRSYIQYLNNLNARSDKSGSIYAIEQKELYRDKHGKLRFNPPMPLDVFRAEAKRQLENTLISIKARNKVLTQNVNITKTKKTESGYRKKVQLTPRGQLHNETFYGAIKWYVPKLESVGSGFNVEQIALVANKRYREALLTRLAACGNDPKKAFTGKNSLEKNPLYLDELHTQQVPTKVKTVTLETVYTTRKDISSDLKIEKVIDRKVRSILKERLKEFGGDPKKAFSNLDANPIWLNKEKGISIKRVTITAVSKAEPLHAKRDHFGKYILDANGAKQPVDYVNTGNNHHVAIYRDEKGVLQERVVSFYEATASASVGLPVVDKEYRKSEGWTFLFSMKQNEYFVFPNEKNGFNPNEIDLMDPDNYALISPNLFRVQKITSKDYVFRHHLETTVEDRKELQNITWKRFQSLTNLDKLVKVRVNHIGQIVSVGEY

SEQ ID NO: 3678 - protein, 1473 aa, unidentified
  REGION 1..1473: note = Description of Unknown: Cas Enzyme sequence
MNKNILGLDLGTNSIGWALVEQNFENKYGNILGIGSRIIPMSQDIIGEFGKGNSVSQTAERTRFRSVRRLRERYLLRRERLHRVLNVLGFLPEHYAAEIDFEKRLGKFLDESEPKVAWKKNNEGKFQFLFQKSFNEMVEDFKASGQEIKIPYDWTIYYLRKKAIMAKIEKEELAWLILNFNQKRGYYQLRGEDDETPSNIKEYVELLTVVKIEKGETDKKNNKKHWYNVTLNNGWVYSATFSSEPQWLNAEKEFLVTEELDENGDIKIVKDRKQDKEGKEKRKITPLPTFDEIDLMSKADQDKIYKKIKAKTEITISNSGKTVGTYIYDTLLQKPQQKIRGKLIRTIERKFYKEELKDILQKQIELQPELFSNDLYNESVRELYRNNDSQQLQLSKKDFVHLFLEDIIFFQRPLHSQKSSIGNCTLEYRKYKDETGIEQTQWLKVIPKSNPYYQEYRLWQWIYNLSIYKKEDDSNVTAEFLNGLEDWESLFEFLNDRKEVEQKTLIKYFLDQKGFKGKVLAAELEKYRWNYVEDKKYPCNETKMQISTRLEKVQGISTGFLTREIEQQLWHIIYSVTDKIDYEKALKTFAAKHQLHEISFVDAFKKIPPFKNDYGSFSEKAIKKLLPLLRLGKYWSWDAIDKNSKNRIEKIVSGEYDETIKDKIRDKALHLKQEHHFQGLQLWLAQYIVYGRHSEAAEIGKWNSVDDLEQYLQDFKQHSLRNPIVEQVVTETLRVVKDIWSKYGNGAKDFFDEIHIELGREMKLPAEERDRMTRQITENENTNLRIKALLSELMNDANVENVRPYSPMQQEILKIYEDGVLNSDIEIQEDILKISKTAQPSSSDLKRYKLWLEQKYRSPYTGEIIPLNKLFTTEYEIEHIIPQSRYFDNSLSNKVICEAAVNKLKDNQVGLAFIKNFHGQIVECGLGKKVKIFEVTGYEEFVKQHYGKNRSKRNKLLMEEIPEKMIERQMNDTRYISKFISGLLSNIVRADINDDGVNSKNVLPGNGKITSELKQDWGLNDVWNELILPRFERMNKLTNSTYFTTWNENHQKFLPTVPLEFSKGFSKKRIDHRHHAMDALVIACATRDHINLLNNQSARSDTKRYDLKRKLMRFEKIAYNHPQTGERIEKEVPKGFLKPWENFTIDTKNSLENIIVSFKQNLRVINKATNRYEKWIKKDGVNTKETVEQKGVNWAIRKPMHKDTVSGKVDLPRIKVPKGKILTATRKSLDATYDLKSIEAITDTGIQKILKNYLASKGNNHELAFSPEGIEEMNKNIQNYNDGKFHQPIYKVRVFELGSKFQLGELGNKKTKYVEAAKGTNLFFAIYQDNSGKRSFETIPLNEVIERQKQGLRPVPQENEKGGQLLFHLSPNDLVYVPTEDERENSSRIDFENLTKEQMKRLYNVNDFSSTCYFTPNRIAKAIAAKEVDLSFDKEKNKVTGSFDSKTASFEGVQIKDICIKLKIDRLGNISQV

SEQ ID NO: 3679 - protein, 1435 aa, unidentified
  REGION 1..1435: note = Description of Unknown: Cas Enzyme sequence
MDKKIIVGLDVGTNSIGWAVIERDIENEYGKILGMGSRIIPTDSDLLSKYETGQAASKNANRRQARGARRLRQRYKLRRQRLIECLKILGWLPEDFQPGHQLPISDETLIELAVAFGSQEVSADWVIYFLRHKALTEQVSPQELARILYHMNQRRGFKSNRKSGNQIPSGDGEESEEGKRKRVKTVEIVTIKSITDTGEKVKGNSLFAITLADGRTGEIQRKTKPDWEGKEMELEITWVPPTKKDPARYEFRPLNNSDADKWAKQKLAREEAIRRSGYQYPGNYYFHELKANPRYVIKDVSIDRQFYIAELEAILHKQIELNPALNNRHKINEIAKRLYPKNTEKQKEISSNDLVHLFVKDLIYFQRPLKSKKSSIADCRLAFKNYRDPSTGKKIAYKAAPISSPVFQEFRIWQTVNNIRILQRESRDANGRLQFEKDVTEMYLNVEVREKLFELFDAREKVTQKQILKTIGLNDDAYLVNLYRMNEEKELPGNETKTLIRRQFKRAGIEETGEALLQDAEKFYKLWHILYSLDEEAAIQSALQRQFALSPEQAAIIAKAPPYKQQYGSLSHQAMSRLLPLMRCGKYWKWEAIDSTTRQRLENVFTGEFDEGIPDRVRELFIKHQITSQEACQGLMVPMASYAVYGVHSERNAAYYEKPEQLIPKEPLNLRNPIVEQVVNETLRLMHDIWVKYGRPYEIHIELSRELKKNAEERKELSATMAANENENKRIAAILRELKWGNPNSLADIERLKLWERQAGEKAREEFKNIRFKKPSEPTKDEIQKYKLWAQQKFLSPYTGNPIPISKLFTREYDIDHIIPRSRLFDDSIENKVVVEANLNQKKDNQTAFEFIRKCGGAGEIFSVAEYETHVNKFFYGKKKRLLLSEDIPDSFANRQLVDSRYISRKLHELLAPVAENQRDPVIATTGKITSELRSSWGLGELMKKLVRWRFDRLSEKTNELFAWEEDELDHEEKPTGRKILRLKGYEKRIDHRHHAQDALVIACTTRSHIKYLNDLNALQYRKEAKDEELERQLPKLLEPGKNNYLQSRKFRKPWPRFVADAAEAIEGIIVSFKNNIRLYGKKVNKNWRYIQQPDGTYKKELKPVIDENGQKKLSPYVRQSLHKATFAGKIQLREYKDVSLSEALKSPATVANENERKHLQQLVQNAGCDMKKVQKLYKENPLKDSNGNELKKIRVMYMAPYYVNRVELSSGFDEKRLGKIPDKVLRNDLRQHIKDIEQLNASRSKDEQIDPFSAEGIEIFNRNRAVPVHKIRIKEESEAKFEIRPGAFTEADKGTNLFYVIYENVNDPSDRKFESIPLRTVIEAKAAGSDFVEERPGYRWFTLSPNDLVYLPDEGEPIATIDWSNTKALSRKIYKLVSCNKAQAFFLPHTVSKVIVDKVEFDSLNKVERALDGRMIKQHCIKIKVDRLGNISRY

SEQ ID NO: 3680 - protein, 1502 aa, unidentified
  REGION 1..1502: note = Description of Unknown: Cas Enzyme sequence
MKKILGLDIGTNSIGWAFTETNAYDNPETLNGRIIQLGSRIIPMDADAMNKFNSGNPESKTAGRRQARSARRLNDRYKLRRTRLIEALKIVGWIPETFPSEFKKLKSHSINQYLPFSEVLKKEAADFFEIHDSTTKKESESAISEDWLIYFLKTKALYTQISLSDLARILYHYNQRRGFKSSRKDAKIEDENHEVKYPITEKWVEIITISAIVEKEKGEGRDNGFTFYELTCKAADFEFKTIKKRKNPLNWLNKSIEVEITKKTTKDLNTSFSIAEVDQNAWESRKRALEKDIANENLTISEYYLNKLKEDRNYPIKNRVVDRQFYQKELIKIWEKQAQFYNSEFISQDKISKIADTFYPYNKEKNKELKRKDLFHIFFNDIIYYQRGLKSQKGLLANCQYETKSYKTKTGEIKKAGIKVIAKSNPAFQEYRIWQTIHNLKIIQKEAIVNGKIKLNIDRTLEFLTVENKEKLFELFDYNSEISHDTILRSFGFKKDHLENGEKSFNYRLNFPEDKNFLGNQTKALFRKIFRKHNYVDQGEILLNDPDQLNQLWHIIYSLPEEKDIYNALSNKKYFNFPIPVITHLSKLPEFPSQYASLSFKAIKKMIPLMRIGKYWNETDLTSQIKEKIQYILNGEFNEQISEKVREEVKKIQASKVSDFSGLPTHIAAYIVYGRHSEKENSENYTSVEEFKINELIPYNSLRNPVVEKIIRETLKLVKDIWQNENLGRPDYIHVELGREMKNTNDDRRKISEANNKNRIEKERIVNLLKELKYSNFNEFSLSDIEKFRLWKESGGQKGEEAFDELFKKNNAEFVKDADIAKYRYWAEQNCRSPYSGRTIPLSELFSEKYQIDHIIPRAKFYDDSMSNKVVVESEFNAAKGNRLAIQFIEDFQGNEIHLSDGGKANVLSLEQYNKFVDEVFVNKKKRRYLKLYEVPEDFIERQMNDTKYISRTVAQLLRPIAIGNETDEGVVYTSGSITSDLKNKWGLNKLWKDILRPRFERLEEITGEKLILENSEKQNDYFFARDYKRIDHRHHALDALVIACTSRAHIKYLNSLNSFSNNKQEIIKYNQWAKWKYLLNKKKQLENKVNGMTEFSAPWETFYTDAKNALESVIVSHKPTSKLISKAINKYYKWVELEGENGEKIWKKKIHFQESPKDDDKYWVAVRQSLFGQPYGQICLAEYKKGVDIKAAIKVQIQFLSREKKEWNTEDWRIAKSEWRKQVDNVIKQFNFDEKAIINHFTKNPIKEKTGSVVEKIDLLQFKRYASKKVSIDESFTKDKIDKMPYSNLEKNWLTNILKTHLEEYGNDPKLAFKGEALEMLNRKAPFKINKVTRKESGEKIELNNKLLDGDAGVNQYFIVEIKQRINKKTGEEETVRSYTTPDFLECIERLAKGLPIHDDNPNSKYIVLSPGDLVYVPDEGENINAIDWTNKKQIAGRIYIMRSSNKGQCFFTPAMIAKPIIDTSELGSNNKSERAWNNQMIKENFIKLKVDRLGNFVALK

SEQ ID NO: 3681 - protein, 1371 aa, unidentified
  REGION 1..1371: note = Description of Unknown: Cas Enzyme sequence
MKKILGLDLGTTSIGWSYVKEADKSEEKSEIVRLGVRVNPLTTDEQNNFTLGRSQSVNADRTSARSARRNLQRYKLRRDNLIEVLKKIGFINDDSILTESGKNSTHETLSLRAKATTERVEKDEFARILLSINKKRGYKSSRKAKNDEEGALIDGMGVARRLYEDNLTPGQFVYSLLNDNKNYIPDFYRSDLKNEFDLIWNNHKNAFPEIVNDKVYAELNNIGKQATAKKFREEFDIYTTDIKGTAKEKKIKAYELRSKAVTEQLSKDSLAYVLAEVNNNIYNSSGYLGAISDRSKELVFNKTTVGEYLYSKIKNNPACSLKNMVFYRQDYLNEFETIWETQATFYPELTRELKSEIRDIVIFYQRSLKSQKHLVSYCEFEKWEEEYFDKTKNRTQKRVVGHKVIPKSSLLFQEFKIWHIINNIELENRETAQIYTLDEEQKDILYNELNIKGKQKGNDVLKLLMKKPKEWNINYDEIEGNNTTSALYKAYKTILYWEGYDLDLSKPPETIKEIVKSIFDSLGIKSEILEFNSELSGDSFDKQLSYRLWHTLYSVESEKEVVKTLIKVFGFKENHAKLLSGVPLQQDHGSLSSRAIRKITPFLKGGNNYYEACALAGYNHSSSLTTEENNSRELKDKLDLLKKNSLRNPVVEKIINQMINIVNAVIEDDEMGRPDVIRVEMARELKNSAGQRQKMTEGIGKAKRNHDRIRAILDKEFDIKNPTRNDIIRYKLYEELKSNGYKTIYSNRYISQESLFSKEIDIEHIIPKARFFDDSFSNKTLEFRSENIEKGNATAIDFVENKYGSEYLDEYKSRVKRMLTTKGDGSITKAKYNKLLMNKENIPDDFLNRDIGNTQYIAKKAKEILSQITRVVETTTGTVTDRLRSDWGIIDVMKELNMPKYRNLGLVETVEGRDKKNKERIKDWTKRNDHRHHAMDALTVAFTKHSYIQYLNNLNARDKASGSVIAIEKKELYRNSNGKLLFKEPFVNFRTVAKEHIESILISHKAKNKVFTRNINKIKTGDRGKYIEKIQLTPRGQLHKETVYGAIKQPVVKDIKIDGKLNADIAMSITKPAYRDAVITRLEQYNNDPKKAFTGKNSLAKNPVYIDTENKICLPEKVKAKVYEEAYTIRKPIEPGLAVDKVIDEGIKRKLKERLAEHDGNDKKAFSDLDKNPIWLNKDKGVALKRVKISGIKNAVSLHEKRDNRGIKITDDNGKHIKSDFVSTGNNHHIAIYKDNKGKLQEKVVSLFEAITAVNNGLSVIDKNYNSEIGWQFMFTLKSNEMFLFPSDEFDPEEIDIYDVKNYNILSKHLYRVQKIASKDYFFRHHLETQLNDNKELLGLIYKRLRNPEALKDLVKVRINHLGKIVQVGEY

SEQ ID NO: 3682 - protein, 1093 aa, unidentified
  REGION 1..1093: note = Description of Unknown: Cas Enzyme sequence
MKRILGLDLGTNSIGWALIKEGDENEKSEILGLGSRIIPMDDAAMSDFNKGSLKSQTSVRTDLRGVRRLHERHILRRERLHRVLHILGFLPEHYDDSIDFVKNFGQFKTNTEPKLVYRINKETNKSEFIFQQSFNEMVEEFKQTLPQLFEKDKKIPYDWTIYYLRKKALTQKIDKEELAWLLLQFNQKRGYYQLRGEDDEDATKTAKTRKYFDKQVISNIIDTNEIYKGLKVLIVELANGNKGKIFKKEIPQWIGVEKNIIATVDLDKDGKDRYDDNGLLNQRFTIPTDAEWETEWKLIKLKTEKDLNDSNKTVGCYIYDTLLIKPNQKINGKLVRTIERKFYKQELETILQIQQQFHTELKNSELYEACLKELYENNDAHRNNISNKDFKHLFLNDIIFYQRPLKSKKSLISNCPYETRTFLKDGKKETQSLKCIAKSNPLFQEFRLWQFLQNLKIIAREKIINNKTETDVNVTTEFLKTENDYIALFDWLNERKEIKQDILLTSYFKIKKAKGADKLPYRWNYVEDKEYPCNETYTQIASRLKKCENIADDFLTKEREMALWHILYSVEDKHEIEKALNSFAKKHNLNSDFIEHFKKFPPIKKEYGSYSEKAIKKLLPLMRNGKYWDEENIHTQTKDRIDKLLNGEYDDKIRNRVREKAINLTSINDFRNLPLWLVCYIVYDRHSEATDIKQWKIPADIELYLRNEFKQHSLRNPIVEQVITETLRVVKDIWKQYGESNPGFFSEIHIELGREMKNPADVRGKMTNKITENENTNLRIKSLLIEMMNDSTIEDVRPYSPNQQEILKIYEEGILNSDIEIPDDIFKISKQSQPSSKELERYKLWLDQKYRSPYTGEMIPLGKLFTTAYQIEHIIPQSRYFDDSFSNKVICESEVNQDKDNATGFEYIKNNAGKIIDLNFGKQVKIFTVEAYEHFVKQHFANNRGKMKKLLMEDIPEGFIERQMNDTRYISKVVKSLLSNIVREDGEQDATSKHVLSSNGSITTILKQDWGLNDVWNDIITPRFERMNELTKSNKFGEWKNKNGKKIFQTEVPFELSKGFSKKRIDHRHHAMDALVIACATRNHINYLNNESA

SEQ ID NO: 3683 - protein, 1381 aa, unidentified
  REGION 1..1381: note = Description of Unknown: Cas Enzyme sequence
MKRILGLDLGTTSIGWAVVNEAENENEKSTIVKLGVRVNPLSVDELTNFEKGKSITTNADRTLKRSMRRNLQRFKLRKENLIEILKDHGFITNETVLSENGNFTTFETYKLRAKAATENVTLEQFARILLMINKKRGYKSSRKAKSQDEGQLIDGMEIAKTLYNENITPGQFVLNILNKGKKYIPDFYRSDLQSEFDKIFDKQLTFHPEYLSIELKEELRGKKRDAIWAICAKTFKEKGFELVGIKRQGNATEQKKENYIWRVNGLTEKLDLEQLVIVLQQINIQLNSSSGYLGSISDRSKELYFDKKTVGQYLMAQLAQDPNCSLKNQVFYRQDYLDEFNTIWETQTTFHKELTPKLKEEIRDVIIFYQRRLKSQKGLIGFCEFESRQIEVSIDGQKKIKTVGLKVCPKSSPLFQEFKIWQILNNIEITEKASHAKRTLEQEEKEILFTELSIKDRLSKDETLKILFPKSYKLYDLNYKDIEGNRTQASLFKAYQQIIGLSGHGEYEFSKMKRDDLFEIVEGVFKGFGYNTDILKFDSSIEGNAFEKQALFQLWHLLYSFEGDDSNTGNEKLISKISELYGFEKEYASIIANVTFQDDYGSLSSKAIRKIVPYLKEGNEFSLACGYAGYKHSKSSLTKEELENKVLKDKLTILPKNSLRNPVVEKILNQMINVVNSAIETYGKPDEIRIELARELKKSAKEREDLTKSINESTLEHEKYRSTLQNEFGISHVSRNDIIRYKLYLELEHNGYKTLYSNTYISKEKLFSKEFDIEHIIPQSRLFDDSFSNKTLESRSINIEKANDTAFDYILKKDGESGIEKYLKNIDDLYANGKIKRAKYNKLRMKGVDIPDGFIDRDIRDTQYIAKKAKTLLEKIVKEVISTSGQITDRLREDWQLIDVMQELNWDKYNKIPGQTEIIENRDGHKIKRIKDWTKRNDHRHHAMDALTIAFTKRSHIQYLNNLNARSDKAGSIYGIEAKELERDSKGKLKFKAPFQVNEFRAEAKKHLENTLISIKAKNKVATININTTKTKDGVNKKKQLTPRGQLHLETVFGSNQQYETKLEKVNASFTEDLIEKVAKKSNREALMKRLQEFGNDPKKAFTGKNSLDKNPIWLDETKQYSVPEKVETVSMVTIYTIRKEITPDLKIEKVVDVGIRKILETRLKEYNNDSKKAFSNLNENPIWLNKEKGISIKRVTITGISNAEALHEKKDKFGNLILDKNGNPQPVDFVNTGNNHHVAIYKDDKGNLQENVIPFFEATTRISMGYPIIDKEYRASEGWQFLFSMKQNEYFVFPNEKTGFNPYEIDLLNPDNYYLISPNLFRVQKFTVKDYFFRHHLETNVENNNALKDITWLRLGINGIQNICKVRINHIGQIVSVGEY

SEQ ID NO: 3684 - protein, 1233 aa, unidentified
  REGION 1..1233: note = Description of Unknown: Cas Enzyme sequence
VKKVLGLDLGVTSIGWALVLEGDEKKEILSMGSRIIPISTEDKNEFTSGNAITKNQNRTLKRTQRKGYDRYQLRRKYLVEKLKTCKMYPDESMMKISKLDLWQLRSNAVDKKVSLTEIGRILLHLNQKRGYRSSRSEANLDKKDTEYVAKVKSRYSLLKEEGLTIGQKFFQEFVNDSHYRIKDQVFPREAYFEEFEKILTNQSKFYPEIINSDFIREVRDEIIYYQRRLKSQKKLVSICEFEGFWTKIKIGENEKEIFVGPRVAPKSSPIFQVSKIWETINNITIRKKNGEYIILTALQKNEIIEHLDNNDKLTFVELLKILNLKKDDVYGNKQLLSGLQGNKTKVEIKKCFADNQKFNQLFDFNLQIHESDEDGYLLDKNSGEILDSKRRKVIDHNFEEQPLYRLWHTIYSISEKVECKNALMKKFSMSEEIADKLASIDFTKSGFGNKSNRAIRKILPYMMEGDGYSVACSFAGYNHSNSLTKDENYERKLFDRLKLLDKNSLRQPIVEKILNQMINVVNVIIEKYGKPDEIRVELARELKLSRDERNDAFKYMNQRTKENQIIERELQEFGLRATRNNIIKYRLYHEISGEDKKQNAICIYCGNPISFSSAILGEEVDIEHIIPKSRIFDDSQSNKTLSHRRCNATKGDKTAFDFMKLKSENDFNSYIERVNTLYKNKLIGKGKRDKYLTPGNKIPNDFIERQLRETQYISKKAREILQSICHNVWATSGEITSELRHIWGWDDVLMNLQLPKYRNLGLTELKEVLQNESITKKEIIPGWSKRDDHRHHAIDALTIACTKQSFVQRFNTLNSEKTRKSMFEEISNFDNKKSLLENFVISQKPFSTRNIEDEVSKILVSFKSGKKVASIGKRKIRKNGKLNVVQEGIVIPRGALSEESIYGKIKTLVSGNLKYIFNNPHLIFKDYIRKLVEERLSSFNGDVKKALTSLKKDPIYLDEHKKIVLEYATCFHDEIVIKKPIQSLNEKQVNDIVDPVVRQKVLDRLEKFGGKAKEAFKNLEDDPIWFNEKERIPIKTVRWFSGLSAVEPIKKDDEGNSIGFVKPGNNHHIAIYLDENNLKQITICTFWHAVERKKYGLPIIIKNPAEVIDKILEEDEDKYPETFLEKLPNVKWQFIESFQQNEMFILGMNEDEFNIAMKTNNHKVLSDYLYRVQKLFYNGKALEIFFRHHLETQLNDDTNSKISKRFYQVQSLGVLESLNPKKVKINLLGEIFK

SEQ ID NO: 3685 - protein, 1450 aa, unidentified
  REGION 1..1450: note = Description of Unknown: Cas Enzyme sequence
MKKILGLDLGTNSIGWALIEQDFENRQGKILGLGSRIIPMSQDQLGDFGKGNSISQTAERTRMRSVRRLRERHLLRRQRLLRLLNILGYLPEHYALEIDFEHRLGQFLPEKEPKIAYNNKQFIFKNSFSEMLEDFRKQRPDYLKDEAGNEKLIPYDWTIYFLRKKALTEKIEKEELAWILLNFNQKRGYYQLRGEEEEEFLNKIVEFHSLAITDVKADDQQKGKSEVWYSLVLENGWIYRRSSKIPLYDWKDKVRDFIVTTELNDDGTVKKDKEGREKRSFRAPGEDDWTLLKKKTEQEIEQANETVGAYIYDTLLQNPKQKIRGKLVRTIERKYYKDELRQILKKQSEYHSELQDEEIYNDCVRELYKNNETHQLTLSKRDFVHLFLDDIIFYQRPLKSKKSSITNCTLEYREFTDKEGKRQIQHLKAIPKSHPAYQEFRLWQWIYNLSIYKKDDDTNITKSVLQNTEDYEKLFEFLNNRKDVDQKAVIKYLLANTGLKGKDLNNEIIKYRWNFVEDKLYPCNETHTNIKNRIEKVVNIGNDFLTAETEQQLWHIIYSVTDKTEYEKALKQYAKKHKLDIDSFVENFIKYPPFKSEYGSYSVKAIKKLLPLIRLGKYWEWDNIDHKTKQRIDKIINAEEDSEIRVLVREKASKNELKTPNDFQGLQLWLASYIVYDRHSEATSNDKWNSLEDLSQYLEDFKQHSLRNPIVEQVITETLRVVKDIWAKFGNGAKDYFNEIHVELGREMKNTAEERKSITNLVVENENTNLRIKSLLAELKNDPKIENVRPHSPMQQEILKIFEDGVLKSNIELPDEILKISKSALPTNSELQRYKLWLEQKYRSPYTGKIIPLHKLFTPAYEIEHIIPQSRFFDDSFNNKIICESAVNKLKDNLLGLEFVKKHHGEIIELGIGNESVKIFSEEEYLDFIKQNYLNNRSKRNKLLLDEIPDKMIKRQLNDTRYISKFISALLSNIVRSAHNDDGINSKNVIPGNGKITSRLKQDWGLNDVWNDLILPRFQRMNKLTNTTDFTTYNEKYQKELPTVPIGLSKGFQKKRIDHRHHALDALVIACATRDHVNLLNNLYAKSNERFDLNRKLRKFEKVSYKQPKKGKTVEREVPMDFIKPWENFTEDANNNLESIIVSFKQNLRVINKTTNKYTNWIEKDGKKVKGVVSQTKGDSWAIRKPMHKDTVSGEVKLAWIKVPKGKRLTATRKPIDITFDLKTIESITDTGIQKILKNYLISKENNPELAFTPEGLEEMNKNILIYNDGKLHQPIYKARVFELGSKFPLGQIGNKESKFVEAAKGTNLFFAIYIDNKGKRDYDSIPLNIVIERQKHGLNAVPETNEKGYKLLFHLSPNDLVYAPTLEEIPEIGHKQIDINYIKKVNRVYKMVSSSGKQCFFIKHEVSTPIVYKSEYSALNKMERSIDDLMIKDVCSKIIVDRLGNVIYT

SEQ ID NO: 3686 - protein, 1076 aa, unidentified
  REGION 1..1076: note = Description of Unknown: Cas Enzyme sequence
MSTTLGLDIGTNSIGWCLVEDRKRIIDIGVRIFPVGVKEDDFAKTGSEVSKNAARRTARGARRLNDRYKLRRKQLKKLLLQHGMMPTEEMIIKIKPDALYGLRKKGLDEQISLKEFGRILLLLNQRRGFRSNKKDAKTEAAKKEKSEYLQKMDELYNKVTQSNCRTVGEYFYSLFERNKDIVNWHNELEPVERIRTQFIYRKLYEDEFEKLWDNQKKFYNTVLTDENKKKIKDNCIYYQRPLKSQKHLVGKCRFEPTKRVAPRSSFEFQEFRIWQTLNDIRLTYENRFSSPLTLEEKLVIAEKLSNSATLSHAKIKEGIGLKKAAFNDMPEKIKGNSTRAVLRKALGEEYYDNLNNDKIYRLWHTLFFATDADWLYNHAIEKLGLNEDQAKKYADIDLEPDYGNISTKAINKILPFMKEGYEYSKACELAGYHHSYDEETDSKDRTLDDKIIRKPNGRMDEIDELRNQIVQQALGEMTRLINAIIAENGKPDKIRVELSRELKKPKNVREAIRFKSNEKARLREKYIEFLKQRLNRSINKSDMQKFELWLELEFPKTEFDKIKKDIEYDKYIKFAKNVKSSDLEKYKLYLECGRISPYTGNVINLEKLFSPDIEIEHIIPYSKFPDDSFMNKTLSERTFNQEKGNRTAMMYFKDFPDKAIAFKERIKFFNEGKQERFMMEAVPDDFLNSQLTNNAYIARQARKVLKKICRDVYITNGQVTSQLRRFWQLNDILNPDGKNEKSRHDHRHHAIDALVVAFSDYRKIQNLSIQNQFNIDNANFPEPFTSFKELTKEMIDGILVSHRNKKRLLTARKNKYTHSKNPQPQNTFAVRGSLHEETIYGQIKHPETGKLVFVVRKPVSTIDKMKQIEKIIDKGIREVLKDHIMHNGGESKIKEAMKLPVYIQSRDKKKKIKINSVRMLDPAEQMIQLRPNENPDLFVSSGNNYCIAIYQDEQTNKREFETISFYNAVKNKKDHQEVIPKVKGNRKLVTFLKQFDMIVVFENHPDEIDWEDNTVLFRRLYRLIKTDVNGNMIFGIHNLSNLKADRDKKPHIIRWNYNTYKGVKVKISTTGKILKY

SEQ ID NO: 3687 - protein, 1430 aa, unidentified
  REGION 1..1430: note = Description of Unknown: Cas Enzyme sequence
MKNILGLDIGSNSIGWALIENDLEEHTGKIIAAGSRIIPMEGREKDFEAGNSVSKNADRRVTRSARRLLQRYRLRRTRLIKVLKTLNWISNNFPEDFKHLDKFNINDYLPFSTETIEDAKKLFNSQSIPNDWIIYFLRNKALKEKITLQELARIIYHFNQRRGFKSSRKDRKEELTETEEIKFPLREKSVEVLTINSIQETGEKNKFGKVFLVHAATPELNQIVGTITRKMIPDWISKKIELEITKITNKAGEIRYEFRLPDRSDWEKMKVALERDIKESGLHISQYHLNQLLVNRNYRIKDRIVDRSLYQAEFDAIWAKQSEYHKELNDNSILPSLVELLYKHNYEKRNELLKNDLHYLLKNDIIYYQRDLKSQKHLIADCRYEKKMDNNGNIYGVKVAHKSSPVFQEFRIWQDIQSLKIFRLEQIESNGKIKFDVDETKIYLTQDKVERLFTLFDKKNNLTQKEIFKELSDEKHKLSETTHRLNYPKEKIFKGNETKSFFRKVFKKHNYEIQGEQILNDKSKFELLWHIFYSLPDEKSIVSALTRNFSFPNDLARHIAKLPEFKSEFASYSSKAIKKLLSLMRTGSYWKMEDISQQIKERIEKIITGEYDENISIAVRNKIVDWQIHNKKLNSIECFNGLPLWLAAYVVYGRHSERENSDKFESFDEIKLINQNTLRNPIVEQITNETLQVVKEIWKNYGRPEEIHIELARDLKRNAEERKKINDQIFKNQTDRKRVVAILKELKNANSDSPSDIERLRLWEETGNREAKDSFPKFSKEPTKQEIEKYLLWGEQNHISPYTGNIIPLSKLFTPEYEIEHIIPKSRFFDDSFGNKTISEASVNSFKDNNTAMQMINEHGGREIEHRGKRFKLLSVDEYKQHIKSTFYGKWKKVNYFLREDIPEDFITRQINDTRYISRKLGELLYPVADDEVVFTIGSITSELKDKWGLNRVWKEILRPRFERLEKITGEKLINLDKEHNDIHFKKDYKRVDHRHHALDALIIAATSREHIRYLNSLNAASEKDKLNRKYKLVKSKIREFNLPWDTFTKDVKDTLKQIIVSHKNRTRVVTKGFNLYTKWVLDNGTWIKKMVRQDNNSLFSVRKSLFKEPLGKINLAEYKDVNVKKAVEVQFNYLTKYTSKLQPRISNKYLRNYINKLIKNCEFDLSATLKYIKDNPIKDNDGKVLPKIQILEFSEYAAKRVTLDKTFDIKKIEKIPYSSHNNNRLVKILREHLNENGNNPAEAFSGEGLDVLAKKYGKPITKVTTFEEIGSKFSLGGKLVEADKGSNVFFVIYENTNDRNDRIITSESSLPLLNVIECISNNLPIVQDKPGYKTIILSPNDLVYVPEADENINSIDWTVKQNISDRIYKVVSFSGARIYFIPHFVSSPLIETTELGHNNKAEKTWDGIMIKNVCIKINIDRLGNIKLAI

SEQ ID NO: 3688 - protein, 1687 aa, unidentified
  REGION 1..1687: note = Description of Unknown: Cas Enzyme sequence
KKEVKVFKCKAEVTIISTGEIKTGVEGYCYETFEKGSEHEVKWVKKDKDDKYNYFNYPGEFKQKNKVNEFHEQVLIKIVSCEPAYEYFKKKWQYDIAVVDDAENSYEGKLGLSKTEQAKKFVPGQSIILEKITKLNEDGTEEEHRFQLPSSDWKRRMIEIEEEIKKKAKEKKENGEFDARGEGNYHVCHFFLDKIEENKKTEKKTIRGRVDKSYKNYRIKENIIQRHRYQKEFESIWKRQANCNEDFKKLLNNKKLLEELLAYIFPDAGEKKKSNSRQEQYRSEAMNKEDGLFHLIFQQVIYYQRDLKKQEWLIGECQYETGLEPDLNDDSTPDINLKRKKAINPVIARSHPLYQEFRLWKQINQISIAERIDTPMPQGMKRQKKYLERLLSKEQKLKLYDKLNEQKQLKFDGLLKTIELTQQGEKGNYKYYIRGYNKKYLIGNETLKTIKSLLGEEVFSKIFGIKLIPYSDEKFTRFWKLLFDRYGNETDENDERVMKIIDFLKSYLKMSGESEQEYEEQIKNLALKLADHKFQRIYGSLSEKAIRKLLPLMQPVHEGNQLPEEYAKKIRQIEKLYDKYKDRLNEDAKQLESDLNADWKITEQGEISKELLKGHVAEFKKLNEPLDKGGWQEWAAAQLMYGRHTAKAPDKIFNNYHEIKRLGKDETLRNPVVEQMVNETLQLVKSLWKYFGFKPDEIRVELARELKNNAEQRERMFKGMNKAEQANKECVYELMQMSYKRGDKTIIPENECLCDDCKNNGNSSSCYKKAKFSRIPSRNEILKYKLWKEQKFVSPYSGKPISISKLFDGSHYNKDHIIPEQRFFDDSNANKVIVEKTFNHPYKSNLTAMEFIKQYGGENGGEIEGVHIMSINEYREHVERAFENSRQKMKFLLMEEIPDDFLNRQIKETQYISRKVKEKLAEVVGIDKVTTTTGGITDYLREEWGLNDVFKDITKERYKRMALLARPLGDTPDDWVQKAEKEEAEKQSKQDRNHEKWRIPQWRKRHDHRHHAIDALIVACTSQGNVTQLNNLHQRVQEELMKQKDELKAKLKLKAAEEITEENVMELFAQLSEDARKQMFEGMKSMRKFDKPWKTFTADARKVIEQIAVAHKRKERILIQNKEDKNSGSRLEELILRVRGGLHLSRAYGSQQIRKKSKVSLEEAFTEPDRIVDEEIKRQIESRKSIYGDFKTFRKSLKNDPIIFLEMEEKKKSKSALSKIEVYSGDGNRETKRITFEELAVAENPNKLIEKIISDDIKKDISKFLEDKNNDKKKAFEEDIDEFNEQRISSRKMPVKGFRIWYAKDSDDEDETKLFPVKHKFTFDNEGKERDTYYETKDNYCVAILKNGNERILIPITFFDSVKWVTEHFNYDKKNKFKFPRRYDERLKYVEEIIQNEISKKNSGEILMLLQQDDLVYHPFLDDNGKPDVELKNFPTDSKTDDYKNFWFSENEVEYEIEDGETKRKIIKKYKRINRIYRVVKFSGNDCYFTPHNYASQIIYKPVKKDNNEEGDRNAQINPAGYKFALPKKGLEEYATWKNCCQFVFDENFIERLHLERRIKQLRKSNASKDEIDILKKKQKKYPQIKIQDSCIKIEVDRLGNIKPFSSEKKTSSGNVAEPAIGYSRTFSIKPNEELDEERRSIQANMTPEENLKALHQLRSITHEESELNKPLSPGTEIRFRKSDENS

SEQ ID NO: 3689 - protein, 1466 aa, unidentified
  REGION 1..1466: note = Description of Unknown: Cas Enzyme sequence
MQKILGLDLGTNSIGLTIRDTSLDENQFVKYGVTTFKKGVGEGKTGEFSLAAERTKHRSTRRLYQARKYRLWATLEVLIDYNYCPLSKEDLNQWRYYNKVKGYFRKYPIYAVEFEQWIRLDFNNDNKPDYTSPYQLRKELVEKKLDLTNKVDRYKIGRALYHIAQRRGFKSSRKTGDKENTSVYNGSKDSGAKGVNEIKELIEKCGTLGSALASLENNGSRIRNRYTLRKHYVDEVNKILEKQTIPEHSELHTKIHKAIFYQRPLRSQKGLIGKCTLEPNKARCPISHPYFEEFRAWAFLNNIKCKINKDDNWEKLPLEIKEEIYNEKFFKKENHFSFSEINKLISKKGFNWILNYKDKTTVSGCPISARLKSIFGDDWKNHKKGTDKVKKIKRTNGSYKEHKIVYKMEDIWHVLFSFEDEECVIDFAKEKLELNEKQLNDFVSAWNKLQDGYSMLSLNAIKKIIPFLRKGLIYTEAVLLANMPEVLGKEVWTKSEDNLTSCIGDLIDKNRNEKKLLNIVNGLISKWYANDFKVGFKDPHYTLDDQDKQSILKAIISAFGEKTWENIYNKEYIIEKMNFLYQAFFKNDFEWVYIKDEKYYRIEYKGETFYKNIGNGYYKIPHLLDYIKEYLKETYKASEKKLDKLYHPSQINIYPKSKPNKEGRILLQSPKTGSFKNPMAMRTLYELRKIINYLISTDEIDEETEVVVEISRELNDANKRWAIATYQKRREEENQEFEMAIIELLNDPEFTGKIKANPQSSDDINKFRVWYEQVEYKNAFKREPSKSKINKDGNEQESNDPRKYDWNNIRSDIVLKALNETDMIKKYRLWKEQQCRCIYTGNTINLSDLFDENVIDFEHTIPRSISFDNSLANLTVCFADYNRNIKKNRIPTALENYESDSNGYTAIKPRLETWDKRIEEIKNNIEYWKKKSKKAPDKDEKDKAIRQRHLWQFELDYWENKLSRFTMTEVKSGFKNSQLIDTQIISKYAFHYLKSVFNKVSVQKGSTTAEFRKIYGIQPKDEVKNRDKHSHHAIDAAVLTLIPSSAKREEILQESYEHYEKWKLGKLTQKADKQYHIKPYPNFNMSHLTQIENNLLINNITKDNALVPAKKIARKRGKIIYQRDKNGKIIFDENGNKKIKILTGDSIRGELHKDTFLGAIKKLVRDENDNPRIGDDGKFIVENNLSFVVRKPLIYKKDANSPGFNSLKEIKNSIVDPHLFKMIEKQVGKKSLKDALSEEIWMINSQGEKVNRIRHIRVFVREKEPLTIKEQTYLSKKYEYKHYYYAANATSYLYALYEDENGNRGFRSLNLFQASELRRELDIKRDEDFFEPTVCVGRTKKEVPLAIILKPGLKTIFYQNQKDELLELRNSELSNRMYFIKNLFDAQTGRIQFQHHLDSRSDKKLSEAFPKEKYGQRGKNGFSEINFEKPWPRLLLSPINFNFIIEGRDFEIQPDGEINLFKHLAD

SEQ ID NO: 3690 - protein, 1481 aa, unidentified
  REGION 1..1481: note = Description of Unknown: Cas Enzyme sequence
MKTILGLDLGTNSIGWALIAKSENEKDGKILGIGSRIIPMSQDILGDFSKGNSISQTAERTGYRGVRRLRERHLLRRERLHRVLNVLGFLPNHYANLIDFEKRLGQFKAETEPKLAYQEIGNEEKQKNKYDFIFKESFKEMLNDFREHQPKLLENDRKIPYDWTIYFLRKKALTQKIEKEELAWILLNFNQKRGYYQLRGEEEEENPNKLVEFYSLKVIDVQADEPQKGKEDIWYSLVLESGLVYRRSSKTPLFDWKDKVKDFIITTDLNDDGTIKIDKDGKEKRHFRAPSEDDWTLIKKKTETEIDSSGKTVGTFIYDTLLQNPKQKINGKLVRTIERKFYKDELKQILQKQQEFHSELQSEDLFNNSIRELYKYNEAHQFLLSKRDFVHLFLDDIIFYQRPLKSQKASISNCSFEYKKYNVNGEEKTIYLKSIPKSHPLYQEFRLWQWIYNLRIYKKDDDYDVTNDFLKNNEDYEDLFEYLNNRKEVDQKALLKHFKLKDKTHRWNFVEDKKYPCNETRTLIKTRLEKVENLPDNFLTEETEKQLWHIIYSVTDKIEYEKALKTFAKKHRLEANSFVENFKKFPPFKSEFGSYSAKALKKLLPLMRIGKYWNDIEVTTEVKDRVNSILERLQAINFNEKEIENVADDDVQKQVLKSFLKQKDFTKGLQLYQASYLVYGRHSEAAIAGKWYSVSDLEEYLKEFKQHSLRNPIVEQIITETLRVVKDIWQQYGKGDKDFFEEIHIELGREMKNTAEDRKKITNQVIENENTNLRIKALLLELKNDSSIENIRPYSPIQQEILKIFEDGILSSDIEIPDDIVKISKTAQPSSSELQRYKLWLEQKYRSPYTGQMIPLNKLFTADYEIEHIIPQSRYFDDSFNNKVICEAAANKLKDNQTGLEFIKNHHREIVQTGLGKSVKIFEVKDFEDFVKSHYAKNRSKRNKLLMEDIPEKMIERQINDTRYISKFISAVLSNIVRSDHNDDGINSKNIIPGNGKITNILKQDWGLNDVWNDLILPRFKRMNRLTNSTAFTLYNERYQKHQPTVPLELSKNFQKKRIDHRHHALDALVIACATRDHVNLLNNKYAKSDERFDLNRKLRKFEKVSYIHPKIGKRVEKEIPKDFLKPWANFTVDAKKILETIVVSFKQNLRVINKTTNKYESYKDENGNLRIGKDGKPVKDVISQISGDRWAIRKPMHKETVSGKIVLNRITVPNGKILTATRKSVDTSFNLKTIESITDTGIQKILKNYLSSKENNPELAFSAEGLEDMNKNIEKYNNGKPHQPIYKARLFELGSKFQLGQTGNKKAKYVEAAKGTNLFFAIYQDEDGKRSFETIPLNIVIERQKQGLHSIPEINEKGDKLLFHLSPNDLVYVPSEEDIENPISIDFSNLSTEQLKRVYKFTDGSGTTMNFIPANIASLLFDLSKKEQEKIGVNLLIQNELGVGSPQSKNQNSLEGIQIKSVCWKLKVDRLGNINSVIGK

SEQ ID NO: 3691 - protein, 1518 aa, unidentified
  REGION 1..1518: note = Description of Unknown: Cas Enzyme sequence
MTKKILGLDLGTNSIGWALISQDVENKTGEIIKLGTRIIPMSEDILGKFDSGITESSAAKRTELRGIRRLRERHLLRRERLHRVLNILDFLPEHYKNEIDFEKRLGQFKKEKEPKIAYRLNQETRKFEFIYKKAFLEMLEDFKEKQPEILSEGKLIPYDWTIYYLRKKALTHKIEKEELAWLLLNFNQKRGYYQLRGEDEEENNTDKQVEFYALQVIDVIDTKEVNARKQTLYKIVLENGWDFIKPSFTPVLWKGKVKEFVVTTTTDKTGKEKRTFRAPEENDWTLVKKRTEYSIENSGKTVGEYIYDALLKNPKQKIKGGLVRVVERKYYKSELIKILSTQQAFHEELKSKSLYKKALNELYQYNEEHKKSIASKDFVYLLLNDIIFYQRPLKSKKSLISECKFEARSFTKDGITQIKPLKCIPKSHPLFQEFRLWQWLQNLRIYELSTDRDLTYEILKFEEDWTNLFDWLNDRKEIDQKALFNHLLKPLKLKPANYRWNYVYDAIKNESKSYPCNETRAIILNKIGKIDALDKSFLTKQREEELWHIFYSVNDKDEITKALKSFANKHNLPDSFVNEFKKHPPYENQYGAYSAKAIKKLLPLMRLGKYWSASNIHPQTLDRIEKIISGEFDKNIKERVRVKALHLNKIEDFRGLPLWLTSYIVYDIHSEEGEIKHWRTIQNLENYLVEFKQHSLRNPIVEQVVTETLRVVRDIWQHFGKGTENFFDEIHIELGREMKNPSDKRKAITEQAASNENTNLRIKALLAEMLNDNNIENVRPYSPSQQEILKIYEDGALNASTEIPDDILKISKTAQPSKNDLVKYKLWLEQKYRSPYTGEIIPLNKLFTTAYEIEHIIPQSRFFDDSFSNKVICESEVNKLKGNQLGMEFISNHKGERVTINFGKTVEILSKEAYEDLVRKQYAKSRSKLKKLLLEDIPEEFAQRQMNDTRYISKLIKNLLSNIVRKEDKDDGTTSINLLSSNGQITSILKQDWGLNDVWNEIIAPRFERLNQLYGTRDFGDINLSTNKFLPTVPLEYSKGFSKKRIDHRHHALDALIIACATRNHINYLNNQNALDKTKTKEQKQRAREDLRAILCYKKFNDGREKNYKWLFNKPWKSFTEQAKDQLSTTVISFKQNLRVINKTVNKYERWGTEDGIKKKIIATQNKGDNWAIRKSIHKDTIYGLVKLKLKKVIALSSALNNVEDIVDSTLREKIKSLQSQGYDKKKLIKYFKDNQNLFEERDISKVEVFYWNTENVATRVKLDETFNKAKIECITDTAIQKILLKHLANGKYHLLKDEKGNIISPEVVAFSPDGIDEMNQNIKDSNDGHFHQPIYKVRIYEPKGNKFTIGQTGNKKNKYAETAKGTNLFFAIYRDNTGKRSYATIPFNEVLESQIQSAISKIKPQSVPHKNEIGDALAFELSPNDLIYIPNEEANAIKATLDLHNISEEQYSRIYKVVSFTGNRLYAIPFSVAKTIVDKKEFSQLNKLEFSLDGISIKEFCVKLNVDRIGNLKAIYS

SEQ ID NO: 3692 - protein, 1462 aa, unidentified
  REGION 1..1462: note = Description of Unknown: Cas Enzyme sequence
MERIIGIDLGTNSIGWAIREVDNELENQIVDKGVLTFDKGVAEDKSGEHPMVQKRTEARGKRRNYQAEKYRKWELLECLIKSEMCPLTLDELNEWRHYRKGVGRKYPQRKEFIDWLRFDFNGDGKPDFEQYGLSKHDNCYAFRWLAVSNSDEHKKYFKENKQLLGRIFYQLVQRRGFFNSGDAEETKLIEEGRKNGLTKTIEVVGIKVIDQLIKEKYKTLGAALYWGQKNNELEAVNHNRIRNRFTYREYFKNEIDAIFENLAFDLQSEFCQTIKNAITWQRPLRSQKGLVGYCTLDRPLKSKSGVYYKSGKKRIPLSHPLYEEFRTWVDINNLKIEPPKGIDKIVFLEDVVLPMFNKATDFYYSDKIDKKGVKTKGLKTKIEEAGGTILSKFDMELDEENEGKKYKANVLLNKIEKIIGDDWKEVLKWDETLTGKEKTGNYLRVEDIWHLIFDAAITKQQTTDLGNRLITILQKHLPNIVFDAKDFDRIIPNNGYASLSAATIKTILPYLKQGMLYSHAVFVANLESIFGNKLDAVTLEIVRNEYADILTKHKAEKEVYGIVNGLISDRMNERDRMNMGGNYDLDDLDLKDIDDKIKDNFKTKIWNKKTTDQKQEFINDVSFLYQNYLRQPMGLDKGKQFLKLYRIEEKIIDLLKTKYNISGERINKYLWHPSEQEVYSPANIKADKDGVVYTDERGNEILFLGDPNPISRGFKNPMAMKTLQYLKKLLNYLLQENKIDAHTKIIVEIARELNDTNTRKAIKRYQSDRAILRDGYKKSVTEYFNQAGDTNKIISPEMVDRYELWEEQNKRCMYCNHPIECTEVMNGTAQIEHTIPEGQSQCSELFNLTIAHPVCNATKAKRFPTQWKDNYELIQQNIKFMYSKYMGFKEKHEATYAGAKKAATKEAKDKHVQDRHYYRMHLTYWKKKYETFTIEEVTNQFRRQQLTDTQIVTKYALPYLKTVFKKVEPQKGIITADFRKIYKIQERFEGKERTKHSHHAIDAAVLTLIPPASIRDFIRKEYYAAKEKNLPYHNKPKNWDNFQQQYILDIEDEVLNNYQAQHRTLTTTAKYQRARGNKIPLIVNKKTIYQTDNKGNILYKKDEKGQSIFKRNHLGELLNDEQGNYIPIALKEFKKAQGDTIRGQLHADSFYAAIKQPEYEFKNDKFIPLNDGNGNFIFQQNEKRGDDIFISKKIPITDINAYDDLAIIIDPNLRHYLQKMLANKNFAKEILQPIWAFGKKEDRNGNPINPLRHIRCKVKGGGGGFVANPAAIRLRKDFLSNKPYKNQYYAQNGETVVCALYQVVIEDKIVREMKTYSILDISSNQGIKNINEAVPVNFEKTIKKATHFIPLLAALQSGQRVFFYQNEIEELKVMDENNLGRRLYFIVKFEDGKISFKHHINSMKEDDVTKEMKRLNLPASGASALNFNIPIPKLRLSQGSLNMAIEHKHFDIKPDGQVIWKF

SEQ ID NO: 3693 - protein, 1563 aa, unidentified
  REGION 1..1563: note = Description of Unknown: Cas Enzyme sequence
MEKTNKKILGLDLGTNSIGWALIQQNLESEQGRILGTGSRIIPMSQDILGDFGKGNSVSQTAERTGFRGTRRLRERHLLRRERLHRVLNVLKFLPEHYSAEIDFEKKMGKFRNETEPKLAFKKVWNEEKGQNEHEFIFKRSFLEMLADFNKHQPEMLVNEKGGKRLVPYDWTIYYLRKKALTQKIEKEELAWILLNFNQKRGYYQLRGEEQEENPNKLVEFHSLKVIDVQPDDAQKGKSDIWYFLVLENGWVYRRSSKTPLFDWKNKVRDFIVTTDLNNDGSIKTDKEGNEKRAFRAPADDDWTLLKKKTEQQIEKSDKTVATYIYDTLLRNPKQKIKGKLVRTIERKFYKEELKQILKKQMEFHEELQSQELYQESIRELYRNNGFHQELLGQKDFVYFFLDDIIFYQRALLSKKSSIRSCTLEYRRYRDGHGIEQTQSLKAAPKSNPYYQEFRLWQWMYNLSIYRKEDDTNVNREFLNTSQDWEMLFDFLNSRKEIEQKPLIKFLLEKKGFKGSILSSEVEKYRWNFVEDKKYPCNETRALIATRIDRVANVPDNFLTREKELQLWHIIYSVTDKVDYEKALKSFAEKNKLDIISFIEAFKKVPPFKSDYGSYSEKAIKKLLPLMRLGKYWNWNTIDIHSRTRIEKILSGEYDETIKNRVREKALHLTQEDHFQGLQLWLAQYIVYGRHSEAFLAGKWNSVNDLEEYLQEFKQHSLRNPIVEQVVIETLRVVKDIWTKYGKGAKDFFDEIHIELGREMKKTREERENDSKRMSANEDTNLRIKALLAEMVYDSAVENVRPYSPVQQEILKVYEEGVLNSNIEVDVDILKISKTAQPSSSDLKRYKLWLEQKYRSPYTGEIIPLNKLFTPEYEIEHIIPQSLYFDDGFGNKVICEAAVNKLKDNHIGLAFIKKFHGQIVECGFGKKVKIFEVSNYEEFVKHNYAKNRTKRIKLLMEDLPEKMIERQINDTRYISRFISSILSNIVRAETNDDGINSKNVVPGNGKITGVLKQDWGLNDVWNELILPRFRRMNELTGSSNFTSWNENYQKFLPTVPLEVSKGFSKKRIDHRHHALDALIIACTSRDHINFMNNGHALRKERSKEERQKLRYDLRTKLCHKKYNEGSNNNYSWVFNEPWETFTADAKKSLENIVISFKQNLRVINVATNRYQKWVYKNGVAVKELQEQNTTNWAIRKAMHKDTVSGLVQLRRKKAVSLNIALDNVDDVVNRTLKRELQSLQKRGLDKKKISKHFKDCNNKWNGEDISKVEIYYWEKDNAASRVALNDTFDENRIATITDTGIQKILLNHLNSHKGRLDAKGKEIPASILAFSAEGIEEMNKNIVALNEGRAHQPILKVRTYEPKGNKFSVGQTGNKKVKYVEAAKGTNLFFAVYEREDGKRIYETIPLNEVIEHQKWRASLPVNEQHKTAFLPLSAENGKFLFSLSPNDLVYVPTEDEKLAANEVPFDRLNPNQVKNIYKVVSFTGSQIFFVGHNIATSIVNKFEFSPLNKMERSIEGAMIKECCVKINVDRLGQILPVASKSVANEYKLADIDIDITKKMIEE

SEQ ID NO: 3694 - protein, 939 aa, unidentified
  REGION 1..939: note = Description of Unknown: Cas Enzyme sequence
IEGSIISQIDGIISTNRKQKLIYGIANALIADYKSRDFTDQFAYKNYSYELKNNDYNDIRKKAVAVIGSKTWTSKDEVEQEEIIAQVAKLYQVFFASTKRDYFIVPKLADALSTFLNNTFKCISEKDLRKIYHPSMIEFYSPADYTQIEDGRSLKLLGSPVIGALKNPMAMRVLHTLRKQVNSLLKTIDENGNALIDEETRVVVETAQELNDANMRWAIEVYQREREAENKEYEKIIKEYFPNRDINDDDIEQVRLTCEQHDIPENGIPNKQSKTKENKNAPIFKKDVTKYRLWLEQGCRCLYTGNIINIKNLFDDNAYDIEHTIPRSQSFDDSLANLTVCEAHFNRSVKKNQLPTQLANYQDIRLRLQPWFDKVEKLKDNVDFWKSQSKRAQTKDRKDQCIRQRHLWQMELDYWQNKVNRFTMTEVTNGFRNNQLNDTRIITKYAYHYLKTVFNKVEVQKGSITANFRKMLGIQSLDVKKNRDKHSHHAIDATVLTLIPTTTKRDKMLELFYQAQEEKLPKEGITKYVIDLEKEKKSCGLSGNVSNIVPYIESNILVNHISKDQTLTPAHKRKRIRGKIVPNRDLNGRILFEKNEDGTFKYDNYGHKIPQAKEWITGDSIRCKLHKESYLGAINYPLTDDTGFPMRDNGKFVYKKDKNGANVISMVENTPLDSFKKEDDFNRIIDPYVRQSITETIRKRMADGMSFKNALNEPIWLTDKSGNNIKKDRNGHTISPIRHIRCRVPSGRGIFTKDKALEIKKQSYQSRHDYKNYCYAQNDGNYICLLYEGVKQGKFERQFMFLNYLEFVKLGIKNTDQLKQESYFQKIEEKRVTLYLSAIIKNGTRVLMWKKSPEELSLLSSTELSKRLYVVYKFNLKGANCIYLRNHIEARNEIPQNEDFTTFDDQKYQALLTMVANGFNCQIEGRDFIIDNLGNIIFL

SEQ ID NO: 3695 - protein, 1413 aa, unidentified
  REGION 1..1413: note = Description of Unknown: Cas Enzyme sequence
MKKILGLDLGTNSIGWAVVDLDENGNPISIEGMGSRIIPMGSDIIDYEKGATITKNAERRSKRSARRMGKRYKMRRNKLLFILDKLGMLPEQFHFKNSFPEATKLQKLELLPIRKKTLQLDSLQHYELREKALFQKIDLKELGSILYQYNRLRGYAGGGDDDNENKEIRKEEEQDEAKKYETRIQRFFIKSVVKSDSTFTVKTGKNKGSVLPMFDIVVLNDEQVIEGTTVLQNLSEKVNSEIELEIRIKRTKKGENITFALPQKTSWRKQMEETELTLKEKNIFPCQLFVEDLRKNKWTKIRNRVILRQQYQKEFDAVWEEQSKHYPFLKTCPKATLQEILNYIFPGQSEAQKQLREIGLKNGLKYIIKEQVIYYQRPLKPQTDLIGKCQFEKDEKVIPTSHPLFQEFRCWDQINRLFITSKQNVWNERKQKNVLQYTNRYLTYEQKITIYRKLQLQKQVGFNDVAKILNLKNDNSEFLNGLNVNSKLKGCDTSISIRKCLEGLQTDESLIENIWQAVYDNAHEGSEYDENSKRVQSIVSVLPFDNDICIDLALKIARSLKFPRKYASLSKKAIDNILPLMQLNPQNISEEIKERFNNIQRLIETGEIVDETLPQDYIIDFVKNNPNALEHGGLMYSFAASLVYGRHTKEKIQPQIKDYHDIVFLHRNLRNPLVEQISNETMQIAKAVWKQFKLNPDELEIRVELARDLKNSAQEREKIYKAQTRNKKTNDRIKEKLTELNIAITDLNILKYKLYEQQLFISPYTNEPIEISKLFDEKFYNIDHIIPKSRYFDDSVNNKIICESNINEEKDNRTAWEYIMQQNSKYNKAKDGYEILTPNQYLTHINKNYTGQKKKNLLAEKIPSNPVNRQLKDTQYISVAIKDELAKIVGSENVKTSTGGVTDYLRSHWGLKKLFMELTEPRFKQMESWNLDENGNPKESWIKKYFDKENNKHVYEIKGWSKRYDHRHHAIDALVVALSNEKFIKRLNDLNQYFQDELAKYKDSIPQSDEETLEEAFFRLTKEKRNKIMTEIESSRKFNAPMSNLVPEVKKNLEVMIVSQKPKDKLAIKEIGGKKQLKIRAALHQETYYGKTNNRDTKTVDISELKIKDISQIIDSVLKKEIESHRENYDTMKEAFSGEGLIAFNESRFQTKNKAKLKPPVYKVKIWYSKKESEDSVLQRLYENNPNKSVITGDNYMFVVMEKKNGERIFDIATLFDSVALAKADIRNGIYDLDSIKRNICEAKRVEFKKGKNASQADKVLFYLQQNDLVYMPSSAEDEVLGFNGEELREWLLDVNNKKAFAKRIYKVVKFTGKDCYFIPNNYAKEISVPKNFSEKEMKELRNKYPDKKIPKQELNYAEFSSYGNCVKFVPDINFVKNIQDKTNPRSMKIQDFCVKIKTDWLGNIIEFNGIKL

SEQ ID NO: 3696 - protein, 1429 aa, unidentified
  REGION 1..1429: note = Description of Unknown: Cas Enzyme sequence
MKKILGLDLGTNSIGWALVDKEERQILGMGSRIIPMGAELSKFEQGQAQTKNANRRRDRGMRKQNKRYKQRRNKLIYILQKLNMLPDQVKLADEFNDPLKIDKVSILPIEKKQSQYSAFDLINLRVKALNEKISLKDFGRIIYLFNQLRGYSGGGIEPDEKDSDSDEDNDSKKRRENYIVFAKIIELSEPEIVSFKNKQVAKRKVTIETEDGILQGETFIEILRVNESLEIQVNISKSKKGESIFFKLPNKTSWRKKMENLEQELVNISKEKGREIYLSEYFLEILKENRWVKIRNNVILRSRYQAEFDAIWSEQSKHYTFLINSDHDRLSEILNFIFPGTKDSQLKYKKEGLENGLYHVIRNQVIYYQRELKDQSHLISDCRYEKGEKAIAKSHPVFQEFKIWEQINKLTINTKIENGRNKKGEIKYTYKDQVIPSKLKEWLYDELQNKKEIGFGTILSKLKREYKLRENIDFLNGINANAKLRGNETKLLLKSSLGIDLWQQLNLDKIENQIELWTILYDLKGNEYDLYSERTSAVLLYLKKHAPNIPNIEQTAIQISKIKFARSYAALSLKAIEKILPLVRCGKYFNHKLSDSLNEKIIRILNETVDSPFEKAAQEYLEQNVELLIDGGIMNVYATILVYDNHTSREFNETELVMNYSDIKRLKQGELRNPLVEQVINETLMIIKDIWKQYGYKPSEIRVELARELKNNAERRAKIYKSNRENQNANDEVKKMLIEIKQDTTLANIEKYKLWRSQENLTEEYLKRYRDPSRSETEKMKLWKEQGHISPYTGQPIPLAELFDRERYDVDHIIPQSRYFDDSFANKVICEKSVNKEKGNKTAMEYFEAGSLIPSVLTKNQYIEHVNNQYVGLKRKNLLSTKVPEDPIARQIKETQYISIRVKEELNKIVGNDNVKTTTGGVTDYLRNQWGLTDKFKKLLKDRYEKIVPIIAELEYEKYVADVTKKDKGVIKNENEFSLAEIAKDQFIQNFKEGFIQKKNNKLIIKGWSKRIDNRHHAIDALVIACTEPAYIKRLNDLNKELQTWLDKNRKDLLPDFEGSPSELLDEVLSLDEQKRELIFKQIEKFRSIEMPWIGFDEDAESEIKKVIVSQKSKDKLLIQPANDKDRKLQLKIRGQLHESTLYGKSQGIEAYRIPLNKLAGKNFATDKVIDKICNKYLKKVISEHLKELQSKEDAFSAEGIMILNKKLEEKTDANGRSAPHKPISSIKIFYRDPAKQKKIKGSDEIEDALQKLDRVKSYNESLFVKTGDNYLFAILDKQGKRCFDLISFFDATNLLKDEFNDSENKHKFNKDIVFKKYFETQNAAKLLFTLKQGDAVYMPGDSEEVILDPASPLFEDYWDNRTLRGNNIHYVTKYSGKQIYFIKHNIANPIVNGKEFGSQNAYEKIGTRSIKDFCIKLSIDRLGNIRPA

SEQ ID NO: 3697 - protein, 1506 aa, unidentified
  REGION 1..1506: note = Description of Unknown: Cas Enzyme sequence
WAVINSQTNDDGSETLLGIDSCGSRIIPMDAAILGDFDKGNSKSQTAERRGYRSVRRIRERELLRRERLNRVLDILGYLPEHYSKALDRYGKFSSSEEECKLAWRKDESGKYAFLFQSSFEEMIADFAKSQPSLVANGKKVPYDWTIYYLRKKALTQKIEREELAWILLNFNQKRGYYQLRGMDEDEEESDKKPKTRQYFDRQTITRVTDSGALYKGLKILIVELADGSKGKVFRRDIPDWIGQEKDIIVTIDLDREGNDKYEDDGSLSCRYNIPTDAEWDTKWALVKAKTQQDLDKQGKTVGAYIYDTLLQRPSQKITGKLVRVIERQYYKDELIQILKSQIRFHSELRDNEMYAKCVEALYASNEAYRNSIASRDFVYLFVDNIIFYQRPLKSKKSLIDNCPYEENRYIDKDGAEHKVPLKCIAKSHPLFQEFRLWQFLSNLRIYQKERRNSALNRIETDVDVTQDLLPNQQSYAALFEWLNEKKEIGMDALLKYPPFGLKKDTSNYRWNYVDDSSKKYPCNETKAQIMSFLSKAGVPESFIKEDGVEESLWHILYSVEDKQELTKALKSFADKHSLSEEFVSMFKKFPAFKKEYGAYSAKAIKKLLSVMRMGSYWNEHDIPADLLSRINKIIDGEVDDNIDIRTRERVSGLKSISDFSALPVWLACYVVYGRHSEAKDIQHWKNPDELDSYIKSFKQNSLRNPIVEQVITESLRTVRDIWKQVGSIDEIHVELGREMKNPADKRKKMTQQILENEYTNLRIKALLVEFLNPEFDIENVRPYSPGQQDILRIYEDGALNGASEVPEDIKEIISKFNQADIKKRPTHSEVMKYKLWLEQKYRSPYTGAPISLSKLFTSAYEIEHVIPQSRYFDDSLSNKVICESEVNKLKDNNLGYEFIKKHHGEIVTLSGGKTVKIFNEAEYETFVSENYSRNATKKNKLLLEDIPEKFIERQMNDSRYISKVVKGLLSNIVREDDEPEATSKNLIVCTGGVTDRLKKDWGINDVWNEIILPRFKRLNEMEGSTRFTAVNGNGKLVPAMPLELQRGFNKKRIDHRHHAMDAIVIACAGRNIVNYLNNVSASKNATTSRHDLQAILCTKTKTDDNGNYRWLMNKPWDSFTQDVKFALNHIVVSFKQNLRVINKTTNVYQHFDGNGHKVSEKQTKGDSWAIRKPMHKETVFGEVNLKRTKAVQLSVAIKKPERIVDKILRERIMKLLRSKFNAPRIKAYFEERKGEWGETNLAKIEVYYFTKETNDRFFAVRKSIDTTFDEKKINESITDTGIQKIMLNHLKANDGKADIAFSPDGIEEMNRNIVSLNDGVAHKPIYKVRVYEQANKFAVGETGNKRSKFVEGAKGTNLFYAIYENKSTDSETGQIVTKRSYATIPLNIVIERQKLGLPSAPENEEGLAPRYVLSPNDLVYLPTAEEIECGHISLPINTDRIYKMVSSTVGRSFYIKYEVASSIVDKYEYTSMNKMERAITGEMIKETCIPISIDRLGNIKINDKL

SEQ ID NO: 3698 - protein, 1224 aa, unidentified
  REGION 1..1224: note = Description of Unknown: Cas Enzyme sequence
MKRILGLDLGSASIGWALIEETQKQTTIVGLGSRIIPYEGTEGKDFAKGTGESRNSLRTKARTARKGYDRYQLRRRYLVDALVKATMFPDEILKNLPKIELWALRDKAVYSQITLKELGRLLLWLNQKRGYKSSRSDANLGKKDTEYVATVKSRHEKIKELNLTIGQYFYQNLSNDPFFKVKENIFPREAYVEEFDAICNTQKQFYSETLTEEFISTLRDEIIYYQRPLKSQKGLVSVCEFEGFWRTGKDGKEYFVGPKVAPKSSPIFQLSKMWENINNIKVGSRSAGDIEITAEQKQAIFLHLDNNEKLTVTDLLKILQLDRKNCYVNKQLEKGLVGNITKQAIRQCFGDSSQYNHLLRLNLKVVKTDKQGYLIDKKTGEIVNEKTNQYIDANIEYEPLYQLWHTIYSIQDKQECSNALQAKFGIESTIADKLADIDFCKHAFGNKSAKAIRKTLPYLMEGDKYSEAMSYAGYEHSDSLTKDENLKRKLLDSLKPIEKNSLRQPIIEKILNQMVNVVNAIIEKYGKPDEIRVELARELKQGKEERNETDKAMSKRQRENENIAKRLAEYGLKATRNNILKWRLYEEIDNEEKKLNAVCIYCGKPISLTEAIKGNDVDIEHIIPKSKLFDDSQSNKTLAHRHCNKNKNDMTAYDFMKSKPTEVFEAYIERVNSLYANYVINKTKRDKLLMSEDKIPDNFIDRQLRESQYIARKSREILQTICYNVWATSGTVTAELRHLWGWDEITMNLQFEKYKQLGLTEMVEWESDHGKNKHQKEVISGWTKRDDHRHHAIDALTIACTKQGYIQRFNTLNAEKTREDMWGVIEKCSIPFKEKRSLLEKYIISEQSIAVEEVQEAVANILISFKSGKKVAVVGTRKDGKRGNKKVVQTGIIIPRGSLHEEGVYGSIKQYSKNTKTNQVDFQKHIVKKYKLGVGTQGFLFTGKETYETKEKVNKKTGEISIVTIDKIQNVLDSIVDNGIRKAILKRLNVGFPAESDYKVNPKKALENLKDLENNPICLGKNSKSPIKSVRRFTGLSAVVPVKKDEAGKDIGFVKPGNNHHIAIYTDNDGNKYEHVCTFWHAVERKKYGIPVIIKDASEVWDKIQMQPDGTYPESFLEKLPDVQWKLELSMQQNEMFVLGMTSEDIQMAIETNDYKIISDKLYRVQKLAEKNYMFRHHLETQIIDDANSKTSKRFINIQSLGALFSLNPYKLKIDRLGNISNSK

SEQ ID NO: 3699 - protein, 1533 aa, unidentified
  REGION 1..1533: note = Description of Unknown: Cas Enzyme sequence
MNNSRTILGLDLGTNSIGWALVNIDDKRIEGLGSRIIPMSQDILGKFDSGNSISQTAERTGFRGTRRLRERHILRRERLHRVLHIMGFLPKHYEQYIDFENRLGKFLTDAEPKLAWREIENKKFDFIFKNSFNEMVQEFKTCQPQLFVNNNQIPYDWTIYYLRKKALQHKIEKEELAWLLLNFNQKRGYYQLRGEDEEKTDTREYCALLKIVAVEKGEKDKKNDKKTWYRLTFENAWEYSATFTSEPNWLNTEKEFLITEELDEDGNIKIVKDKKSDTTGKEKRRITPLPSFDEINLMSKEDQNKIYKKIKARTEITIKNSASTVGTYIYDTLLQNPKQKINGKLVRTIERNFYKAELKAILEKQKEFHPELNDGVILAACIQELYPNNEVHQNSLLSSDFTKLLVDDIIFYQRPLKSKKSLISNCKYEYRTYKDADGVIQKEPIKCVPKSHPLYQELRLWKLVNDLKIYEREKTIDGKLYTDYNVTNEFIKSEDELVNLFDWLNERKEIKQDTLLSSFFKIKKKRGEEKLAFRWNYVEDKEYPCNETHAQILSRLSKLKDIPANFLTTSKELELWHILYSVTDKLEIEKALKTFASKNDLPMEFVDVFKNFPPFKSEYGSYSEKALKKLLPLMRMGKYWNFESINDKTKIRIDKIITGEVDETIQTQVREKVIHLTQIDDFRGLPEWLASSVVYGRLSETKWKTYHDLENYLEEFKQHSLRNPIVEQVITETLRVVRDIWKKYGDISEIHVELGREMKNPADKRAEITKRVSENENTNLRIKALLAELANDKEVENVRPYSLNQQEILKIYEDGILKSGIELPDDISKISKLSQPTKSELIRYKLWLEQKYRSPYTGEMIPLGKLFTSAFQIEHIIPQSRFFDDSLSNKVICESVVNGNPYKDNQLAYEFIFKNEGRIVPELSTAYKTVKIFTLSEYETFVKEHYANNQTKKKKLLMEDIPEAFIERQLNDTRYISKVVKGILSNIVREEGEEEPTSKNVISTSGNITDTLKKDWGLNDVWNRIITPRFQRMNELTKSNLFGQWENKDGKQVFQTQVPLELQKGFNKKRIDHRHHAMDALVIACATRSHVNYLNNENARKKDEPTRYELRNKLRRIEEIEVDKIVDGIKIRKKIEVAKEFLKPWDTFTVDAQSALENIVVSFKQNLRVINKSVNYYQHIVDGEKVIDKQVKGDNWAIRKPLHKDTVAGQVNLRFKKQVTLSAAIDQWEMLVDKSLKTKIKQLINEGLDKKKVQKFFADNKNKWQGKDISKPELYYFSNDKDILVASRTALNDSFNSKTIDSITDTGIQKILRNHLAKYHEEKNGETIDHPELAFSVEGIEGMNRNIHELNNGKPHQPITRVRTYEPKGNKFNVGENGNKKHKFVEAAKGTNLFFAIYMGENGSRNYETIPLNIVIERLKQGLSEVPETNAKGDRLLDYLSPNDLVYVPTEEEKVTSSLIDFKNINKEQKQRIYKMVSSSGVQAFFIKSEVATSIVNKIEYSPLNKMEKTIDGVMIKGSFIKLKIDRLGNISL

SEQ ID NO: 3700 - protein, 1529 aa, unidentified
  REGION 1..1529: note = Description of Unknown: Cas Enzyme sequence
MTKILGLDLGTNSIGWALIDSKEKSIVDLDSRIIPMSQAILGKFDSGVTESQTAKRTEFRGTRRLLERHILRRERLHRVLHVMGFLPEHFDKSIDFENRLGKYINESEPKLAWKEIEPNCFEFVFKTSFNEMIKDFKISKPDLFELNNKGEERKIPYDWTIYYLRKKALQAKIEKEELAWLLLNFNQKRGYYQLRGEEDEETPNKLVEYHTLKVKEVTADDLQKGKTDRWYSVILENGWIYRRSSKTPLFDWKDNIKEFIVTTELNDDGTVKVDKEGIEKRSFRAPSDEDWTLVKKKTESVIDDSNKTVGCYIYDTLLQNPAQKINGKLVRTIERKYYKQELKAILEKQKEFHVELQNMELYKTCLEELYKNNESHRKSIATKDFTHLLLNDIIFYQRPLKSKKSLISNCKYEFRSFKDETTGEIIKEQIKCVAKSHPLYQELRLWKFVKDLRIIEREKLVDGKLKTDIDVTVEFLKSEDDYVALFDWLNDRNIIKQDTLLSSYFKIKKKKGNDKLSFRWNYVEDKEYPCNETRSQILSRLSKISNISVGFLDKEKELALWHLLFSVEDKLEIAKALKSFAIKYHLGDDFVEVFRKIPPFKKEYGAYSAKAINKLLPLMRMGKYWEEKSIDQKTKQRIDKILTGEYDERMRNRVREKSINLTELEHFKGLPEWLACYIVYDRHSEAGDVEKWKTPQDLNDFIREFKQNSLRNPIVEQVITETLRTVRDIWKKYGEFSEIHVELGREMKNPADKRKSMTEKISENENTNLRIKALLAELVNHNDVENVRPYSPNQQEILKIYEEGVINSGIDIPEDIAKIVKTSQPSKSDLTRYKLWLEQKYRSPYTGEMIPLGKLFTSAFEIEHVIPQKRYFDDSLSNKVICEAEVNNEKGQALGYEFIKNNEGRIIELSYGKTVKLFSITQYEEFVKQHYSKSRGKMKKLLMEDIPDLFIDRQLNDSRYISKVVMSLLSNIVREDGELETISKNVIPCTGLITDTLKQNWGLNDVWNRIVTPRFERMNELTKSNDFGHWTNKEGKRVFQTEMPLVLQKGFNKKRIDHRHHAMDALVIACATRSHVNYLNNESAKSSAKESRFDLRNTLCQKKYDDNKNYKWEIIKPWNTFTQDAQAALENIVVSFKQNLRVINKTVNKYQCYKDGKKRIETQVKGDSWAIRKPLHKETYYGIVNLRLKKSVRLSSCLDQWGNLVDKNLKTKIKQLINEGFDKKKIQKYFTNLENKWMGKDITNVEVYYFSNEDEVLVASREKLDDTFNTKKIESITDTGIKQILLNHLEQSKFQDQKDVNGKTIAPEILAFSAEGIEEMNQNITILNKGKFHQPIYKVRTYSRKGNKFNVGNKGNKNDKFVVAAPDTNLYFAIYIDGDGNRNFETIPLNIVIEHLKQRESPVLISKIDDKGNEYTLHSFLCPNDIVYLPTEEQINNWNNFIVSDIDKKRIYRFIDSSDTTANFVPASSASILFDLNKSDQAKKGVMYPIQNEFGVGSPQSKNQKALTGEMIKNFCVKLKIDRLGKISI

SEQ ID NO: 3701 - protein, 1537 aa, unidentified
  REGION 1..1537: note = Description of Unknown: Cas Enzyme sequence
MKNILGLDLGTNSIGWAVISTDEDNKPKKIEAAGSRIIPMSQDILSNFDKGNSISQTAERTGFRGTRRLRERHLLRRERLHRILHIMNFLPKHYEQYIDFEKRFGQFVSDIEPKLAWKNSESGGYEFLFQKSFNEMLADFEKTQPELLENNKKIPYDWTIYYLRTKALREKIEKEELAWVFLNFNQKRGYYQLRGEDEDKNPNKLIEYHALKVIDITEDTPQKGKTDIWYNITLENGWVYRRSSKVPLYDWVDKIKEFIVTTDLNDDGTIKKDNEGCEKRSFRAPAEDDWGLLKNRTEADIEQSGKTVGTYIYETILQKPNQKVRGKLVRTIERKFYKEELFRIIEKQKEFHIELNDKVLFTQCIEELYTYNESHRSTLQHNDFTRLFIDDIIFYQRPLKSKKSLISNCQYEYRIFKNEAGIYEKSPIKCIAKSHPAFQEFRLWQFMHNLRIYEREKDVNDKLQTDVDVTGEFLPDEDKRIELFDWLNDRKDITQDVLLSKFFKKKKAKNALSYPYRWNYVEDKEYPCNETRGLMIACLQKADIQIDFLNRDMEVALWHLLYSVEDKNEIQKALSSFAEKHSLPNSFVEVFSKFPPFKKDYGAYSLKAINKLLPLMRIGKYWNEENIDKVTISRINSINERLESIREENLNIEAVSDDDIPKQVLRSFMKTGNKFSGLNTYQACYAVYDRHSEASKTSKWNTPQDIDNYLKEFKQHSLRNPIVEQVITETLRVVRDIWKNYGYFSEIHLELGREMKNPADKRKRITAKVSENENTNLRIKALLMEFKNQGDIENVRPYSPSQQELLKIYEDGVLNSNIEIDDDILKISKSSNPTKSELIRYKLWLEQKYRSPYTGEYISLSKLFTHEYQIEHIIPQSRYFDDSLNNKVICEAVINANPYKDNQLGYEFIKNNEGRIVSELSRNGRQIKIFTLSEYEGFVKDNYGKNNNKMKNLLLEDIPDSFIERQLNDSRYISKEIKGLLSNIVREDSEQEATSKHVISCTGGVTATLKQEWGLNDIWNKIITPRFIRMNQLTNSDIFGRWVNKEGKNVFQTDMPLELQKGFNKKRIDHRHHAMDAIIIACATRSHVNYLNNESAKSTSKETRYDLKHQLCFKSKVDDKGNYKWQYYKPWDTFTQDTQVIIENIIISFKQNLRIINKSVNYHLSYRNEDGVLQLDKNNKPKKVLRKQIEGDSWAIRKPLHKDTVAGQVNLRLKKQVSLLQAIEQWETIVDKSLRTKIKQLIKEGLDKKKIQKFFANNENKWLGKDITKPDVYYFSNEKEELVASRVTLDTSFNSKKIESITDTGIQQILLRHLRKYNEEIDGKIIEHPELAFTPEAIEEMNKGISILNNGKPHQPILKVRTYEPKGNKFNVGYIGNKKHKYVEAAKGTNLFFAIYVDENDKRYYETIPLNIVIERSKNGDPEVPEKKTIIENGGIKELNLLFSLSPNDLVYVPTEEEIYSGNIGKEYRVDRIYKMVSSSGPQCFFIPHNIANPIMQTKELGANNKSEKSWDGIMIKQVCSELAINRIGKMERKHKD

SEQ ID NO: 3702 - protein, 1399 aa, unidentified
  REGION 1..1399: note = Description of Unknown: Cas Enzyme sequence
MRILGLDLGTNSIGWALIDKEEQKILGMGSRIIPMGTDKLDYEKGAGITKNADRRMARTIRKMNKRYKLRRNKLLFILNELGILPDQFQFKDGIPEPNKLQDLELLPIKKGTFQLTSLSHYQLRVNALTNEIAAKDLGKILYQFNQLRGYAGGSNNDDDNKKKKEETSDEPEKKKSYEVITQKVSIINIEKSDRTYKAKGGKNKGQELPLLSITFLLDDEEKEGTTMLQTLEKGKEEELEIRIKQTKSGENIILALPQKTNWKKQMEATEEIIKTEKLFVGELLLKDLQNNKWAKVRNRVILRSRYQQEFDAIWEEQAKYHSILNNCPKEIIEKIAWYLFPGNGKTKDSKQDELRKAAIEGGLKYIIKDQVIYYQRKLKPQTDLISNCQFEKEEKVIATSNPLFQEFRCWKQINQLYIRSKEGVYNEKKNKTIYKYSDRYLTNEQKNEIYQKLQNQKQVGFSDVAKIVGLKNDKTEYLNGLNVKAKLKGCDTAITIKKILGDDFNKIINQDKEIVLKIFNSIFDLNNSGSEYDVNSKKVSSLINILKASIAETNAITLALKLAQNITYPRKYASLSAKAINNILPLMQLNTVGITNLIKENFENIKHAIETGELKDGVKPYMVDYIDSNPNIIETGGMMDSFASSLVYGKHTTAEINATIKNYHDIKYNPNRNLRNPIVEQITNEALQVIKAIWKQYKFNPEKLEIRIELARDLKNSAAEREKIYKGQLNNQKQNNRIKERLAEEKIPITDENILKYKLYEHQKYLSPYSGDTLEISLFDEYQIDHIIPKSRLFDDSISNKVLVEGFLNAEKGNRTSWEYISQQNTKYKICSIQAFIDIVNENYFGRKKKNLLLEKIPTDFIERQIKETQYIALAVKSELAQIVGSNNVKSSTGMITDFLRSRWGLKQLFMELTKSRFEQMELWDSSNKWVTRDFDERKNKDILKIKNWSKRYDHRHHSIDALVVALTEQKDIHRLNNLNKELQDWLMAHKDEIQLEVKEDETVLEAFFNLDEKRREEIQKTIQPFRKFEPPFDDLARQAKIHLEAMVVSHKPKDNLTIQFNEKTKKKEIKIRSALHEATLYGKHNGQDTKTMSISNLTVKDIEKIIDPVLKAEINQHRKKSEYGSMKEAFSGEGLKAFNESRFQRKKPELLKPPVFKTKVYYNTKEVKESSLQRLYTDNDKLSVKTGSNYLFLVMEKKAKKDGEKERVFDIVSLYDAADFAKTEWKDQNEDFKKKIYEYYITKNNADKVLFSLQQNELVYLPENVDDPILNFTADDFTKWISQNENKAKFNKRVYKVVKFTGKDCFFIPHNYANTISIAKDLTEEQKIELKKKYEEKDIPKKEMNFVEYGSYRDSAPVAVDEHFVKGLIDKAYKTKPMKIQDYCIKIKTDWLGNISLV

SEQ ID NO: 3703 - protein, 1579 aa, unidentified
  REGION 1..1579: note = Description of Unknown: Cas Enzyme sequence
MENQTKKVLGLDIGTNSIGGALLSLPKEFDDFGNGGNIEWLGSRIIPVDGDYLQKFESGAQGLTKAANRRQKRGSRRLKHRYKLRRTRLIKVLKALGWINEDFPLDDSRNFKQGIKENGYSLKISDYLPFSTETMSEFEKEFRFAEKKSRNGKIIVTQDWIVYFLRKKALTKQITIPELVRIIYMFNQRRGFKSSRKDLNTTNVLPYGDFKERQRNGDFGEGIETQFVSITKIKSVKFKEEKKDKRNNISNVYTIEAEDPRMDPWEEVRKKEPEWVGKEFTFLVTQKFDKNGNYKSLKPQMPNESDWALCTTALSEKIQENDQYPGEFFYEQIRDAYLTKRNFKARQFPVHRWRYEKELEAIWKKQCELNTELAKVNSDKETLTKLAYLLYPFQAKHKMPKLTEFQNNDLLYIISKDIIYYQRELRSQKNSISECRYEKRKGIDGEVYGLKCIPRSSPLFQEFRIWQDIHNIRLLKKEEMVNGKTKIDTDVTSTYVDDSIKEELFELFQIKTSISEKDILELIKERKVENDIKIDNSGEESSHRINLFANRVSLKGNETLARYRNLFRKADFDGENILTDNEKLLKLWHIDYSITSSDEKKSEKGFVSALANNQNRRKKEKKVCFNLPKEVIDLFLKLPELKKEYGAYSACAIKKLLPVMRCGKYWNKNEVTETLVNRSYQIKERLNSIDNDIKRLNEEADDDVQKQVLKSFIKKEDLTKGLNTYQAGYLIYGQHSERKIIHIKTADEFSKYIQKEIPNNSLRNPIVEQVVKETMFLVRDVWKKYGEIDEIHIELGRNLKNNSVQRKKISDTQKGNFEEKRKIQKLLYELMNDGFEQYIDDDVKENATFEVYPNPESPADINKFRIWRSLSKKSDLEWIKIVREEKIPTKQEIKKYTLWISQNCRSPYTGKIIPLSKLFDKNQYEIEHIIPRAKMKNDSFNNLVISEAAINPNPYKGHMLARNFITQFGGTKGKQYEINGKKYFILSENQYESLCKDTFKYQKAKLKNLLATEVPDDFVERQLNDTRYIGRKLSELLAPVAKCDNGIIFSGGTITSELKNNWGLHNVWKEIIKPRFERFEKITSNSYIVKDKDEYGNSIFHFNVKENPDINTKRIDHRHHALDAIIIAATTREHIRYLNTLHAADTDEEIMKIKQSLVKGKIRDFKQPWFNFTKDVKDAIEGVIVSFKTNNKIVTKPQNRTSYYKLVNGKPIKEFKPQKTNPRWMAVRKSMFKEPQGVIYLKEIYDEKNVSKAVEIQINRMLHENQSKIKRTPYIYDKGARQVIKEIIEKTGIPIQDKDLLMNEINKYLKKTPLTDLLGNEKKTIQIATFEEYAAKRVVLDKTFDHKKIDKIPYAKNGKSVLGKILHEHLDSDEFRDEKGNSDPAKAFNREGLELLEKKAGRPITKVTIYEKKDESSKFGNRYVEVDAGSNTYFVMYENQRTRERTDFHSVPTHKAIEKIVMGEPIAEDKKGFDKIILSPGDLVYVPTIAQIEKKDEINWTNKKEISERIYQVRKFSKKQCYFLKSTVSDLISSYDSNSKLGEYGSQNLVEKNDDDLKIIDVCIKLKVDRLGNIEIAKV

SEQ ID NO: 3704 - protein, 1464 aa, unidentified
  REGION 1..1464: note = Description of Unknown: Cas Enzyme sequence
MKKILGLDVGTNSIGGALVTIDEFGKRGKIDWMGSRIIPLDGDSLLKFENGGQAETKAAARRLLRGSRRLKQRYKLRRSRLVTVLKLLKWIPAEFPENFEKHISEIPFNINNYIPISENTKAAAYAAFGTDKISEDWIVYYLRAKALKEEITLPELARIIYMLNQRRGFKSSRKDIVIHEEHEEEKFPKFEKWVEFVTILSINEEEKDKDKTVYRIKTDKYEALKSFRNKPDWEGKTIELEITRKTTKAGEISYSFSLPNPTEWEKQKTALNNDVAEWIQKDLCGTIGEYFFLQLKDDKNYRIRQRIVERKLYKQELELIWKVQSGFHKELSDNSVLNEIATALYKINKAKQKEITSNDLFNVIANDIIYYQRPLKSQKDSIDECTLEKKKYIKDGIEYIVGIKVAPKSSPEFQEFRIWQDIHNIRVFEKEGVLDNKQQINIDITESFITNDIKASLFELFNSSGEITENAILKKIDAQLSPKTHKINLFANREKLKGNETKAVFRKVFKKHHFEEGNDLLENSELFYKMWHALYSLNEEEHIYSAFKNLKDSAKNKINIPELVVAHLSKLPELSAQYAAYSSKAIKKLLPLMRCGKYWNPDDINNQTKERIEKIVNGEYDEDIDDRSRQLIQSFSEKNDNPVSGMPLWLSTYAVYGKHSERTNDEKYTTASQIDVSKLIPHNSLRNPYVEQVIREALNLVKDVFETYGQPDEIHIELARELKKTAEEKEKIAKANQNSNTEKDRIKKLLRELKKGNPESLSDLDKFKVWKNIGGYESEQKFDELFNKKNDFINQSDIEKYRIWADQNCLSPYTGKAIPLSLLFTPAYEIEHIFPRSRFFDDSFANKIICEAGVNKEKDKTIARLFIQQYSGTTFNKDGKTFTVFTEENYISHCKSIFRGKKLRNLLAESIPEDFVSRQLNDTRYISKKLADLLYPITKDKEGIIFAGGSITNELKNKWGLNKVWKEILLPRFERLEKVTNQSLIIPDASDANKFHFSKEYKRVDHRHHALDALIIAVTTRDHIRYLNTLNASDNEEWKNLKYRLVKSKTRDFVLPWPEFTKDTREALEEIIVSHKAINRIVSKPYNQYLKWVEKNGEYVKDFVKQEPPVKLGKTWVSVRRSMFKEPQGVIYLKKIELVRINEAVAIQIKKETVENKKGQQPLDYIYDQELRPKIKEIIKQFNSDIESIKKHIKKNPLCGNDKKPIEKIAVARFKEYASKRVTLDSSFDDKKINKIPYADKSPLVDLLKEHLKLNGDKPEIAFQGEGLMDLAKKAGKPIKKVTIHEAKDPTDKFQGRYYETDKGGNVFFVIKIDKDRNRFEMSTLPLLEAIGRLANKLPLVDHVPDESSIILSPNELVYVMEEGETINLIDWHDKKKLFTRTYKMVSCTGGECYFIPHYISKLILPYDAKTKTGELGSLNKSENTLEGISIKRNCIKIKLDRLGNVIEANGRKIVPQIKNLYAQ

SEQ ID NO: 3705 - protein, 1520 aa, unidentified
  REGION 1..1520: note = Description of Unknown: Cas Enzyme sequence
MEEGKSKKVLGLDLGTNSIGWALISDSDTKKQILGMGSRIIPMSQDILGEFDKGNSVSQTAERTSFRGIRRLRERHLLRRERLHRVLNILGFLPSHYTQMIDFDKYLGQFINDSEPKLVYKNNPTTNKPEFIFKSSFSEMVNDFRITQPQLLENNKKIPYDWTIYYLRKKALNNKIEKEELAWLLLNFNQKRGYYQLRGEDEEETNNKLIEFHSLKVVDVIDSGDKKGKDEIWYNIALENGWIYRRTSKTPLDWIGKTKDFIVTTDLDENGIVKKDKEGKEKRSFRAPQDDDWTLIKKKTEADVQKSNKTIGCYIYDTLLQKPNQKIRGKLVRTIERKFYKDELEAILRKQKEFHSELQDMQLYQACLDELYENNDAHQNRISNKDFTHLFVNDIIFYQRPLKSKKSLISDCKFEHRVYMKDGEQQQEPLKCIAKSHPLFQEFRLWQFLQNLSIYSKEELVDEREADITKVFLKTDEDWINLFDWLNARKEIDQKTFLKYPGFNIKKDSDKYRWNYVEDKIYPCNETRSQFYVRLSKVENVPDGFLTNDIEEVLWHILFSVEDKKDIEKALKTFADKHQLGVDFVEKFKKFPPFEKEYGSYSAKAIKKLLPLMRRGKYWNEAGIAQQTKDRINKIITGEFDENIRLRVREKAIHLTSIKDFQNLPVWLASYIVYDRHSESGDIKFWKNPNDIEFYLKYEFKQHSLHNPIVEQVITETLRVVKDIWKQYGSSIPGFFNEIHIELGREMKSPKKDREKLSKINSENENTNLRIKALLIEMLNDPDILDVRPYSPSQQDILKIYEEGVLNTESEIPEDILKISKMAQPSQSELTRYKLWLNQKYLSPYTGEFIPISRLFTSDYEIEHIIPQSRYFDDSFSNKVICESEVNKDKDNSTAYEYIKNNSGKKIDLSFGKTVTLYTLTAYEENVKSNFMQTRSKMKKLLMEDIPETFIARQMNDTRYISKVVKNLLSNLVREEGEQESTSKNVLSSNGSITNTLKRDWGLEYVWNDLIIPRFERLNELTNSNNFGQWTNKDGKKVFQTEVPLILQKGFSKKRIDHRHHALDALVIACATRNHINYLNNDFAKQSKRDLRYDLRSKLCYKKYNGEGKDNYKWLFTKPWNTFAEDAKEKLLTTIISFKQNLRVINKTVNKYQKWEIDENQNKKKVMVSQVKGDSWAIRKQMHKDTVFGIVNLRFKKQVQLSTALDIADSIVDKTLKSKVKEFLGLKWDKKKILTYFKALNLTWNENDISKVEIYYYDSNNVASRVNLDESFNLDKIESITDTSIKKILTTHLNHEKYKNIKDESGKAILPEILAFSDDGIDELNQTITELNDGHYHQPIYKVRIFETKGNKFNVGITGNKKSKFVEAAKGTNLFYAVYLNESGKRNFESIPLNIVIERQKQGLNSVPETNHVGDKLLFHLSPNDLVYVPDKEEQGHPHLVDFSLINEDMARRVYKMVSCTENEGHFVPAYYSNAIIKNEIGSNNKSQNSIDKIPQQIKAVCWKLKVDRLGKIVDIYGIK

SEQ ID NO: 3706 - protein, 1476 aa, unidentified
  REGION 1..1476: note = Description of Unknown: Cas Enzyme sequence
MKKILGLDLGTNSIGWALIEQDFEKKEGKILGMGSRIIPMAMDILGDFEKGNSISQTAERTGFRGIRRLRERYLLRRERLHRVLNILGFLPEHFASQIDFVKHLGQFKEETEPKLAYNNIDFIFKKSFEEMLEDFKKSQPELLNRKNKNGEDAKIPYDWAIYYLRKKALTQKIEKEELAWILLNFNQKRGYYQLRGEEEEESPNKLVDFYSLRITDVIADEEKNKKGETWYSLNLENGWIYRRSSKIPLFDWKDKVRDFIVTTDLNDVGSLKTDKDGYPKRSFRSPNENDWTLLKKKTEQEIDNSAKTVGTYIYDALLQRPDQKIRGKLVRTIERKFYKEELKAILQRQIELQPNLFTDDLYNECIRELYRNNEVHQLILSKRNFVHLFVDDIIFYQRPLKSKKSSIGNCTLEFRKYKTKDKDGKEIEKVEYLKAIPKSHPLYQEFRVWQWLNNLRILKRDDDNDLTSEFIKNIEDQEKLFSFLMEKKEVNHIDILNYLLEPNNLKPSEFKKEILKYRWNYVFDDSKEKEEEKSKKYPCNETGYEIRRRLEKVTNLPDKFLTSGIEEHLWHIIYSVTDKNEFEKALTSFAHKHELYVDSFVESFKKLPPYKSEYGAFSEKAIKKLLPLMRLGKYWNSDKIDIKTKKRIEKIITGEYDDKIKDKIREKAIHLTQNAEFQGLPLWLAQYIVYDRHSEAAIAGKWRTVADLENYLKEFKQHSLRNPIVEQVVTETLRVVKDIWLNYGKGAENFFDEIHIELGREMKNPADDRKRITSQVTDNENTNLRIKVLIAELKENSDGKLNVDDVRPYSPIQQEALKIFEEGVLSSSVDIPEDIIKISKTAQPSKAELIRYKLWLEQKYRSPYTGEIIPLGKLFNEAYQIEHIIPQSRYFDDSLSNKVICEAAVNQLKDNQLGLEFIKNHHGEKVETVFGKTVEIFTEENYKQFVNEHYNKNRSKKFKLLLEEIPDKMIERQLNDTRYISKFVSNLLSNIVRAENEDGGVNSKNIIPGNGKITSTLKQDWGLNDVWNDMILPRFERMNQLTNSKDFTVWNENHHKYLPSVPMNLSKGFQKKRIDHRHHALDALIIASATRDHVNLLNNKHAKSKERFDLNRKLRKFEKIQYLDRKTKEVVEREIPKDFLKPWMTIKTDVKNELEKIIVSFKQNIRVINKTNNKYEKFVEKNGRKVKELFDQTKGDNWSIRKPLHKDTVSGEIKLDRIKVSKGKILTATRKNIDSSFDLKTIESITDTGIQKILKNYLASKGNNPEIAFSPEGLEEMNKTIAQYNDGVFHQPIFKARVFELGSKFNLGKTGSKKEKYVEAAKGTNLFFAIYVGINNKGEKIRQYETIPLNVIIERQKQGLHSVPEKYFNKDGFELTLAYYITPNELVYIPTGEEKENINMIDFGNLNSEQVKRVYKMVSSSGSQCFFVRQDVAASVVNKSEFSTLNKMEKSIEGEMIKEFCIKIKVDRLGKIERNN

SEQ ID NO: 3707 - protein, 1382 aa, unidentified
  REGION 1..1382: note = Description of Unknown: Cas Enzyme sequence
MKKILGLDLGTNSIGWALVNESENKEERSSIIKLGVRVNPLSLDELSNFEKGKSITTNAERTLKRSMRRNLQRYKLRRENLVEILLEHGFIKQDTLLSENGNSSTFETYRLRAKAAKEEITLQQFARVLLMLNKKRGYKSSRKTKEQDEGQLIDGIEIARRLYDENLTPGQLCHQLLKSGKKYLPDFYRSDLQNEFDKIWNFQRQFYPEILTDSLKEELKNKNEKATWTICDKPFHLVGIKRTTKGEALKLENYEWRSKAISEKFDLERLTIILQKVNGQINGSSGYLGAISDRSKELYFNKMTVGQYLMAKLAANPNESLKNQIFYRQDYLDEFNIIWDKQAEFHREFTNELKQEIRDIVIFYQRPLKSQKGLISFCEFESKQVEVEIDGKMKRITIGCRVIPRSSPLFQEFRIWQNLNNIEIFGKGQNSRSNTTDSDIILQSESGERRFLFQEEKELLYRELSIREKLSKNDALKLLFDNFKELDLNYNNIEGNRTGAALFKAYNDIIEFSGHEKIDFDKNNADEIFKSVRTIFETLGYNTDILKFDPENELDRQPYFKLWHLLYSFEGDNSKTGANNLIAKISELYGFENECAKIIANINFQDDYGNLSAKAIRKILPYLKAGNRFDLACEYAGYRHSKSSLKKEEIENKVLKNKLKILPKNSLRNPVVEKILNQMVNVINSIIDTYGKPDEIRIELARELKKNVKEREALTRIINDTTRANVEIKKILQAEFNLSHVSRTDIIRYKLYKELETNAYKTLYSNTYIPREKIFSKEFDIEHIIPQARLFDDSFSNKTLEKKDINIEKGNLTAFDYVKEKLGENGLEDYLNRIDRLYKVGIISKAKYNKLKMSEKDIPEGFIERDLRNTQYIAKKALELLGGIVKTAVPTTGSITDRLREDWQLIDVMKELNWEKYKALDLIVYLEDKDGRKIGRIKDWTKRNDHRHHAMDALTVAFTKHAYIQYFNNLNARYNKNSNTYAIEQKYFNNGRALPPIPLVEFRAEAKKQLEGTLVSIKAKNKVVTNNFNITNRKEGTNKLMQQTPRGQLHLETIYGSHRQPVVKTEKIGSNFNYDMISMVTRPIYRKALLKRLQDNDNDPQKAFTGKNSLKRNPIFLDEFNTKQVPEKVKILSFEEGYTIRKQIAPDLTIDKVVDQKIRRILQERIKEYGDAKKAFTNLDENPIWLNKEKGISIKRVTISGINNAQSIHKKRDKEGRLISDKEGKPVPVDFVNTGNNHHVAVYRDYNGDLQENVVSFYEAVTRAILGLPVIDKEYKKSEGWEFLFSMKQNEYFVFPNKNTGFNPKEVDLLSLENYANISPNLYRVQKFTTKDYFFRHHLETTVENNNILKGTTWWRGGLSLLRDIVKVQINHIGLIVSVGEY

SEQ ID NO: 3708 - protein, 1467 aa, unidentified
  REGION 1..1467: note = Description of Unknown: Cas Enzyme sequence
MSSKTILGLDLGTNSIGWALVDQDSNEKTGKILGLGTRVIPMPQDILGEFDKGNSVSQTAERTRLRSARRLRERYLLRRQRLYRVLNILGFLPDHFAQKIDFKTRPGQFKDDSEPKIAYDKTAFIFQTSFAEMLEDFKINQPELLNRTNRNGEPVKIPYDWTVYYLRKKALTHKIEKAELAWVVLNFNIKRGYYQREDDSTDKEKDFEIISSLVSNVTKGEKDKKYQKYWYDIQLENGLNYRSAFYSDISHWIGQKREFIVKTTTLKNSSVKQEISFLPTFEEIEAMDKALKDKMYAKIKIKTQLEIDKSGKNVGEYIYDTLLQNPNQKIKGKLVRTIERQYYKEELEAILKKQIEFHPELQQEELFVDCIRELYRNNENHQHNLNSKDLQHLLIDDIIFYQRPLRTQKSSISNCSLENRKFKDANGNEQVAPVKVVPKSNPYYQEFRIWKWIWDLNICRKEDEGNVTRQFLKSAEDYGFLFEELAKRKEIKQEALLKFLVERTGLKGKPAGAEANKYRWNFVEDKVYPMNETYALIATRLERVNGLPAHFLSKTNEFQLWHLIYSITDKTEYEKALKTFARKHKLDEASFVEHFRKFPPFKSEYASYSEKAIKKLLPLMRAGKFWSWEAIDSNTRARIEKLTTGEYDETISHRVREKTKELTEPHHFQSLPDWVAKYIVYGRHAEATDLTKWNSADDLEHYLQDFKQHSLRNPIVEQVMTETLRVVKDIWQQYGNGAKDFFNEIHIELGREMKKTADERKGLSKQISENENTNLRLKALLAEMMQQGDVENVRPHSPTQLEILKIYEDGVLNSDIEIPDDIQKISKTAQPSGKELLKYKLWLEQKYHSPYTGEIIPLSKLFTPAYEIEHIIPQSRYYDDSFGNKVICESAVNKLKDNQLALEFIKNHHGEKVQTGFGNTVTVFELEAYQEFVKKHYAKSRGKKTKLLLDEIPEQMIERQLNDTRYIGKFISAVLSSIVRESENDDGVNSKNIVPGNGKITAELRHDWGLDDVWNDLILPRFERMNALTKSAAFTAFSKVHQKQLPTVPLELSKGFQKKRIDHRHHALDALVIACATRDHVNLLNNLHAKSDNMRFDLQRKLRRLEKVKYFSAKENRLLERNVPREFIKPWGSFTADAKAILETIIISFKQNLRVINKASNRYESFKDENGNLRLGKDGKPKKGMIPQTKGDSWAIRKSMHKDTISGQVTLPRVKMAKGKITTATRKAIDSTFDIGTIESITDTGIQKILKNYLALKGGNPELAFSPEGLEEMNKTIEKYNDGKPHKPIFKARVYETGNKFPLGQTGNKDKKYAEADKGTNLFFAVYWDNEKKKRNYESIPLNEVIEHQKWRATLPVAEQRQTPMIPVNRENGEFLFSLSPNDLVYLPDGNEDTIKLTVGPTRIYKVVSFSGNQCFFVMQTVATSIVNKAEYTTLNKMERSIDGKMIKESCIKIRVNRLGQIEANQT

SEQ ID NO: 3709 - protein, 1506 aa, unidentified
  REGION 1..1506: note = Description of Unknown: Cas Enzyme sequence
MKKILGLDLGTNSIGWALVDKVGQKILGMGSRIIPMGTDKQDYEKGVGITKNADRRIKRTIRKMNKRYKLRRNKLLYILHELGMLPEHFQFKNGIPEPTKLQELELLPIRRKREYDENGKRKDRIYKNGKRVEQDPNSIINYKLRVKALNTAIELKDYGKILYQFNQLRGYAGGNNDDDTETKKEDDVDEAAVTKRYEVFTQKVMISNVEKSDTTFKVRGGTNKGQELPKYNVTITLDDEVTEGETELQNLQDKIGEEEELEIRIKRNKKGEKTSVIFALPQKTNWRKQMEATEDILKNEKLFISQLLLKDLEQNRWTKIRNRVILRNRYQEEFDKIWETQSKKYSFLNNCPNETLEKIVAYIFPGKSESQEKLRKEAIDNGLKHIIRNQVIYYQRPLKPQTELISKCQFEKEETVLANSHPLFQEFRCWDQINRMYVTSKKEVWSEKKKKNILQYTDRFLTNEEKKEIYNKLQAQKQLGFSEVAKIVKLKNDKTEYLNGLNVKAKLKGCDTAIAITKILSEHFETLYSQDNDIVTKIWKAIFDNANNGNEYDPKSLKVSSISEALKPLNNDELATELALKFAQNIKFPRKYASLSEKAVQNILPLMQLNPTNVPDRVKQTFNLIQTGEIADGFPIEQLEDYVIGFIEQNPNAIETGGLMYAFASSLVYGKHTKESIKPQIKNYHEIQYIERNLRNPIVSQLANETMQIVKALWKQYKFNPEELEIRVELARDLKNSAAERDKIYKGQIKSQKINETIKKRLIELKQEPSQGNIELYKLWSKQNIEDYPAPKKTSEPTQDEIQKLRLWEEQGCISPYTLKPIPLSKLFSPERLYDIDHIVPKSRYFDDSLSNKVVCETNINEEKSNRTAWEYISQQSSTLGICSEADYVKHVNDIFYGKKKKNLLLEKIPANPVERQIKDTQYISVAVKNELAKIVGSDNVKTSTGEVTSFLRSRWGLRKLFMELTEARFRQMGLWDINPETGKPNTEWVQKYFDKEKKKHVYEIKNWSKRYDNRHHAIDALVVALTEQSHIQRLNNLNKYLQDELTKRKDEFKIAVKEDENILEAFFNLEATRREEIQKQIESSRHFEVPFNNLVEQAKAHLEAMTVSIKPKDKLKVGSDKYDSNTPHKQLKSQVKVRGALHKEIYYGKLIEKDTKTIELHKLTAKDISKVIDEVLKKEIDTHRKKYESMKEAFTGEGLKAFNESRFQRKKPTQLKPPVYKVKVWYSAKEDEESTLQRLYDDNEKLSVVTGDNYLFLVVEKENRNGKERSFDIVSLYDSVSLANDSLKENNVDFKRKIVANGIEKIQKELKQEILNSQKELEQKIPKAKGKKKEQLQAQLQETDENFKLKLLFTLQQNDLVYFPENLEDTVLNFNNDELKEWLSKVDNKKKFSQRIYKVVKFDKSKTAHFIPHNYANAIAVQKDLTEAQKEILKKQYADKKIPKKELNFVEYGSYRDCSPYESGEVFVKNFTETDKQKKKGQKLIKIQETCIKLHIDWLGNIRLA

SEQ ID NO: 3710 - protein, 1393 aa, unidentified
  REGION 1..1393: note = Description of Unknown: Cas Enzyme sequence
MKKILGLDLGTTSIGWAFVKEAEDGDNEPSSIVKIGVRVNPLTTDEQKDFEKGKSVSVNADRTLKRGARRNLQRYKQRRGNLIEVLKQNNLINTDSILAENDKDTTHFTYAIRAKAAAEGITKEEFARILLMINKKRGYKSSRKATKEDEGQAIDGMAVAKQLYEDNLTPGQLSYQFLKEGKKHLPDFYRSDLQAELSRVWDYQEKFYPNILTAEFKKELEGKGQRATSAIFWNKYKFNTAENKGTRDEKKLKAYEWRSKAINSQLAIEEVAFVITEINNNINNSSGYLGAISDRSKELYFNKQTIGQYLFNQLQNNPHTRMKNQVFYRQDYFDEFETIWETQAKYHAELTLVLKEEIRDIIIFYQRKLKSQKGLVSFCEFESKKVEYEIDGKTVIKTIGARVIPKSSPLFQEFKIWQNLNNIELKNKKDKSRILIKDFDLDIKEQLFNELNIKGNLTKAKILPILVDKPNDWELNYMVIEGNRTHQALYESYFKMMEYESHDDIDLEKLTAAEMKSAVLSFFETQHIDRTILDFNAELDGNHFEKQPAYQFWHLLYAYEGDNSNTGNDKLYELLKSKFGFKKEYASILANIKIQDDYGSLSAKAIKKIFPFIKENNYSDACALAGYNHSSSLTKEENDKRPLKGELKILPKNSLRNPVVEKILNQMVNVINAIIKDPPLGKPDEIRIELARELKKNAKEREEDTKRINEAKSNHDKIREILIREDKIPNPTRNDIIRYKLYQELKFNAYKDLYTNEYIARQDLFTKKYDIDHIIPQASLFDDSFSNKTLAPREANYTKGNRTAYDYIDKDRGAESLTDYLERVEMLYQVNYKSKDEGISKAKYKKLLLKGSEIGEGFIQRDLRDTQYIAKKAKEMLHEVCRTVVATTGSITDKLRDDWGLVNVMQELNMDKYRKLGLTEMIEKKDGGFKERIVDWTKRNDHRHHAMDALTIAFTKHEHIQYLNNLNAKTKEDKKGKEIYAIEQKITEKFDKDKRRFKSPLDNFREEAKNHLESVLISCKAKNKVVTKNKNKTKSSKGEKSQPTLTPRGQLHKETVYGKIKQYVIKEEKVSGKFDEETIFKVSKPQYSSALLKRLHENNNDPVKAFTGKNSLAKNPIYLDDQKTVQVPEKVKLVWLDDDFTIRKDISPDLKIDKVIDIGIQNILYKRLEQFGGKEKEAFSNLDKDPIWLNKDKGIAIKRVTISGVKNAEPLHYKKDHHGKEILDDNGKPTPVDFISTGNNHHVAIYRDENGDLQDEVISLHKVITERVNQGLPVVDKTYNQHLGWRFLFTMKQNEYFIFPSYNFDPSEVGLLDPANNKLISPHLFRVQKFSKVTYGNSSVRDYVFRHHFETSVEDKKELKDITYKSIKSLPYFENIIKVRINHIGQIVKVGEY

SEQ ID NO: 3711 - protein, 1289 aa, unidentified
  REGION 1..1289: note = Description of Unknown: Cas Enzyme sequence
MAKYILGLDIGTNSIGWTLLNNNEIIDGGVIIFPIGTNVDKNGIEATKNMERRKYRGASRNHFRYKLRRRNLKKLLDKIGMLPDFSKTYKIKEKYQASELYALRTEALYKPIPPEEIGRLFLLINKHRGFKSNSKILSNENKEDGTVKEAIGQLQKFMDNNNARTIGEYFHKMYIKASSLHNEGNWHNIDEPFDERAETDGIFVHKNNRGIRRENGRYVGRDMYENEFDLIWEEQKKQYPQLTGSKEEYDQIRQLPVPVKREQLKVFKETAYWRLKYQTIFYQRPLRSQKKYIGKCQFIKNKRTAPASSLSFQEFRIWKQLADIKYTDKENDIYGQSLPNDLKQRIFDYLQIHPKLNLREGGKKKDGSKNTDIMDVLGFTNKRNFDFNFDNDEDDKTFEGNKTLYAIYTACGEEIYNGLKASNKLEKLWHILYMAKDDEWLKDTLTSKWQFNDDTATRLVEMGLEDGYASYSSKVIEKTLPYLRDGKDEYDSLILAGFIKSPDEVQEEIVLNKKIKQLVNNELRNPVVEKAVCETIRLVNTILQTKGIDQDNFIIRIESTRELKKPKKERENIRRGNSDTDKRREEYARFLNEKRKNGDLLFARDIQKYDSIIHKFELWLELGADKNDTSFKDFEKIVQKKDREKHSLWLESNRICPYSGRIIGLSKLFSSEIEIEHIIPYSRCLDDSFINKTITFTEINKEKGNQTAFEYLQSKGKNAFKDFKERIKIFSKEKQESRFLKEKVEVGFTNEQLTNTSYIARYVRKKLHEVCKDVQFTNGAATAELRKNDWRLNNLLDKIRYEEEKGIDIDQYLREFSLYKKDFQTYRKKKANSTDIQPMNWNNLTQDITANYEAETRNPIYEWWLEIQKFDAFRGLKGKKDRSDHRHHLLDAIIIAMCSPKIIQELSTFNQLREKQGISMYDEKGELTRERINCPLKYEQIKSAIKDVLIYHRADQKLITTKTNRIQRKKNHEGDVRVIKQKTIAPRGSLHADNYFGKLKNPLKQGFDKKDVYVKRIPIEPEKFKDISALDKVVDRNVREILKRRLIKYGEKGDKAFSEEALLSDPLYLYSVVKYPDGLPDNPSSKLNKPLPIIKKIRVVNKNSRNLIQLAAKDENREIVNHNRYAETDGNYVMAIYESREKDKKGKVKVRRDFEIVSFFKAVEKRRLGLQMFSDEKMQKDGTYLPLMSNCPYLKQDDFVVMYENDENEIDWKNNNDLKRRLYKISEIGRQVNTDGGEFGVIKLIRHNSQKTTKDKYITEGSFIKILHSGIKCIKIAINNLGEITKHRE

SEQ ID NO: 3712 - protein, 1609 aa, unidentified
  REGION 1..1609: note = Description of Unknown: Cas Enzyme sequence
MKTILGLDLGTNSIGAALLKLPDKFEDYGKEGSIVWLGSRIIPVDGEDLQKFETGAQVETKAAKRRMKRGSRRLKHRYKLRRSRLTTVLKILGWVKEDFPLDNPKRIKEIMRENNGRFQFSIGDYLPFSKETITEATELLGVNGKLNEKGNISIPEDWIIYYLRKKALTKKISVQELARILYMMNQRRGFKSSRKDLRETTLLNYEEFNKIKRKIHAGELTEYTKGEGLEVKTQFVSITKIKSVKLKNQEKDKKGKLTFVIQAEDPRLITWEEKRIEKPEWEGKEFKFIVEQTIDKKGKLSQNKPQIPKEDDWKLLMVALDNQIDESGKHVGEFFWDKLVEYTQKNQIYKIRQNVVRREKYQRELQAIWDKQIELRKQDGTEEELLNTEKIERIARHLYKHNQAKQKELKEKGLFHILANDIIYYQRDLKSQKNLISECRYEKRIGKERAESGEFIQTGIYGLKCAPKSSPEFQEFRIWQDIHNIRILERERTVDGVTKVDVDVTREFIDETTKEALFDLFDSEAEVTEKKIFDCLNKAKPGAALNTEKHRINLFSNRQTLKGNETKSLFRTIFRKFDYEREGEKLLQNADVFYKLWHIVYSISSSDLEKSAKGIRTALKQFNFPEPVVEAFTKLEEFKKEYAAYSSKALKKLLTVMRCGKYWKWETIERTEIKTPDSPIDNPTRIKLSDRIDKIISEGWERDIKVDKRTGEIINERHFDRREQFSGLPVWMACYVVYGKHSERQNTRKLSMEEITKIDIMTLVPHNSLRNPIVEQVVRETLCLVKDICKQFGQPDEIHIELARELKKNMEERKAISENNARNLEEKLRAKFLLQELLNGDFEHYDEAGKKIKRSFTVKPNPLNPVDIEKFRVYKSLASFEFDKKEKKNEDQIRLDKLFRDGKKERVPTNAEIRKYILWLSQKCISPYTGKIIPLSKLFDETQYEVEHIIPRSRMKNDAMDNLVISETGVNKAKGNELAANFIIQSRGKCTYGGVQYTLFTYEEYCNHCRRTFRGKKYKNLMATEVPQDFIERQINDTRFIGKKLAELLYPFAKEKDGLVYTIGSITTELKGRWGLNSVWKQLLKERFERLEKITGEKYIFPNEDDQKDIVFNVPAIPDLDIKRLDHRHHALDALIIAATTREHIRYLNSLNAADTNEELKQYRYTLCKGKIREFRLPWETFTRDAKEKLSEIVVSFKSNNRVISKPFNRYQKWIKKEDGTYQKQFIVQAPNERWLAVRKSLFKEPQGIIWVKKKRYVSVKEAFRIQIERMQVEHDHEKRKTAAYVYDQYARPLIKEIIQKTVESTGIELSRTNDLLSAIEEDYLKKNEKKNTSGKGKEYSLGSKKYNKIEIAEFVMYKAKRVPLDGSFDHKKIDKIPYSESSRIPILLHKHLQEYEKKNLGSAEAFSSEGLEKLAKKNNGMPITTVTIMDGELKDKHLDNLFGNKYMEPDAGSIAYFIIYENEKTKDRTEMFSLPTHNVLERIRNGMPIAEKREGYRTIILSPNDLVYVPTEAEWERIKAGETNVIDWNNKKIIAKRIYRMVSADDAFFVQHHIARPIIPTVLKGDNKTKGEIDWHNKSTKTMDGRTTIADCCIKINVDRLGNIKPAI

SEQ ID NO: 3713 - protein, 1437 aa, unidentified
  REGION 1..1437: note = Description of Unknown: Cas Enzyme sequence
MSETKIILGLDLGTTSIGWAHVIEGETPDKSSIEQIGVRIIQFDNFDKVDKTGKVSESKNPEQDFASGKGLSPNASRTLKRGARRTLDRYQDRRKNLIEILLKAKIINSDTILTENGKETTFSTWKLRSNAVTQKIEKNELARVLLAVNKKRGYKSSRKAKNDDDGKAIDGMDLAKRLYDEEITPGQLVFQLLQEGKKNVPDFYRSDLQAEFDKVWAFQKQFHPEILTDEFYQELKGKGQRATSTLFWTKYNFNTADIKDIEVELQNEKTIKYSNRDKKRLQAYKWRSEAVGQNLYKQLLANPHTRLKSQVFYRQDYLNEFEAIWNKQAEYHSELTDELKKEIRDIVIFYQRKLKSQKSLISFCELESKEIIIDGKKKIVGSRVIPKSSPLFQEFKIWQRLNDIEIKKIGSKKRKTKINSDQVLLFEEEKEFFNLDLEQKQILFDELNIKGDLSATNAIELLGLNPKEWSMNFLQLDGNRTNKEFYNAFLKIVDIEGYDVKTLLKIKSNKDEVELDDLKVIASEIKDMIKSIFDSLEINTQILNFNAELEGKDFEMQPAYQFWHLLYSYEGDDSASGNDTLYKILEAKFGFKREQAQILANIPLQDDYGSLSTRAIRKIIPFIKENNFSSACEFAGYRHSKNSLTKEEIDTRVLKGELELLKKNSLRNPVVEKILNQMVNVVNTLIYKHSEKDEKGNIIKYFKFDEIRIELARELKKNAEERKDLDTQVRDGKTRNEKVVKILQSEFGIQNPTKNDIIRYRLYEELKNVGYHDLYTNKYISKDKIFSKEIDIEHIIPQSKLFDDSFSNKTIVYRFDNEKKGNKTAYDYILSEFGEEKLSEFQSRVEKLFELGKKNKEEGISKAKYKKLLLPESEIGEGFIERDLRESQYIAKKAKEMLFEISKSVVSTSGGITDRLREDWGLVNIMKEINLPKYQALGLTEFQERRHGNKVEVIKDWTKRNDHRHHAMDALTVAFTKRSFIQYLNNLNARRQDIYDEGISNSKNRSSIKTSDLKLSSKDVLGIEAKELKRDEDNKLRFNLPIPNFRQVAKEHLESVIISHKAKNKVATINKNKISGKSEPQIVLTPRGQLHKESVYGQYSFAETKEEKIGPKFDSKTIEMVTKPLYKKLLLERLTENDNDPKKAFGGKNALDKKPIYLNEEKTETLPEKVKLEWYTKDFSIRKDITPENFKDEKLIEKILDEGVKRILKVRLKDNGNDPKKAFSDLDKNPIWLNKEKGISIKRVTISGVNNAVALHNKKDHLGNEILDNEGNTIPVDFVSTGNNHHVAIYKDEKGELQDNVISFFEVVERKNQGLPEIDWSYNKDKGWEFLFSMKQNEFFIFPNEKENFFPNEIDLFSRDKLKIISQNIFRMQKFSKVIYGNSAVRDYVFRNHLETVIDDRKELKDKAYKSIKSLSFFKNIVKVRINHLGEIVHVGE

SEQ ID NO: 3714 - protein, 1392 aa, unidentified
  REGION 1..1392: note = Description of Unknown: Cas Enzyme sequence
MKKILGLDLGTSSVGWALVNEAESDSEKSSIIKLGVRINPLTVDEVKNFEKQKGETLNQLRTQKRSMRRNLQRYKLRRNNLIAILKSQGWITDATILSENGNRTTFETYRLRAKAVHEEISLEQLARVLLMINKKRGYKSSRKVNSEETGSIIDGIDIAKKLYNENITPAEYCLPLLKQGKRNLPDFYRSDLQSEFDKIWRTQSSFYPELLTDELHQELLGKTKKQTWSILSNKWEWEEEINGETKHYKLKGITRTGKKNEIKLQTYSWRVRALTEKFGLEELAIVLQEINDEIAASSGYLGNISDRSKELTFRNLTVGEYLMESLDNNPNVSLRNTIFYRQDYLDEFERIWSIQSEFHPELTDDLKHEIRDITIFYQRRLKSQKGLIGLCELEQKEITIVKNDKETLKLVGNKQIPKSSPLFQEFKIWQTLNNVKVKEGKEERALTIEEMQALHKELSVKDKLSKKDVIKLLWRGNKSIDINFKELPGNTTRHSLLEVISKILELSGHTPIDFNFGAEEIEDKLSKIFSINGWNTEILKFDSSAPLDRQPSYRLWHLLYSYESDNSLSGNDALIKHLMELCKMEKEYAKILVSLNFKDDYGNLSAKAIRKILPYLQEGLTYDKACEEAGYRHSKSSLTREEIESKELQDRLQLLPKNSLRNPIVEKVLNQMVNVVNEIIETYGRPDEIRVELARELKKNAKERAELTDNINKATAEQEVYRKILQTEFGIAHVSHNDIVRYRLYEELKENGYHTLYSNKYIPKEKLFSTEFDIEHIIPRARLFDDSFSNKTIEAKDINIEKGNKTAYDFVLEKYGEAGLAEYIKRCEALFKGSKNAKLRKLKMSEAEIPSGFVDRDLRNTQYISRMALSMLGVVCRRVVATTGSITDQLRKDWQLVDLMKELNWDKYRAAGEVNYYINRDGKKIGEIQNWTKRNDHRHHAVDALTVAFTKPVLIQYFNNKNASFAANSNERAIKAKYVEDGKVIAPMPLHEFRADAKHQLEGLLISLQSKNKVVTRNQNKTKSSQHGSHSRVQLTPRGQLHEETIYGRHKEYVVSEKKVNGSFTEEVIATVCKKVEREALLERLHIFGGDAKKAFTGKNSLDKNSIWINQEKGIAVPLKVRTVSLEPVFTIRKAINKDLKVEKIVDAHIRKILEERLAEYGGDPKVAFTNLDENPIWLNKEKGLSIKAVTIKAAISGIAIRDKHDKDGHRITDSNNVPIPSDYIATGSNHHAAIYRHPKLDKKGLPMHDENGKPIYEFEEVLVSFYEAVTRVNQGLPVIDRNYKRDEGWELLFTLKANEYVVFPNEETGFNPKETDLKDPDNYSLISPNLFRVQKFSSKYYVFRHHLETKIDDNKSLKETTWKRVCALSALADLVKVRLNHIGEIVDVGEY

SEQ ID NO: 3715 - protein, 1776 aa, unidentified
  REGION 1..1776: note = Description of Unknown: Cas Enzyme sequence
VTCATLNVYTTLKIYCDLLQDKSIKIFSNIKMDTKKILGLDIGTTSVGYSIMEISENKTKNVYSEKLATSDINNDRIGIYKDAIGVRIISQDTDRFDRGLKLNDSKGSTLTPTANRRKFRGIRRMRNRYKLRRNKLYKLLSILGLAPDETYFTNKKEKRGKDNDIGKALYGLRERAARERISLNELARVLLHLNQLRGYSSDRFAKDEETNFDYYLTEVIELDWENRTEIFEKGSTEEVKYYQIKIKLHFVEPYIVVEDDEKTVFEEIEGYIFKKEIDFKLGDFITIKAPEFKQNKKGKVVVEEYYKITPTKPDATDWKYKYQTLHKDLSDWCKSRGTVGSYFYKNFYELSNLSRIRNNVVNREWYEKEFDAIWTLQYEFHKDFFEKIDVSTLVKEVFKDYSTVLNDVMNKRENKERLQTLIKDKIIFFQRPWQQAKSKGRCEFEKIKVKREFAIKGTGTKELKEEYIGRTVVPRSHPIFQNFKVWQQINNVKLIWNTSDDKINLFENAELFERQTGKSIEEVKELLFKKMQVSKTLSWRIFVKEELGIDIYDEVEEKKKTKISKKQGLDLETGAIVDEFFSINFRKRKRDGTYGDIKLKGNTTKAELQNILKGKRVEWFEMLHDNNKKVTNLQLLWEIIYDITNSDVSKVASIIKKHFDFDEDIYIALSKVKFDDAGMANLSAKAIRNLLPLMSDGKNYSKTAKTKVDELISLNGLETNTDTHEKLSGLKDFVTDKKARIRLSKFAAENEFKYLNYWEAAAIVYGSHSSRGNASSKKIESVKSHSMNNPVVEKIVNETISIVSQLKEEYDFDEVRIELSRELRASAYERQQMWESMGNGAAKNEWAKKMLREIKQAMLDDDRDISQLDTEISGSNLDKIKIIEDVVRYQKPTEYKTKEKEYKLTEPSNAEVTKYLLWLEQNFKCPYTNQPIPLTDVFARGKVVEIEHIIPRERYYSNAYANKVITWKEVNQEKGNKTAYEFIVSKRNQTGTVKVGKKDMPLVSASQWEEHVKEMFPKSGKRNNLLRKEIPEDPIERTLKETQYINKKLKEKLGELVGSDKVWVTSGAVTDILREKWKLNDIWKELVEERYSSFKAPTGKKTFQLKSVSEQQGFLNELKKLNAFDEKFNGIKIKIGKKDFDFNSKEEILKIIDEVELILNANLTSGTTKLTPYKYASSDESFEIKSLIYTTKHFNTKTNQYEDVEKYAGMSKRIDHRHHALDAIIIACTKQNHIQYINNLNAINSADIESDDNKKAKYKGIKNDICIGNSSSKFKFPWDENKFIPEVKEALKNVLISHKNTNVLISPSKHRNNKDIKSGKVASVRGELHLQTNYAKKKYFENEKTDIVKLIPLLFKKKMDNQNQTLVRFKSFETIVKETVLKVKYQNVLIPLFREYEAESLNAQTAKDFAKKNLKTIEEEKLFIHEKTGKKMTWLSTFTEKNASVRPMGLSMDLNSEKEIKDISNPRLRKIAQYRLDYVNKQIDVIKKLKFSFKEEENIKIRELKEVPLYNNAIYEVRVKLNDGKHKWIEIKDLENTDLENIEYAKPETTIAIKCKLKEFSLNELKERYITNPIFLSEKPIVVKKARQKSFFQDLYELNDGRYVYSRDVFMTYIFVPKGSNRKDAKREIEFLKFFDAVKIITAEKPDKINYSALITKPECDLLFTLSKNDIVYLPDDVLTDEQIAEVDWNDRSEIISRLYVVKEMTPSRNEIVFQHLYKSDSIRVDEDEAKNILNLSKLEEEIKYGDTNMWKRCIKVSIDRLGREIKPYWHNNIKV

SEQ ID NO: 3716 - protein, 1443 aa, unidentified
  REGION 1..1443: note = Description of Unknown: Cas Enzyme sequence
MEKILGVDLGTNSIGWAIRDTSIEENQIVDKGVLIFEKGVADVKGIEQPKVKERTEARGKRRNYQAEKYRKYALLQCLIDNGMCPLTIDELNEWRHYKKGIGRKYPQSEVFHRWLRFDFNGDGKPDFEQFGFSKHENCYLFRWLASSEKEEHRILFKTNPQLLGRVFYQLVQRRGFRKGDDDNETKLIEEGRPKKDSAGKVLKGEVEVVGIKVIDKLIKEKYKTLGSALYWGQKNNELESTNSNRIRNRFTYRDYFKNEVDFIFDNLEYDKQSAFCKIIRSAIIDQRPLRSQKGLVGYCTLDNPLKSKTGKYYKPGKKRIPLSHPLYEEYRMLCFINNLKIEAPENTDRMEFVNNYVIPLFNRATDFYLSEKKDKNGKITDKGLKNKIRDLGGKVLSNHDSSLTDEDEGVRFNANTFLYRLEKIFGGEWKELLRWDETLNGSEKTGNYLRAEDIWHLFYDGLLTKKQPEAFSEKIIPILEKHYPQITFDVSDFKAVNDFDKGYASLSASSIRKILPYLRQGFIYSQAVFVANLEKVFDRKLADSTLSDLIIDFIEINRKHKSDKEVYGIVNNLISDRLFYRDRLNLGDKYVLDNYDHKDIDEQIKNSYNTKEWNKKNEEQKMAFKKELASLYTSFLRKPLGANKAEYFCKFYRIEEQLKMLLLEKYGAEEKRIKNYLWHPSEQEKYAPANVKKDESGGVICNADGEEIYFLGDPNPISRGFKNPMAMKTLQHLKKLVNHLLLTSKIDSQTKIVVEIARELNDANRRKAIGKYQGERRRKRDEFRKLIEEYFGNSNSGSNSISDTLIDRVELWEEQKKECLYCAQPIDCTDVMNGTAELEHTIPAKLSNCSELYNLTLAHSTCNKSKAKRFPSQLENYDDVKRNVGFMYAKIKDKKNGLEIRYEETFAAARRASTKESKDSIIVNRHYIKMHLDYWRKKYETFMLTEVTSQFRRQQLTDTQIITKYSLPYLKTVFKRIDVQKGITTSKFRKIFQIESKVEDSKNRTTHSHHAVDAAVLTLIPSASIRDNILKEYNEAIDNNTLNSYKHPMPKNWEGFRQSMITSMKSEIIINYVAEDRILKETFKYKRKRGELVKNEDGIKIIQRGDTIRGKLHDESIFGMVKMPETVFIENKHRLKFENGKLLFQKNEKRGDDLFVVKKIKFTDIKSIEDFERIVIDPNLGFYLKIEIENRMKAQNKSFEEVIKQSFFAFGKLKDKNDRLIQPIRHLRCKIKSGGGGYVNSPAEITFVEKAFQSNKVYKQKTYALNGETPICAFYEWEIDGKLNRELIPYSILEISRRYHLDKNKELFEQKIYLTSGTGTNKIEYVKKLVAILKLKQHVIFYKESLDELRELWTSDAVAFAKRIYRIGKFEEGKVSMLYHLCSLKPENVAKEMKERNLPSTGASFVDFENPILSLRLSRQSLNMAIEGNHFEIEPDGEIVWLF

SEQ ID NO: 3717 - protein, 1382 aa, unidentified
  REGION 1..1382: note = Description of Unknown: Cas Enzyme sequence
MKRILGLDLGTTSIGWALVDESENDNEKSSIIKLGVRVNPLTVDEQQNFEKGKSITTNADRTLKRSMRRNLQRYKLRRENLIEILKGNGFISDETILSENGNRTTFETYHLRAKAAKEGISLEEFARVLLMINKKRGYKSSRKAKGQDEGQLIDGMEVAKRLYNENLTPGQLCLQLLQAGKKYLPDFYRSDLQIEFDKIWKKQQEFYPEILTKELKENLQGKNEKATWAICKEPFNIVGVARTTKGEELKKENFAWREKALSEKMDLESLAVVLQKVNSQINNSSGYLGAISDRSKELYFNKQTVGQYQMAILTENPNASLRNMVFYRQDYLDEFNMIWDKQAEYHKELSEELKNVIRDVIIFYQRKLKSQKGLISFCEFESRKIEVEIDGEKKTKTVGNRVIPRSSPLFQEFKIWQVLNNLEVSVKGRKAKKQKEVSLFAEQEDPLEVYGKRELYQEEKELLAIELSVKDKLTKSEILKLLLKNSQELDLNFREIQGNLTQSNLFDAYIKIIEHSTGEIIDKKKSAAEVIKNIEDTFKILKYNTDILHFNSDKTLDEQPMYKLWHLLYSFEGDNSVTGNEKLINQLSELYGFEKEYVSILANITFQNDYGSLSAKAIRKILPYLKEGNKYDVACEYAGYRHSKSSLNKDEIENKILKDKLDVLPKNSLRNPVVEKILNQMINVINTIIDTYGKPDEIRIELARELKKNSKERDELTKSIAATTRLHDEYKKILSQPPFKLNYISRNDIIRYKLYEELKDNGYHTLYSNTYISPGAVFSGDFDVEHIIPQSRLFDDSFSNKTLELRSINLEKGNKTAYDFINEKYGGNGLEEYLNRIEMLFKQGVISRGKYNKLKMQEKDIPENFINRDLGNTQYITKYAKTMLGDLVKRVVSTTGSITDALREDWQLIDVMKELNWDKYNALGLTYYEENRDGRQLKRIKDWTKRNDHRHHAMDALTVAFTKDAFIQLFNNMNASLTPNSNEFALKNLYVENGKVKPPMPLNEFRIEAKKHLENTLISIKAKNKVVTTNINKTKKKGGTSKKSQETPRGQLHNETIYGSQKKYVIKEEKIGTTFDEVKIMTVSKPTYREVLLKRLQENGNDPKKAFGGKNAPAKNPILINETEQIPEKVKTVIFETVYTIRKEISPDLKLDKIIDVGVRRILENRLNDFNNDPKKAFSNLDENPILNKNGKSIKRVTISGISNAEALHDKCDKDGKLILDGNDKTQAVDFVSTSNNHHVAVYRDADGNLQENVVSFFEAVTRKNLGQPIIDKEYKVSEGWEFLFSMKQNEYFVFPNEKTGFNPKEIDLLNPENYAKISPNLFRVQKFTIKDYFFRHHLETNVENSNELKSITWIRCGLSGIEHIIKVRINHIGQIVSVGEY

SEQ ID NO: 3718 - protein, 1380 aa, unidentified
  REGION 1..1380: note = Description of Unknown: Cas Enzyme sequence
MRNILGLDLGTTSIGWAFISEVEKGEVASSFIKRIGVRVNPLSTTERKDFEGGRPATINADRTRLRGTRRLLKRYKERRAHLVSVLIKNGLINNESLLAEKALGSTHATYKLRSQAVSSRVNTDELARILLMINKKRGYKSSRKIQGDDLGQAVDGMATAKKMLAENISPGELCKQLAERGSKETPEFYRSDLELELKLLWTFQSSFYLDVLTDALFNAIKGQNKTTTTKLFFTFSNITPAINSGKEKKDNEYSWRSTGLKMKLPVDQVAYIIIELNNYIASSSKLLSAISDRSKDLFFNNETVGQYLYKRLENDPNAPITNMAFYRQDYIEEFDAIWKTQSKYHPALTPKLKAEIQNNIIFYQRKLKSQKGLVGFCEFESKRIVTNNGGSSITKTTGARVTPRASPLFQEFKIHQALGNLILTNKTEKIKLELSDEHKSLLFNQLNIKGNLTKVQVLKLLNCESSWDLNFSSIEGNRTNQELYQAYFKMMELDGHDNINYKNMSAGEMKQAVKSFFTLHGINLAILEFNSEAEGSLVEQQPFYEFWHLLYSYETDDSISGYDHLYNLLQKKYGFKVEFSMILTGINLQSDYAELSAKAIKNILTYIKDNKYSEACQLAGYNHSSYLTKEQNLSRVLKPNLELLPKNSLRNPVVEKILNQLVNVINTIISDPALGKPDEIRIEIARELKKNREERKELSSQISKAKGAHDEISKLLINELGIKSPTRNDVIRYKLYDELKFNGYKDLYTNEYISREDLFSNKYNVDHIISQAQLFDDSFSNKTLISQKTNLDKRNRTAFDYISEQHGQDKLDEYIDRITALYKKGGISKAKYNKLQKKESEIGEGFIARDLRDTQYIAKKATAMLFEICRTVVTTTGSITARLREDWDLINVMQELSIDKYRALGLTQKIEKRDGSFKEVIIDWTKRNDHRHHAMDALTIAFTQHSHIQYLNNLNARGKADKKGREIYGIEQNITVIDDKGKRRFKAPMSNFRSESKKHLENVLVSIKAKNKISTINKNKTNNLSGGRITIQLTPRGALHEATVYRKIKVYRQWEEVVNAKFDESKILTVVKKEHREALMKRLQNHNMNPVAAFSGKNALLKTPIYLDDEKIDQIPKRIIIGEFEDDFIIKKDVNPDIVIDKIIDKGIQTLLRERLAEFKGQPKDAFSNLDMNPIWINKEKGIAVKSVRISNAKNAEAIHFKRNHSGDYLLDGFNKPIPTDYVRTGNNHHAAIYLDENGKWQDDVVSFYRVITARLKNNLSTVDDLLNQDIGWKFLFTIKQNEYFVFPSKGFDPLKIDLTNPANNKIISPNLFRVQKFSKPVPTWNSSGCYYFRHHLDTTVDEKPDLKDITFKRITSLIHLQGVVKVRINHIGEIVLVGE

SEQ ID NO: 3719 - protein, 1449 aa, unidentified
  REGION 1..1449: note = Description of Unknown: Cas Enzyme sequence
MSKKILGLDLGTNSIGWALIDQDFENKKGEILGMGSRIIPMGQELSKFEQGQAQTKNANRRISRGIRKLNKRYKQRRNKLIYTLQQVGMLPEQIKLSEPFEDPLKLDRISILPISKKQKQYTAVDLLELRVKALKEAVSIQELGKIIYLFNQLRGYAGGENEPEKEDDTDEDVDSSEKKETKSYVTFGKVISISDPEKISVKGKEINKYRITLETEDEIIEGDSFLEILKIGDSLELFVNVTVSKKHGETIFFKLPNKTSWRKKMENLEKELAELSKERGAEIYLSEYFLSILKENKWAKIRNNVILRSRYQAEFDAIWKEQCKHHPYLNNLPNETLLEILNFIFPGSKDTQIKYRKAGLEKGLMHVIRNQIIYYQRELKDQSNLISDCRYEKGEKAIAKSHPVFQEFKIWEQINKLTINTKIEYGKNRKGQLQYKYVDRPIPSALKEWLFDELQEKKEIGFSSILTKLKKEYGLRDGIDFFNGMNPKAKLRGNETKLILKKTLGDHLWNELGLSNKKDQVELWDILYNSKGNEYDIESERTSKIIALLKKYSVTTENINQTAIHISKIKFTRSYSSLSLKAIEKILPLVRSGKYFDDIFSFQLKEKIIKLLNENVSDPFEKAAQEYLESNLEVLAEGGIINAYAVILAYDKHTAKEYGETERLDDYKKIQRLIPGELRNPLVEQLISEALMVVKDIWKQYGKPDEIRLELARELKNNADRRAKIYKLNNANQKANDEVKNLLIELKQETTLANIEKYKLWLSQENLGEEFVKQYKDPSKSEIEKMKLWREQGHVSPYTGQPIPLSDLFNRERYDIDHIIPQSRYFDDSFANKIICEKAVNKEKSNRTAMEYFEIGSYIPSVLSKEEFIDHVNKKFEGQKRKNLLATKVPDDPVARQIKETQYISVRVKEELNKIVGNKNVKTTTGGVTDYLRNQWGLTDKFKELLKSRYEKSQPLLAEIEYDNYAKAFAKRKKEYEEKNIPLIDIELSKEQFIQSFNNNFFQKKNNKLIIKGWSKRIDHRHHAIDALIIACTQPAHVKRLNDLNKELQQWLNEHKKEFLADFEGSPSELLDEILNLDEGKREIIFKQIQKFKTIDMPWFGFPESAEQEIQKIIVSQKPKDQLLIQPDKNKQLQIKIRGQLHEGTLYGKSQGLEAYRIPLLKFSGKQFATEKTIEKITNNYLKGVIKEHLKTFSYKKEEAFSAEGIIALNKTLAEKKREKEWKRNGKKKKVGETAFHTPISSVKIFYRDPLKIKKKKNEVDIEDTLQKLDRNRAFNENLYVKTGDNYLFAILEKDGKRIFDLITFFDAANFLKEEFNKAYDKKMLNKEIIFKKYFEEKNKASLLFTLKQGDPVYMTSKDEEVIIDDNSPFYESFWNDTDIRGHNIHYVTKYSGNEIYFINNRIAEPIVKGKEFGSQNAYQNIDGLSIKQHCIKLNIDRLGNVRPAIKFI

SEQ ID NO: 3720 - protein, 1569 aa, unidentified
  REGION 1..1569: note = Description of Unknown: Cas Enzyme sequence
MKMKKVLGLDVGTNSVGAALITLPKDYLDYGKEGTIEWMGSRIIPTDGDYLQKFESGAQAETKDAFRRGKRGSRRLKHRYKLRRTRLIKVFKSLGWINEDFPLDDSRKFKRNINENGYSLKISDYLPFSAETIAEFERELAIEGTKSKQGKSIVPEDWLVYYLRKKALEKRITIQELVRIIYVLNQRRGFKSSRKDLKENTTILTYAEFEKIKNNIDASMNDAKEYETQFVSITTVEKISKISAEKDKNGKYKFSVKVADKKVLDFEVQRKTAPEWEGKEFTFLITQKIKKGKLEQLQPKTPTENDWGLCTTALDEKINNYRTPGEYFYEQIKESYKAKRNFKARQYPVYRWRYQRELEAIWKKQCELNPELNKINTDKEVLARLAEILYPTQAKNNMPKLIEFENNDLLHIISNDIIYYQRELKSQKNSISECRYEKRKGIDGELYGLKCIPRSSPLFQEFRIWQDIHNIRILKKEEKIDGKIKLDIDVSKQCITDKVNEKLFELFNSKASVSEKEILTLIKECHEQNDIVIAKKDGEHSHRINLFRNRDTLKGNETLARYNSLFRKAGYDGTSILNDNDKLLRLWHIDYSITSSDEKLAEKWISSALSKLLPDIDNKNLAIEMFCKLPELKKEYGSFSACAIKKLLPVMRSGKYWNEDGLNSATKDRIEKIVHGEFDENIDNDTRKKIRKWELENRSLEKIEDFHGLPTWFAGYVVYGIHSEREISKINSVEDFSRFIQKAIPNNSLRNPIVEQVVREAMLLVRDVWKRYGDIDEIHIELGRNLKNNSDERKKIADAQKENFDEKQRIKNLLYELMNDGFDQYNIDEKIEHVNFEVNPNPESPADIDKFRIWRSLTNKTDIDWAKKVKEEKIPTEKEIKKYALWLSQNCRSPYTGKLIPLSKLFDINQYEIEHVIPRARMKNDSFNNLVISEWGVNKAKGKQLAANFIGSSNGKCKYGDQEYSLFSYQEYESYCKETFKFQRGKLKNLLATEVPDDFVERQLNDTRYIGRKLTELLAPVAKGENGIIFTGGSITAELRNNWGLNRIWKEIILPRFERLEEITGKKGEYIIHDHDEFGNPVIHFNVKENQKLNTKRIDHRHHALDALIIAATTREHIRYLNTLNAADTTEELSAIKRSLVKGKIRDFKLPWEHFTLHAKNKLEEIIVSFKTNNKIISQPKNKTAYFKKTEGKIKKEYKWQHSNPKWMAVRKSMFKEPQGIIHLKEVYEEKNILKAIEIQIDRMLVQNKPEMRITPYVYDQEARRIIKDLIERIGIPIQEKQTLMKEVKKHLSKNPLKDISGKDFESIKVAIFEEYAAKRVSLDKSFDHKKIDKIPYSKTGKSVLGRLLHEHLDSAEYKNDKGNADPSLAFSTEGLEVLAKKAGRPITKVTIYEKKDESSKFGKQYVEVDAGSNALFVMYENKITKERTDFRSIATHKAIEKIVKGDEIAEDKEGFEKTILSPGDLVYVPTKEEYETLKEGTKIENAIPWGNKKNALNRIYKVVSFSGKDLLCIKAEISDYIIPYNRKEKNKGEIGWDNKSATTMEGDVTIKDVCIKIKVNRIGILSIS

SEQ ID NO: 3721 - protein, 1444 aa, unidentified
  REGION 1..1444: note = Description of Unknown: Cas Enzyme sequence
VLENDDLSKSEIKQIGVRIIQYDNFDKVDKSGKVSESRNPEEDFASGRGLSPNAGRTQKRGARRTLDRYQDRRSNLIHALFTANVIGTETKLAEDGKNTTHTTYALRAKAVTKKIEKEELARVLLAINKKRGYKSSRKANNKDDGTAIDGMAIAKRLYEENLTPGQLTYQLLKEGKKTVPDFYRSDLQAEFNRVWDYQKQFYSEILSDKLKEELKGRGKTQTWAICRGPFEIVGIKRQTKGEELKIENYEWRGRAVFEKLDLEQLTIVLQEINGNLNNSSGYLGAISDRSKELFFNKETVGQYLYKQLQRNPHSKLKSQVFYRQDYMDEFEAIWNEQSKHHSELSDELKTEIRDIIIFYQRKLKSQKGLISFCEFESKEIEIEKNGQKAKKTIGLKVAPKSSLLFQEFKIWQRLNDVLIRKKGSKKRISKKLEVQSSLFEEYKGIFLLDLEAKNKLFEELNLKGNLSAAKIIELLGLKPADWELNFSMLEGNRTNAALYNAYLKILEIEGYSEDLLKLSGEDDINVAELKTSAIEIKDMVKSVFETLSINMSILDFDAELEGKAFEQQASYQLWHMLYAAEDDSKNYADEDKLIFGNENIGLKKLLCLKFGFKPEHAKILVNVTLSNDYGSLSSKAMRKIYPYIKENNYSTACEYAGYKHSASSLTKEEIANRPLKDKLELLKKNSLRNPVVEKILNQMVNVINTLVDKNSTKDENGNITGYFHFDEIRIELARDLKKNAKEREELTTSINAAKIEHDKIFKLLQTEFGVKNPTRNDIIRYKLYNELKNNGYKDLYTNTYIPQEILFSKQIDIDHIIPQAKLFDDSFSNKTVVFRKDNLDKGNKTAYDYIGSKYGKQALSEYQQRVDHLFEQGKKNKEEGIGKAKYQKLLKPESQIGDGFIERDLRDSQYIAKKARNMLYEICRVVTPTTGSVTNKLREDWDLINVMKELNLPKFRALGLTEMHERKFGQEIEVINDWSKRNDHRHHAMDALTVAFTKQSHIQYLNHLNARKDEKNKLHNHIIGIENKETDLVTDDNGSKKRKFKEPIQNFRQVAKEHLENVLVSHKAKNKVATKNKNHISGSDKPQVVLTPRGQLHKETVYGKYQYYESKEEKVNANFDLETIKKVANPTYKKLLLKRLTENDNDPKKAFTGKNAFVKNPIYLSDAKTEQLPEKVKLIWLEEDYSIRKDVTPENFKDEKNIEKVLDKAVKGILLKRLRDNNGDAKKAFSDLDKNPIWLNEAKGITIKRVTISGVKNAEFLHYKKDHFGNEILDKDGKSIPVNFVSTGNNHHVAIYQDEKGNLQERVVSLFDAVQLVNSGEPVITKDYNQSLGWQFLFTMKQNEYFVFPNETTGFNPKETDLLDPTNAKLISPNLFRVQTLSIVKYGNNTIRDFKFRHHLETLVEDKKQLHGITYQQIKSLPPLEHIIKVRLNHLGEIVKVGEY

SEQ ID NO: 3722 - protein, 1515 aa, unidentified
  REGION 1..1515: note = Description of Unknown: Cas Enzyme sequence
MKTILGLDLGTNSIGWALIQQHETERSGKVIAAGSRILPMSQDVMGKFDSGVSISQTAERTGFRGIRRLRERHLLRRERLHRVLYLLRFLPEHYAKQIDFKKRLGQFLPETEPKLPYIFNEETNKPDFIFKKSFEQMLNDFAKYQPQLLKDDKKIPYDWTIYYLRKKALTQKIEKEELAWLLLNFNQKRGYYQLRGEEEEENPDKMVEFFVLEAVDVTADEPQKGKAEIWYNVVLNNGWIYRRASKTPLFDWIGKTKEFIVTTDLNEDKTIKKDKDGKEKRSFKAVNSDEDWIAIKKSTEEKIDKSDKRVGEYIYDTLLQDPNQKIKGKLVRVIERKFYKAELEQILKAQQSFHDELKDNSLYQLCLQELYENNEAHRNTNSKKDFVNLFLNDIIFYQRPLKSKTSLISNCKFESRTYIKDGKKEIEPLKCIAKSHPLFQEFRLWQWLQNLRIYKCDEAEGTDVTSDFLATDEDWVNLFDWLNNRKEIDQKMFFSYKAFKLKKGDVEYRWNYVEDKSYPCNETRALILSRFKTASVSHDFLTRENEEALWHILYSVEDKIDIEKALRTFAGKKGLGNEFIESFRKIPPFKKEYGSYSAKAVKKLLPLMRRGKYWDAAEAAKDIELYRQNIRKVILTLKNKKDKESTTGDFGSKVNSKLLNKLESLLNPDVYSFEGLDHYLASYIVYGRHSEDGDAKNWKTPDKIKLIEQHSLRNPIVEQVINETLQVVRDIWKKHGKGEENFFSEIHIELGREMKNPADKRKKMTEQITENENTNMRIKLLLAELLNDGEVENVRPYSPMQQEILKLYEEGALNAENGNIPDFVSEVIKSKQPTTSQLVRYKLWLQQKYKSPYTGCIIPLNKLFTTEYEIEHIIPQSRYFDDSFSNKVICETEVNKDKDNCTAYEYIKNNHGKKIPLGYGKVSITVFEVEQYEDFVKNHFSKNRGKMQRLLMDEIPEIFIQRQLNDSRYISKVVKNLISNIVREEDEHEAISKNVVAITGAITSRMKQDWGLNNIWNDIITPRFERMNTLPGAGFFGEWTNKEGKRVFQTQVPIDKQKGFNKKRIDHRHHALDAIVIACITKEHVNYLNSINSERKNYGLVSRLREMEEIMIDGTLRKIPKDFKKPWDTFTQDTKSRLFNTVASFKQSLRVINKSVNHYQAWSKDNNGKLIKQLVKQTKGDSWAIRKPMHKDFVRGLVQLKFKKIVSLSAALDNWELITHKAFRKHIQELFSQNHDKKKILKIFKDTENKWNDLDVSRVEIFYWDKENVAIRVKVDDSFNSAKIETITDTGIQKIMLKHLNNYSKTIDGKIIEHPELAFGEDGLDQLNKNLVELNNGKQHKPIYKVRTYEPKGNKFNVGVVGNKKDKFVEAAKGTNLYFAIYVDEVGKRNYSTVPLNEVVELQKQGLLPVPEFNALGNKLLLYLSPNDLVYVPDAEEKAAFNSFEPASVDYTKIYKIVSFTGNRLYAIPCNVATSIVDKLEFTLLNKLEFSLEKVSIKDVCIKLKTDRLGYISLA

SEQ ID NO: 3723 - protein, 1468 aa, unidentified
  REGION 1..1468: note = Description of Unknown: Cas Enzyme sequence
MIMKNILGLDLGTNSIGWALIQRDFNQKEGHILGMGSRIIPMSQDIKDEFGKGNSISQTADRTKFRSVRRLRERHLLRRARLHRVLNILGFLPEHYASQIDFVKHPGKFLDEKEPKLAYDNKIFIFKKSFEEMLIDFHQYQPQLLEDGRKIPYDWTIYYLRKKALTKRIEKDELAWLILNFNQKRGYYQLRGEEEHENPNKITEFHSLKITDVIADENQKGKAETWYSLILENGWTYRRASKIPLYDWRDKQRDFIVTTDLNDDGSIKTDKEGQEKRSFRAPGEDDWTLIKKKTEQQVINAGKTVGTYIYGNLLQNPQQKIKGKLVRTIEREFYKDELKAILTAQQKFHPELNDRNLYVDCVRELYCHNEPHQNTLDKRDIVHLFIDDIIFYQRPLRSQKSSVGNCTLEFRKYKNDHGIDEMDYLKAIPKSHPLFQEFRLWQWIYNLSIYQKDDDVNVTDELIKNMETYQNLFDFLNNKKEIRQDILIKFLLEQSGLKGKELALTMARYRWNFVEDKIYPCNETGTQIRTRLAKVENIPEDFFTKETELKLWHIIYSVNDKTEYEKALKTFAATYNLHTASFVEHFKKFPVLQSEYGSFSEKAIKKLLPLIRLGKYWSWENIDWKTRARIEKILTGEFDENIQNRVREKAISLMQETDFQGLQLWLASYVVYGRHSEAVNLEKWNTAADVEKYLAGFRQHSLRNPIVEQVVTETLRVVKDIWSQYGQGAKDFFDEIHVELAREMKNTGEERKRLTSLTTDNENTNLRIKVLLSELFHGGDVENVRPYSPMQQEALKIFEDGVLNSDIKIDDDILKISKTAQPTSTELKRYKLWLEQKYRSPYTGEIIPLSRLFTADYEIEHIIPQSRFFDDSFSNKIICESAVNQLKDKQLGLEFIKNHSGTIVKLGLGKTARVLDVGGYSEFVKGNYAKSPGKRNKLLLEEIPDKMIERQLNDTRYISKFITSVLSNIVRSETNDDGFNSKNILYGNGKITSRLRQDWGMNDVWNELILSRFQRMNQVTNSNVFTAWNENNQKFLPVVPLEFSKGFQKKRIDHRHHALDALVIAASTSDHVNLLNNEHAKSNKRFDLNRKLRMFEKTAYKDPWTGERIEKEIPGIFMKPWTTFTAEAKNKLENTIISFKQNLRVINRTTNHIESYKDEYGELRLGKKGELLKGKFQQTKGDSWAIRKPMHKDFVYGKVDLKDIKVIGDKFITAIRKTLDATFDLKKIGTITDTGIQKILKNYLYSKENKPELAFSPEGIEDMNQHIESYNDGKKHQPIYKVRVFEIGSRFPLGETGNKKAKFVEAAKGTNLFFAVYQDDKGKRYYETIPLNIVIERQKQGYHSVPTSDDKGRELVFHLSPNDLVYVPVSEELENSLASLNVKQLNKEQRKRVYKVEKFSGVECYFVRHDIACLIKNYDAKTKVGELESQNKLQSTMTDDRLKITDVCIKLNVDRLGNINEALFAKDR

SEQ ID NO: 3724 - protein, 1495 aa, unidentified
  REGION 1..1495: note = Description of Unknown: Cas Enzyme sequence
MSKIFGLDLGTNSVGWALRNLDLTGNQIEKFGVLIFSKGVGIGKTGEYSYAADRTKKRSTRRLYQARKYRLWATLKHLIVEGYCPLNIEDLNRWRKYNKEEALKSNNSGRVYPVNNFAFDAWIKLDFDGNGKPDYTSPYQLRHELATIKLDLNKEENRFKLGRALYHIAQRRGFKSSRNGADDSKEKEVNDGETMDLQYSEKKKNKIIIELLERYPEAKTIGSLFSLLENDSVRIRENITQYAIRENYKDEIKYIFNLQELSFESNLYKSLIESGKNKNDGSIFFKRPLRSQKGLIGKCTLELNKYRAPISHPAFEIFRAWSFINNIKYKENNKQQQLPLAIREEIYQKLFFRKSKPYFPFSEIADFIKKEKKQNWQLNYSLKTTVTACPTLARLKDIFGDDYLNVKVEKTKAPKSDKNYYDIEDIWHVLFNYEDQEYVEEFAKEKLKLSEERVSEKEKSDVEKFTIAWNDLPVGYGMLSLNAINKINVFLQKGLIYTEAVLLANIPEILGPELWKENKGSLLKEIGNVITENRHQKTVLNIVNNLISKHRNLEAIEKFGCKNNNYLLVESDLKDIKNTIEETFGSNGWNEKLAEDQKNIFETVKDCYQAYFATQGIIRDNGSDERIVTIQSKGKNYYKTETGYYRLPKLIDTLGEFLLLNFRIDEKLLSKIYHPSEINIYPPAKEDEDGILKLGSPKTGSFKNPMAMRTLHVLRKLMNYMIETNQIDNETRIVVEVARELNDSNKRWAIEAWQRQREAENQEFAEVVKQLLGEDKNVIANASNADDINKLRLFYEQNDEQNLPPIIVQEESEKGKRKKSSTQKDEAVRWTGHGKKLIEKYRLWKEQGYLCLYTGKPIKLTDLFNENVIDFEHTVPRSQSFDNSLANLTVCYHDYNRTIKKNQIPTQLLNYDEEYDFGGSIGKCLAIKNRLKTWEEKVERIKQQIDFWKTKSKKASDKGWKDDAIRQRHLWQMELDYWQNKLNRFTITEITNGFKNSQKVDTQLISKYAFHYLKSYFDKVDVQKGSITAEFRKIYGLQTADKKKDRSKHSHHAKDAAVLTLIPVAAKRDAILEKYYEVQEKKTTFIPEPPFKGFKREFIFGIDEDVLINNISNNQSLTPAKRKVRKRGKEVFIEKEDGTKVQKWATGDIIRGQLHQDTFYGAIKPAQKGEKGNLLKDESGNFIQEDNVRYVLRVPFNADFVALEKIVDEGLKKQIKEYIQRVGSFKKAFEDGIYLKDKYGKPHGNKIRHIRVWASVSEPLKIKKQTNLSDKEYKQHYWAANGENFICAYYKNDGVDKKGNLKKDRELEIINLFEASKLKNSELINQNGKVIIYRKDKNNQVIIDENKNKQMPYAILKAGTKVIFYDESPEELTKNDGETEKEYNHRISYRLYKVVKFTGGRLTFQHHLEARNDKELEKSYPEKEIFKLDDKGKEVAYGGRGTSGFTEKVSDALKYNSYNKYEPFPKLLYSVNWLDFVVEGEHFSVNVDGTINFKH

SEQ ID NO: 3725 - protein, 1741 aa, unidentified
  REGION 1..1741: note = Description of Unknown: Cas Enzyme sequence
MKKVLGLDIGTTSIGYSIIEISDEKNKNSISDKLAISDINNDRIGIFEDAIGVRIINQDTDRFDRGLKLNDPKGSTLTPTANRRKFRGIRRMRNRYKLRRNKLYKLLSLLGLTPDESYFTHKKGKRGKDNDIGKALYGLRERAVREKITLSELARVLLHLNQLRGYSSDRFAKDEETKFDYYLTEVVELDWENRTAVFDKGSSEDVKYYQIKAKLRFVEPYIIIEDDEKTVLYEVEGYIFKKEIDFEVGKYITIKAPEFKQNKKGKVVLEEYYKITPTKPDATDWNYKYQTLHKDLSDWCKSGGTVGSYFYKNFYELSNSNLSRIRNNVVNREWYEKEFDAIWTLQYEFHKDFFEKIDVSNLVRGVFKDYSTVVNDVISKTGNKAQLQTLIKDKIIFFQRPWQQAKSKGRCEFEKIKVKREFAIKGTGTKELREEHIGRTVVPRSHPLFQDFKVWQQINNVRLIWNTADEKINLFENAELFEKLTGKTIEEVKELLFKKLQESKTLSWRTFVKEELGLDTFDEIEEKKKAKTTKKQGWDLETGEVMDEFFSVNFRKRKRDGTYDDTKLKGNTTKAELQNILKEKPAKWFEMLHDQNKKVTNLQLLWEIIYDITNSDVAKVASIINKHFELDEDICLTLAKVQFDDTGMANLSAKAIRNLLPLMSDRKNYSKTTKTKVDELISLNSSEINIDTDEKLSGLKDFVTDRKARIRLSKFTIENEFRYLNYWEAAAIVYGSHSSKGKAETKIMERVKNHSMNNPVVEKIVNETISIVNQLKGIYGFDEVRIELSRELRASADERLQMWEGMNNGAAKNEWAKKMLREIKQAMLEDDRDISQLDTEISGSNLDKIKIIEDVVKYQKPVEFKTKEKEYKLTEPSNAEVTKYLLWLEQNFKCPYTNQPIPLTDVFARGKVVEIEHILPKERYYSNAYANKVITWREVNQEKGSKTAYEFIVSRRNPVGTVKVGKRDIPLVLASQWEDHVKEMFPKSGKRNNLLRKEIPEDPIERTLKETQYINKKLKEKLGELVGSDKVWVTSGAITDMLREKWKLNDIWKELVKERYSSFKAPTGRKTFQLKSVSEQQEFLNELKKSNSLDEEFYGVKIKIGKKDFDFNSKEEILKIIDEVEPILNKNLTSGTTKIEPYKFSSSDESFEMKNLIYTTKHFNTKTNQYEDVEKYAGMSKRIDHRHHALDAIIIACTKQNHIQYINNLNAINSVDVENDDSKKAKYKSIKNDICIGNSSSKIKFPWDENKFIPEVKEALQNVLISHKNSNVLISPSKHRNNKDIKSGKVASVRGELHLQTNYTKKKYFENEKIDIVKLIPFVFKKKIDNLNQTLVHFKSFNEIIKETVLKEKYQNVLISLLEEYETETLNTQTVKDFAKKVLKRIEDEQLFIHEKTGEKMTWLSTFIEKNASVRPMGLSMDLNSEKEIKDISNPRLRRIGQYRLKYINKKIEEIKALKLSFKEEENTKIREVREIPLYNNAIYEVRVKQKDGKFNWLEIKDLENSDLENIDYAKPETTIAIKNKLKEFSLDKLKETYISNPIFLSGKPTLVKKARQKSFFQDLYELNDGRYVYSRDVFMSYIFVSENSDRKDAKREIEFLKFFDAVKIITLEKPDKIDYQKLIKKENYKLLFTLSKNDIVYIPDEALTDEQITEINWNEKREIIPKLFVVKEMTPSRNEIVFQHLYKSDSIRVNGDEAENILNTEKLEEEIKYGDTNMWKRCIKVDIDKLGRDIKPYWIK

SEQ ID NO: 3726 - protein, 1594 aa, unidentified
  REGION 1..1594: note = Description of Unknown: Cas Enzyme sequence
MKKVLGLDIGTNSIGAALINLPDKFEDYGNDGKVEWLGSRIIPLDGDYLQKFESGAQADTKAAFRRGKRGARRLKHRYKLRRTRMIKVCKVLGWLDENFPLDESRKFKKDVNENGYSFKISDYLPFSEKTIAEFEKELGIEGQKSKKKGSRKGGKSIVPEDWIIYYLRKKALTQIITIQELVRIIYMLNQRRGFKSSRKDLKTNVLPYNEFIERKNKNEFGEEGIETQFVSITKIKTVTFKEEKKDRKGNTTNLYTIAAEDPRLQTWEETRKKQPEWAGKEFTFLVTQKIDKNGKLTQNKPQMPKEDDWALCTTALSEKIEEKHQHPGEYFYEQIKEAYKAKRNFKARQYPVYRWRYEKELKAIWDKQCELNPELQKINADQSILITLAELLYPTQAKNNMPKLAEFKSHDLLHIISNDIIYYQRELKSQKNSISECRYEKRIGKEKNEQGEYIETGKYGLKCIPRSSPLFQEFRIWQDIHNIRVLEREVKELGKTKLDVDVTDHFIDEKIKEKLFELFNSKASINEKDILSLLKENRPDSNIKLDIDKKEKIHSHRISLYARRDELKGNENLARYRSLFKKAEFNGEAILSDKEQLTKLWHIDYSITSSDEAKSKKGITTALIKLLPNSPNKEKVIELFTKLSELKKEYGSYSACAIKKLLSVMRCGKYWNEHEIPDSAKQRAAQIKERLDDINHNIRRLNEIADDDVQIQVLKSFIGKEDLTKGLNTYQAGYLIYDKHSEKDKTPIHSVEEFGKYIQKEIPNNSLRNPVVEQVVRETMFLVRDILRKYGEIDEIHIELGRSLKNNAAEREKISKTQSDHFDEKQRIKKLLYELMNDGFSQYTEENEIEDVTFEVRPNPESPVDIDKFRIWRSLSKQSEFDWAKKVKDEKIPTEQEIKKYALWLSQNCRSPYTGRIIPLSKLFDTTQYEIEHIIPRSKMKNDSFNNLVIAEWGVNKAKDKQLAGNFIADSKGKCKHGNTEYKLFTYEKYDNYCNDTFKFQKSKRKNLLATEVPEDFVERQLNDTRYIGRKLSELLAPVTKNENGIVFTGGSITSELKKNWGLNKVWKELMKPRFERLEKITGNQYIVHDKDEHGNPVIHFNVKENEELDLKRIDHRHHALDALIIAATTREHIRYLNTLSAADTDEEIKNFKRTLVKGKIRDFKEPWKNFTKDAKDKLDETIVTFKTNNKIISSPKNRTAYLNMEDGKVKKEFKEQKPNKRWMAVRKSMFKEPQGIVYLKEVYEEKSIIKAIEIQIDRMLVQDTPAMKTQGYVYDKEARKIIKDLIERTGISIQDKKAILDELKKHLKKNPLKNYSGNEYKLIKVATFEEYAAKRVSLDKTFDHKKIDKIPYGDRAPSIGDKKFSIPQLLHQHLTENEDKPDLAFSAEGLEQLAKKAGRPITKVTRAEKKDESSKFGKRYVEVDAGSNVYFVMYEDQKTKERVGFESIATHKAIEKIVNGNPIAENKEGFETIILSPKDLVYVPTKDERKNIDEIDFENLSKEQIKRLFVVNDFSNTCYFTPIHLAKNITPKEVDLSFDSKKNKLSGSFDTKTASFEGEQIKDICIKLKVDRLGNIIHKKKLTIHFQEKKIKM

SEQ ID NO: 3727 - protein, 1464 aa, unidentified
  REGION 1..1464: note = Description of Unknown: Cas Enzyme sequence
MKNILGLDLGTNSIGWAIREIESDNENQITDSGVVIFQKGVGEGKSGEFSLAAERRSHRSKRRLYNAKRYRKWATLRVLIENQMCPLSIEELERWSKYKKEVGGRNYPASPDFFRWLAMDFDKIGIAFKAAEKLKPEFSNPYQLRKHLLENELEFNQKTKYQIGRAFYHLVQRRGFRTSRKSGKSNFGDNALFKRFRELHPDKKDWKPSQIYLYAQSKIDGSEDLRKDRIRNNAVIQRIENENEFYGICQKQNLEKSLTDKIYKAIYYVRPLRTQKGLVGKCTLEKGKTRIPVSHPLYEEFRALSYLNNIQWRETGSKKPFETIPIKLKKEIFEQLFFRKVERGENKGKVSTENTFKFSDIVDKFSDNHKYEFNYAKYQNDRFELKTNPNVSTCPVIAGLMNALGEEWKNKFIQDENRIGINWDNLSITYEVKYGKKKGKKRALRVDEIWHLLFDYLQTKDKEDDLKKFMTEVVGWDEPKAKAFSEISIHQGYGSLSKTAIYKILPYLRQGYIYSEAVVFANLKNVLGETFEKNKEAAIQAIHHTISEIDKEKEKLNIVNKLIQQYFGELETIKAKGLDAEIKQQGEKDVSEKVQHYFGESNWNDFPEVKRNEYYAFVLKKYLAFLDGKQQPHEKASSRQGKNPDIDYYRLPRLDEAIKDILKSKFGATDERLKKLYHPSDIEIYPPAREIEIVNELTGEIRKVKQLGDPMPPSKGWKNPMAMRTMHELKKLLNYLLVTGKIDEETKVVVEMVRELNDANKRWAIQTWQKRREEQNIEFAKAILGLAKEKYPNLNENDAANIDKVRLWWEQLENGDEIYKQVKALKEDVQKYRLWREQECRCMYTGKMINLVDLFDGTKTDFEHTLPIGESFDNSLTNRTVCDSEYNRKIKKDRIPYHCPNYENESNGYSPIKPRLKNWNEKVESLKERIENNKIETRKANQRGDIERKNYLIRERHLLQFEFDYWDKKVKTFTLKEVPNWWKNSQLVDTQIITKYARAYLKSLFRKVEVQKGTITAEFSKIYGIMGDEKKDRSKHSHHAIDAAVLTLIPGSARREAILKEYYQALERNEKYHQLPYETFNVTHVKNIENTVLINHISKDQTLAPTKKRARKRGRIVYLRDKKTKQYLRDEYGKKIPVIMQGDAIRGQLHKETFFGAIKAVERDENGYALKDKNGKYRVKQENGEDTIWIVARKPITMIDIDKDIIIDELLKQHIKKQLDSGKKLHQVVDFNGKIIRHLRCRVKAGRGVLSKDKALAIKKHAQPFLSKHAHKQEYLTQNEENYLLLLYEGLDKKNNLIREFRFLNLFDITQLSISDIDQIKREPEFQTLKKGGKNAIELNLKAILKAGDKVIFYKTNKEEITDENANDRLYKVYKFNETSIPYAYCQFHLEARPDNELGDGDPSFNPQKYQARLRLRANEFNCLIEGINFEVSPDGKLIWKSALNQAIPAGIKIKTGQLSGKQT

SEQ ID NO: 3728 - protein, 1466 aa, unidentified
  REGION 1..1466: note = Description of Unknown: Cas Enzyme sequence
MATKKIIGLDLGSSSIGWTIRNEDDTFKSGVVTFDSGMVKGTTGGYISPTKVRREARSRRRLLQARRYRKWALLEVLIENKMTPLTPAELAQWSKYKKGQPQKFPENETFKKWLACDFTYLQNGKKFKNPYELRVAATDNKVIPHEFGRALYHLVQRRGYKNIGESDLEELNIEDASNDAETKKQLERRKKEGFAAALQKHNGIISKSLKYEFLDKGKRARNEYPLRKEYSLELEAICKTQGHSTTRDNFGKYQDKFVQKIWKAIIWQRPLRSQKGNIGRCTLEPSKPRCPSSHPLFEIFRAWQLINTIKYENKSGQWEFLPQDIRNKLYEDFFLKNDRNIKFERIKIFLDKQFSKNKKYNYKDDHSVSTMPVCKGLIDIFGNEVKQQILNLEKYIIGGSHYKDDSSRKVPKIIKEKYSVFDLWHSLYSFDEVYLKTFAKEKLDVADKTTLKGRVNNPFVELKKILVSSFSDLSVKAISKIIPFLKEGHLYNEAVLLAKMPELMGKDWEEKKTLVIRCINEANKQYAYHKMITTIANKLIDTWKGMPYHEKFAYKDFNYTLQKSDIKDILEACQKHFGEITWIEKENEEKNIILKDVRKLYQEFFKDQKREYRKTPTLDELMKHKFSHAGIVLNGELYHHASHENRYLKNIGTKADGTPKLPIDKKSGIEILPVPLIDSIKNPMFNKALFVLRKLVNHLIIQKEIDNETEIVIEVARELNDINLRNAIERYQRERENSRKIYKKFLEEFKTRENLTFNVDENIPQFELWTDQLFNEGKTGEERLTRHNIMKEKDAVKRYELWMEQKGQCMYTGKLISVTQLFSNEIDIEHTIPRSLLPDNTLANQTVCYARYNRDKKKNQLPTQCENFSKDVEGWGSAIEPRLRNWEEIRKHYEEQYEKNKRPRPGEDEDNKNKRIQNKHYYKMHLDYWTDKIERFTCTEIKESWVRRQLTDTQMISKYAREFLSTYFKQVKVQKGSVTANFRKIYGFQEEDEIKSRNLHTHHAIDAAVLTLIPTNSSYRERLLKTMYEWQEQKRGQFTTVPFNGFNAQTLINQIESTVLVVNYQKDNLLKETRKKVRNRGRLVYVKDREGRFVLDASGNRIVKWAKGDSVRSPLYKETFLAKLKNVERDENDKPIRNGDKSWQFKRGDEEFFYAIRVSIDEAKKYIDDIIDPVIRDLVRNQKNKPTVLDYNNKPIRHVRIITSAGRKVKQRFNHQSKYDYKNYYYAASGSLPYAALLEKAVNGKPERKLIPISSAEIVKHAKKHKRFEITQFIEENYPEHANYPGKKLLKVGQKAIVLENEKEYELKDNKEFQLKRLYVISQFHYTGSKILFNYHLESRAKGDIDKSVKELKSNILIPIERHFAIPEILPDDTIANATDRNKDFEKRLYDFNTRLKRIESFDKAKANSLKVKIEEIKTESSKCNDMSPVPILGRSANGWNFLLEGEDFEITLSGEYKWIMQKFHT

SEQ ID NO: 3729 - protein, 1466 aa, unidentified
  REGION 1..1466: note = Description of Unknown: Cas Enzyme sequence
MAKKILGLDLGTNSIGWSLIEQEVEKGEGKILGLGSRIIPMDEAKKNDFGKGASISQTADRTGYRSARRLRERHLLRRERLHRVLNVLGFLPKHYAAEIDFEKKLGKFLIDKEPKIAWKRNEDGQFEFVFQNSFAEMAKEFEGKKIPYDWTLYYLRKKALERKIEKEELAWLLLNFNQKRGYYQLRGEEAEENENKLVEFYSLKVINVSKDEQKGKKDESWYSLELENGWVYRRSSKTPLFDWKDKVRDFIVTTELNSDKTIKKDKDGIEKRSFRAPGEDDWTLLKKKTEQDIENSNKTVGEYIYVSLLKNQNQKIKGKLVRTVERKFYKKELREILKKQIELQPELFASDKYNNCIRELYRNNESHQITLGKRDFVHLFLDDIIFYQRPLRSQKHSIANCGLEYREFKINGETKKEYLKTIPKSNPLYQEFRIWQWIKNLSIYDKIDDKNVTANFVDSIEGNEKLFEFLNSRKKIDQKSLLKYLIDQKLPKLKSKELNAEIEKYRWNFVEDKEYPCNETRNVIASRLEKVSNISSNFLTQDIEQHLWHIIYSITDKIDYEKALKSFAKKHNLDQASFVENFKKIPPFDSEYGAYSEKAIKKLLPLLRIGKYWSWEKIDSKTKERIEKMLTGEFDDFIKTQVREKAIHLTKENQFQGLPLWLASYIIYDRHSEAESISQWKSVNELEHYLKEFKQHSLRNPIVEQVITETLRVVKDIWKKYGNGTQGFFDEIHIELGREMKQTAEQRKSDTYKITENENTNLRIKALIMELRENSDNKLVVDNVRPYSPTQQEALKIYEDGVLNSNIEIPEDILKISKSAQPTKNELTRYKLWLEQKYRSPYTGESIPLSKLFTSDYEIEHIIPQSRYFDDSFNNKVICESVVNKQKDNQLGLEFIKHHSGEILTSNFGKKIKILTEEEYVSFVKEHYSKNHRKRNNLLLEDIPDKMIERQLNDTRYISKFIMSLLSNIVRENINDDGINSKNIIPCNGKITSQLKQDWGLNDVWNELILPRFERLNTLTNSQSFTSKNSNGKIIPVVPFELSKGFQKKRIDHRHHALDALVIACTTRDHVNLLNNQSAKSDTKRYDLQHKLRNKEKWLDNNYKERDKFTTFKKPWINFTEEAKNRLEKVVVSFKQNLRVINKATNFYEKIQDGKKIKVAQKGVNWAIRKQMHEATVSGIVNLPWVKLGKGEITTATRERNDLVSIFKDITTKEKAESKIKKITDTGIQKILLNYLDSKGNKPEAAFSPEGIEELNNDIAKFNKGKFHQPIFKVRLYEKGSGRFKLGVKGNNKDKYVQGAPNLFFGIYLDLGGNRSFETISLDKVVERQKQKLSPVPEKKVIEVKKKNEKEIHELKLENYLSPDDCIYIPTDDEKENIHDIDFNNLTNEQLNKIFFVNDFSGTTCYFRPNRIAKAIAPKEIDMNFEEEKNKLMGSFDTKTASFEGKQIKDRCIKLKVNRLGDISLA

SEQ ID NO: 3730 - protein, 1302 aa, unidentified
  REGION 1..1302: note = Description of Unknown: Cas Enzyme sequence
MKKILGLDLGTNSIGWALVSENENKKEIIGMGSRIIPLSSDDKTEFSSGNTISKNQKRTEKRGQRRGYDRYQLRREALTAELKKNNMLPDENLIKLKPLELWGLREKAVNEQITLNEFGRVLYHLNQKRGYKSSRSDANLDKKDTDYVKEVKGRFEDINEQGITIGQKFYAELQKNEYYRIKQQVFPREAYIKEFEKICEQQQIYYPYIITNEFVRHLKDDVIYYQRKLKSQKGLVSICEFEGFYTKTKEGKEIFAGPKVAPKSSPLFQVCKIWETINTITLKNKKGEIFFISIEKKNEIFEYLDNNEKLTQVRLFEILELDKNDGWSGNKQTAKGLQGNITKALILNAIKSSKFDEQHIQFNLTVDDLDKECYLVDRKTGEILETKVKKTIKPNIEELPLYKLWHTIYSISDDLDCVNTLIEKFKINKETAENLAKIDFVKFGFGNKSVKSMRKILPYLMDGYVYSDACSFAGYNHSNSITNDENLKRKLLNAIPNLSKNSLRQPVVEKILNQTINLVNEIIDEKRGWITRQERLNNKFEIRVELSRELKQSKDERNDTSIAMEANKKINEEVTNRLKGLNIRTSKRNIEKYKFIFPIRTLYNKDGRFDKKSFENAQAFKQCIYCGESFSITEAINGDNFDVDHIIPKSLLFDDSQTNRVLVHRKCNADDKKNKTAYDFIRAKGDEELNKYLERLENWYKKGILSYSKLERLKVSNEDYVDRKRKGKETDSDKKLWENFTERQLRETQYISRKSKEILEQVCYNVWSTSGSVTEHLRRIWGWDDVLMNLQLSKYRDLSDMIYTDEWETNDGQIHKKEKIKNWSKRDDHRHHAIDALAIACTQQGFVQRINTLSSQQNRDEMYAEIEKQGKEFKEKLNLLDKYLILQKPFTTNQIEKNASEILVSFKAGKRVATIGKRKVKKNGKKEVVQTGIIIPRGQLSEESVYGKVKTIATDLKTNKIIKYTPKYLFENSHLIFNPKIKELVEKRLTRFENDSKKAISSLKNEPIYLDENKTIVLQYGTCFRDEIVIKYPLGTGQGMLFNGKENELTANKVLESIVDKGVRDKIKARIFINGTFIGTKEAFKDLEKNPVLHNDEKRIPIKSVRCLTGLSAVASIKKDENGKEIGFVKPGNNHHIAIYIDENGKKQEHSCSFWHAVERKKYGIPVIIKNPKDIWDKILLNKNEYPNSFLEKIPNDKWLFNMSLQQNEMFILEMKDDDFEKAIKENDKKTINQYLYLVWSIAENDYWFRHHLETKNSELKKIEGAVQSKRYYRKSLVALEKLNPKKIRINNLGEITSIGEY

SEQ ID NO: 3731 - protein, 1506 aa, unidentified
  REGION 1..1506: note = Description of Unknown: Cas Enzyme sequence
MKVVVGIDVGTNSIGWAILINDEKGVCFIDQAGSRIIPMDATVLGNFDKGNSTSQTSERTRFRIIRRLYERCILRRERLHRVLNILGFLPEHYARQIDFVHNSGKFIKGTEPKLAWTKDPMGNSVFLFQESFHEMLADFARHHPSFLSNGRKVPYDWTLYYLRKKALTQSISKEELAWILLNFNQKRGYYQLRGAEEVEEKNKQIEYRSLKVIKVEATEDKKGKGIWYNIYLENGWLYRRSSSVSLKSWEGMTKDFIVTTELNDDGSPKMDKQGAVKRSFRAPNEDDWMLLKVKTENDINASHKTIGEYIYDTLLERPQQKIRGKLVRTVERKFYKDELRRILEVQATFHPELQDRALLVQCIQELYPHNEGHRNLITGRDFIHLFIDDILFYQRPLKSKKSLVGNCPYESHKGIDKEIGEIKEYGVKCIAKSHPLYQEFRLWQFLSYLRIYQKEKYVDGKLKTDVDVTNEFITSEEEMAALFEWLNERKNIDQKSFLKYPPFGLKKNAQNEYRWNYVEDKTYPCNETHAAISTRLAMANISVRLSPQVEEHLWHLLYSISDKEGLRKALTTFANKQQWETDSFVESFIKMPPFEKDYGAYSAKAIKKLLPLMRLGKYWLEEAIDTNTRMRIEKLIHGEADESIGQRTREKTIHLKTPEQFKGLPPWLACYIVYDRHSEAQEITRWESPADIDRYLNNFHQHSLHNPIVEQIVLETLRVVRDIWKKTGQIDEIHIELGRNMKETASKRAQQTARTIENENTNLRIKALLAEFVNSEFGIENVRPHSLSQQNLLRIYEEAVLQENADQLPDDITDFLKKLRENKQPTRNEFIRYKCWLEQKYCSPYTGEIIPLSKLFTPAYEIEHIIPKARFFDDSFSNKVICEAAVNKLKDKQLGYEFIKNHHGQRVETGFGGTVQVFTEEAYDAFVKDHYRNNRTKMKKLLMEDIPDKFIERQLNDSRYISTIVKCLLSNIVREKDGQGDLEQEAISKNVIVCTGGITDRLKKDWGLNDVWNDLVAPRFERLNRLSGKTCFGHWEQTEGKRFFRTELPLEYQRGFSKKRIDHRHHAMDAIVIACATRNHINYLNNESARKDAKIFRGDLQRLLCDKRGTDDKGNYNWIIRKPWKTFTQDVRQTLENIIISFKQNLRVINKCTNHYTHYDANGEKIVDKQRKGDSWAIRKPLHKDTVFGRVNLRKVREVRLSLALEMPQMIVDKKLKTKILQLIAYKYDKKRIERYFKENTFDWKGYNLSKIPVYYYTDTIEPLVASRKPLDISFTEKKIRESVTDTGIQKILFAHLADKNNKAELAFSPEGIEEMNRNLLLLNSGKPHQPIYKVRVYEPLGNKFLVGESGNKTSKYVEAAKGTNLFFAIYTTADGKRTYATLPLHIVIEREKQGLKPVPEQDEAGNQLLFWLSPNDLVYLPTPEEIETGRIGEIDKRRIYKMVSSTGNQCFFIPASVSNGIIQTLELGANNKAEKSWEGEMIKSICLPLKVDRLGNIIQVGKPTL

SEQ ID NO: 3732 - protein, 1427 aa, unidentified
  REGION 1..1427: note = Description of Unknown: Cas Enzyme sequence
  MOD_RES 422..425: note = Any amino acid
MKRILGLDLGTNSIGWALVNEAETDEEVSSIIRLGVRVNPLTVDETQNFEKGKSITTNAERTLKRSMRRNLQRYKLRRDALVEFLKELGFITDETILSEQGNRTTFETCRLRAKAAEEEISLEELSRVLLMINKKRGYKSSRKVKKEEDGVLIDGMEIAKKLYEEDLTPGQLCSQLLESGKKVLPDFYRSDLQEELDRIWSVQKQFHPDVFCDAAKEEIKGKNRSQTWAILANYFVWKEEVVGWNDREAKNETIEKECKLVGLKRTTKGYELKKENYRWRAQALTEQLGLEEIAVVLQEINGQINASSGYLGAISDRSKVLYFNHQTVGQYQMAELDKNPHASLRNMVFYRQDYLDEFDRIWEKQAEFHKELTAELKKEIRDMIIFYQRRLKSQKGLISFCEFERLEIVVEKDGKKQTKVIXXXXCKVIPRSHPLFQEFKVWQTLNDIKVLGREKKRNALSASESRALYPEEKEILARELAIKENMKKADVLKLLFENPQELDLNFKQIDGNRTGFSLFSAYSKMIEKYGYEPLDFKKPADEIIGQLRTIFTDLGWNTNLFTIDLTKEGKELEMQPYFRLWHLLYSFEGDNTSTGNGKLIEKIMQLCGVEKEYAVELASLSFQDDYGSLSAKAIKRILPYLKEGNLYDVACEYAGYRHSKSSLTKEEIENKVLKGKLEVLPKNSLRNPVVEKILSQMVNVINTIIDTYGKPDEIRVELARELKKSAKEREELTKAIAKSTREHEEIRKLLQDEFGMMNVSRNDIIRYKLYEELKDNGYKTLYSNQYIPKEKIFSKEIDIEHIIPQSRLFDDSLSNKTLEYKAINIEKGNKTAYDFVKEKYGEEGLQQYINRCESLFNDKKAKLRKLKMEQKDIPDGFIDRDLRNTQYIAKKALAMLNEICRRVVATTGSITDQLREDWQLVDVMKELNLPKYEALGFVETYEDKDGRKIKRIKDWTKRNDHRHHAMDALTVAFTKDAFIQYFNNKNAAQDSGNRNHTNIIGIKTRYFDKGRALPPIPLEQFRIEAKQHLEKLLVSIKAKNKVVTVNVNRTKKRKGENTKIQQTPRGQLHLETVYGSHKQYVTKIEKVNASFDAAKIATVSKRAYRNALLKRLETFGNDPKKAFTGKNALEKNPLYADKYQTIRVPEKVQTVEFETIYTIRKPVDPALNVDKVVDVKVRAILERRLKEYGGDPKKAFVNFWENPIWLNKEKGISIKRVSIRGINNAQSIHVKKDKNGNPIWDENGKQIPVDFVNTGNNHHVAIYRKPVLDKKGQVTFDEDGNLMYELDEVVVPFFEAVTRANLGLPIIDKDYRKSEGWQFLFSMKQNEYFVFPNEKTGFNPKEVDLLNPDNYAMISPNLFRVQTMSKVMYGNNVVRDYKFRHHLETTVKDMKELKDIAYKQYKTLSFGNSVVKIRINHIGQIVSVGEY

SEQ ID NO: 3733 - protein, 1509 aa, unidentified
  REGION 1..1509: note = Description of Unknown: Cas Enzyme sequence
MKKTLGLDLGTNSIGWAVINSNIDSEGKEKLVGISSCGSRIIPMDAATLGDFGKGNTKSPVAERTRLRGIRRLLERSLLRRERLHRVLSVMGFLPEHYASQLDRYGKFLPETEPKLAWYKDDSGRYQFLFQKSFHEMLEDFRQHQPELVAGEKKIPYDWTIYYLRKKALSQEITKEELAWILLNFNQKRGYYQLRGEEEQEENNKSVEYHALKVVSVEDSGERKGKDIWYNVTLENGWVYRRASNIPLDWTGKVKEFVVTTELDDAGNPKKDKEGNVKRSFRAPKEDDWGLLKTRTQAQIDESGKTVGTYIYESLLCMPNQKIRGKLVRTIERKYYKDELRQILVKQSEFHAALQDHNLLLSCIEELYPNNEAHRRLLSASSFIYFLIEDILFYQRPLKSQKGLIDNCPYESHIYKDKKDGSLHHVPLKCVSKSHPLFQEFRLWQFLSNLRIYQRERMTDGSLKLDVDVTREFLPSEEDYVKLFDWLNERKEISQKLLLAYRPFGLKKNEQANYRWNYVEDKSYPCNETRAEIKSRLSKAGVPEEFLTEEKEEALWHILYSISDKKELTKALGTFAAKNGLNESFVEVFAKIPPFESNYAAYSLKAIRKLLALMRMGKYWNEQAIDRQTRDRIEKILTGEYDETIRSRVREKAMLLTDISSFRGLPLWLACYIVYDRHSESKELVKWETPADIDHFLSKFKQNSLRNPIVEQVITESLRTVRDIWKQEGKIDEIHVELGREMKNPAKERARITAQVQENENTNLRIKALLAEFMNPEFEIENVHPYSPGQQEILRIYEDGVLSGIAEKDLPDDITAILKKFRENDVKKRPTTSEVLRYKLWLEQRYRSPYTGRVIPLGKLFTPAYEIEHVIPQSRYFDDSISNKVICESAVNKLKDNCLGYEFIKKHSGEMVELGNGETVPVFSVEEYERFVKESYFGNSKKMKKLLLEDIPDSFIERQLNDSRYISRVVTSLLSNLVCEEGEQDGLSKNVIVCTGGITDRLKKDWGVQEVWNRIILPRFLRLNEITGRTDFTSTSVNGHLLPALPLYLQKGFNKKRIDHRHHAMDAIVIACANRNIVNYLNNSSARKNSEISRYDLQRLLCEKVKTDANGNYKWILRKPWETFTQDVYAALTNIVVSFKQNLRVINRTTNYYQHYNEAGEKRMIPQTKGDRWAIRKPMHKDTVYGEVNLRKEKTLPLRDVVKNPSIVVDKSLKNKLYELLKSQYDLKAIAKYFETHQDVWADVNLKKIKVYYFTKETNERFFATRKSLDPSFDQKKIEEEVTDTGVQKILLHHLQQNNNDPDMAFSPDGIDRMNQNMTILNDGKWHQPIYKVRTYEKADKFAVGESGNKAKKFVEAAKGTNLFFAVYESVQEDEAIGKQVCKRTFATIPLNEVIKRKKQGLPAAPEDLNGNLPKFVLSPNDLVYLPTEEERNSSRIIQPLDRERIYKMVSSSGSQCFFIKVFVANSIWDKNEYSSLNKMERAITNEMIKEICVPIKIDRLGNVSLIQI

SEQ ID NO: 3734 - protein, 1432 aa, unidentified
  REGION 1..1432: note = Description of Unknown: Cas Enzyme sequence
MKRILGLDLGTSSIGWALVNESERAEEISSIVQLGVRVNPLTVDEMQNFEKGKSITTNADRTLKRSMRRNLQRYKLRRDVLIKLLKKVGFITDKTILSEQGNRTTFETYRLRAKATEEEISLEELARVLLMINKKRGYKSSRKAKGEEDGSLIDGMEIAKKLYDEDLTPGQLCLQLLESGKKTFPDFYRSDLQDEFDRIWNFQKQFNPQSYCDTAKEEIKGKNKSQTWAILAKYFTWTKEVSVWNENEAKTENQEKEYRLVGLKRMVKGEELKKENYRWRVQALTERLDLEEIAVVLQEINGQISASSGYLGAISDRSKVLYFNHQTVGQYQMAELNKNPNMSLRNMVFYRQDYLDEFNAIWEKQAEFHKELTPELKKEIRDIIIFYQRRLKSQKGLVSFCEFENREVFVEKDGKKQTKVIGCRVIPRSHPLFQEFKIWQTLNNIEVFVGEKRKKRKQTNVSSGLFDNTVDTLVTEGRRFLYQEEKEILAKELSCKKDLTKTEVLKLLFENPQELDMNFKQIDGNFTGFALFSAYSKMIEKYGYEPLDFKKPADEIIAQLKAVFMDLEWNTDLLSIDLDKEGKNLEMQPYFRLWHLLYSFEGDNTPTGNGKLIEKIMQLCRVEKEYAIELANISFQDDYGSLSAKAIKKILPYLKEGNQYDVACEYAGYRHSKSSLTKEEIENKALKDKLDILPKNSLRNPVVEKILNQMVNVINAVIDAYGRPDEIRVELARELKKSAKEREELTKAIAKKTREHDEIRKLLQSEFGMIHVSRNDIIRYKLYEELKENGYKTLYSNQYIPKEKLFSKEIDIEHIIPQARLFDDSLSNKTLEYRAINIEKGNKTAYDFVKDKYGEEGLQGYLNRCENICKDRKAKLRKLKMEQSDIPDGFIDRDLRNTQYIAKKALAMLNDICRRVVATTGSITDKLREDWQLVDVMKELNLTKYEALGLVEIFEDKDGRIIKRIKDWTKRNDHRHHAMDALTVAFTKDVFIQYFNNKNAAWESDCKEHMNIVGIKKRYFESGKAVPPMPLGQFRAEAKWHLENLLVSIKAKNKVVTTNVNCIRKKGGISKKHQQTPRGQLHLETIYGSHRQYVTKMEKVNASFDAAKIATVSRQNYRNALLKRLEAFGNDPKKAFTGKNSLEKNPIYLDRAQTMQMPDRVQIVELEMVYTIRKPIDPSLNVDKVVDTKVRAILEQRLKEYGGDAKKAFVNLDENPIWLNREKGISIKRVSIRGINNAQSLHMKKDKNGNPILDENGKQIPVDFVNTGNNHHVAIYRKPVLDKKGQVMFDEDGNLMYELDEVVVSFFEAVTRANLGLPIINKDYRRSEGWQFLFSMKQNEYFVFPNEKTGFNPMEIDLLDPNNYAVISPNLFRVQKIGSNDYTFRHHLETTILNSINELKFITWIRCGKSGIKDIIKVRINHIGQIVFVGEY

SEQ ID NO: 3735 - protein, 1429 aa, unidentified
  REGION 1..1429: note = Description of Unknown: Cas Enzyme sequence
MKKILGLDLGTGSIGWALVNEAENSDEVSSIIKLGVRVNPLTVDEMQNFEKGKSITTNADRTLKRSMRRNLQRYKLRRDALIELLKEVGFITDNTILSEQGNRTTFETYRLRAKVAEEEISLEELARVLLMINKKRGYKSSRKAKGEEDGALIDGMEVAKKLYDEDLTPGQLCLQLLESGKKFFPDFYRSDLQEEFDRIWNFQKQFNPESFCDAAKEEVKGKNKSQTWAILAKYFVETKKVNVWNEHDAQTETQEKEYKLVGLKRTVKGEDLKKENYRWRVQALTEQLDLEKTAIVLQEINGQISASSGYLGAISDRSKVLFFNRQTVGQYQMAELDKNPNMSLRNMVFYRQDYLDEFNVIWEKQAEFHKELTPELKKEIRDIIIFYQRRLKSQKGLISLCEFENREVVVEKEGKKQTTVIGCKVIPRSHPLFQEFKIWQTLNNIEVFVGGKKGKRKKSNALSDLLDDMGDALLTEGRRFLFQEEKEILAKELSIKKVLTKAEILKLLFENPQELDMNFKQVDGNQTGFVLFSAYSNMIEKYGYEPLDFKKPAEVLISQLKTIFTDLGWNTDLLFIDLDKENKEWEKQPYFRLWHLLYSFEGDNTPTGNGKLIEKIRQLCGVEKEYAIELANVSLQDDYGSLSAKAIKKILPYLKEGNQYDMACEYAGYRHSKSSLTKEEIEKKVLKDRLEILPKNSLRNPVVEKILNQMVNVINAVMEVYGRPDEIRVELARELKKSSKEREELTKAVAKNTREHEEIRKVLQSEFGMINVSRNDIIRYKLYEELKDNGYKTLYSNQYIPREKLFSKEIDIEHIIPQSRLFDDSLSNKTLEYKSINIEKGNKTAYDFVKEKYGEEGLQQYLNRCEIICKDKKTKLRKLKMEQNEIPDGFIDRDLRNTQYIAKKALSMLTEICRRVVATTGSITDKLREDWQLVDVMKELNLPKYEALGLVEVYEDKDGRKIKRIKDWTKRNDHRHHAMDALTVAFTKDAFIQYFNNKNAAWESNNKEHTSIIGIKTRYFDSGKAVPPMPLGQLRAEAKQHLESLLVSIKAKNKVVTTNVNCIKKKGGTYKKSQQTPRGQLHLETIYGSHKQYVMKIEKVNASFDAAKIATVSKQVYRNALLNRLEAFGNDPKKAFTGKNSLEKNPIYLDGTQAIQVPDRVQTVELETVYTIRKPVDPTLNVDKVVDKKIRLILEQRLKEYGGDAKKAFVNLDENPIWLNEEKGISIKRVSIRGISNAQALHDKKDKDGKLILDKTGKRIPVDFVNTGNNHHVAIYRKPILDKKGQVVFDEDGNPMYELDEMVVPFFEAVTRANLGIPIIDKDYNKSEGWQFLFSMKQNEYFVFPNEKTGFNPKEVDLLDPDNYAMISPNLFRVQKIGLNDYTFRHHLETTIQNDLKFITWIRCGKSGIKDIVKVRINHIGQIVSVGEY

SEQ ID NO: 3736 - protein, 1511 aa, unidentified
  REGION 1..1511: note = Description of Unknown: Cas Enzyme sequence
MKKVTLGLDLGTNSVGWSVINSIITKQSEKIWLEMAGSRIIPMDAAILGDFDRGNSTSQTAERTRLRGIRRLRERCLLRRERLHKVLHILEFLPEHYSEQISWDKHPGQFMNLTEPKLAWKRSETGKYEFIFQAAFNEMLADFAQHQPTLVANGKKVPYDWTIYYLRKKALTEKITQQELAWILLNFNQKRGYYQLRGEEEEEKSNKQVEYYALKVVCVEATDEKKGKDTWYNVHLENGWIYRRSSNVPLDWEGKIKEFIVTTDLNEDGTPKVDKQGEVKRSFRAPKEDDWTLIKKKTEADVADSRKTVGWYIYDILLQKPQQKIRGKLVRTIERKFYKEELKQILEKQSVFHTELQDRDLYKKCLECLYPQNDAHKRNIANRDFVYMFTEDILFYQRPLKSKKSLIDDCPYEKNEYVDKETGEIKHASLKCIAKSHPLFQEFRLWHFLSNIRIYQKERQQGDRLLTDVDVTSEFLNTEEDCVALFEWLNERKEIDQKNFLKYPQFNLKNKAVNYRWNYVEDKMYPCNETRYLIKSRLDKADVFSGDFILSAENEMALWHILYSVSDKVELEKALATFATKHALDKVAFVETFKKAPPFEKEYGAYSAKAIKKLLPLMRMGKYWSADAIDETTRERIDKIVTGEYDEKIHNKVREKSIHLQSVDDFRGLPLWLVCYVVYGRHSEVKDIAKWEMPSDIDAYLKAFKQHSLRNPIVEQIIVETLRVVRDIWKRVGTIDEIHVELGREMKNTAKDRAKMTMQVLENENANLRIKALLTEFVNPEYNIENVRPYSPSQQELLRIYEDGILNYVADIPEDIENFLKKLKDSKSPSKSEFMRYKLWLEQKYRSPYTGEIIPLAKLFTPAYEIEHIIPQSRFFDDSFSNKVICESEVNKLKDKYLGYEFIKEHHGRKVELNFGKVVTIFSVEAYEQFVKEHYSKSRAKMKKLLMDDIPEEFIKRQLNDSRYISKVIKTLLSNVVREKNKDGEYEQEAISKNVVVCTGSVTDRLKKDWGLNDVWNSIVSSRFERLNQLKDTQCFGHWECKDGKRFFQIELPLELQKGFSKKRIDHRHHAMDAIVIACASRNHINYLNNESARKDAEITRRDLQRLLCDKYKTDDNGNYKWMIKKPWDTFTQDVQAVLNDIVVSFKQNIRVINKSTNYYQSYDEKGKKTLLAQTKGDNWAIRKPMHKDTVFGRVNLRKVKEVRLSVALDTPEMIVDKKLKAKILQLFSYNYDKKRIEKYFKENTALWKDLNLTKIAIYYFTDNSSEPLVAVRKALDTSFTEKKIIESITDTGIQKILLKHLESKEGKADLAFSPDGIDEMNRNLEFLNNGKPHQPIYKVRVYEPRGNKYSVGETGQKSTKFVEAAKGTNLFFAVYAVGDGKRVYETIPLNIVIEREKQGYTPVPEKNEAGNKLLFWLSPNDLVYVPTEEELERGRIEEPIDRKRIYKVVSFTGNRLYGVPYAIANMIVDKVEYFSLNKVEITDSKESIKEKCIPLKVDRLGNIIKIGTLK

SEQ ID NO: 3737 - protein, 1509 aa, unidentified
  REGION 1..1509: note = Description of Unknown: Cas Enzyme sequence
MKKVTVGLDLGTNSVGWSVINSIITEQTERIWLEMAGSRIIPMDAAILGDFDRGNSTSQTAERTRFRGIRRLRERCLLRRERLHKVLHILKFLPDHYSEQINWNEFPGQFMNQTEPKLAWKKNETGKYDFIFQSAFNGMLADFAQQQPALVANGKKVPYDWTIYYLRKKALTEEISTEELAWILLNFNQKRGYYQLRGEEEEEKSNKQIEYYALKVIRVEATDEKKGKDIWYNVHLENGWIYRRSSNVPLDWEGKVKEFIVTTDLNDDGTPKVDKQGEVKRSFRAPQENDWTLIKKKTEADVADSHKTVGWYIYDTLLQKPQQKIRGKLVRTIERKFYKEELKQILEKQSVFHAELQNRDLYKACLECLYPQNDAHKRNIANRDFVYLLIEDILFYQRPLKSKKSLIDDCPYEKTEYVDRETGEVKHAPFKCIAKSHPLFQEFRLWNFLSNIRIYQKERQQGERLLTDVDVTCEFLHTEEDYIALFEWLNERKEIDQKNFLKYPSFGLKNKVVEYRWNYVEDKTYPCNETRYLIKSRLEKAHAFSGDFILSAENEAALWHILYSVSDKVELEKALATFAAKHALDRAAFVEAFKKVPPFEKEYGAYSAKAIKKLLPLMRMGKYWSANTIDEATKGRIDKIITGEYDEKIHNKVREKAINLHDVNDFKGLPLWLVCYVVYGRHSEVKDITKWETPSDIDAYLKAFKQHSLRNPIVEQIIVETLRVVRDIWKRVGTIDEIHVELGREMKNTAKDRQKMTMQILENENANLRIKTLLTEFMNPEYDIENVRPYSPSQQELLRIYEDGILNHVAEIPEDIENFLKKLKDSKSPSKSEFMRYKLWLEQKYRSPYTGEVIPLAKLFTPAYEIEHIIPQSRFFDDSFSNKVICESEVNKLKDKFLGYEFIKEHHGRKVELSFGKVVTIFSVEAYESFVKEHYSKSRAKMKKLLMDDIPEQFIERQLNDSRYISKVIKTLLSNVVRERDENGEYEPEAISKNVIVCTGSVTDRLKKDWGLNDVWNNIVSSRFERLNLLKDTQCFGHWECKDGKRFFQTELPLELQRGFSKKRIDHRHHAMDAIVIACASRNHINYLNNESARKDAKITRNDLQRLLCDKCKTDDSGNYKWILKKPWDTFTQDVQAVLTEIVVSFKQNLRVINRSTNYYWRYDEKGKKVLSAQTKGDKWAIRKPMHKDTVFGKVNLRKVKEVRLSVALDTPEKIVDKKLKAKVLQLLSYQYDKKRVEKYFKENIFLWKGMNLAKIAVYYFTNDSSEPLVAVRKTLDTSFTEKRIVESVTDTGIQKILLKHLESKEGKADLAFSPDGIDEMNRNLESLNNGKPHQPIYKVRVCEPLGNKYSVGETGQKSDKFVEAAKGTNLFFAIYAIEDGKRIYETVPLNVVIEREKQGYIPVPEKNEAGNELLFWLSPNDLVYVPTEEELERKRVEEPIDKKRIYKMVSCTGNEGHFVPFTIASPIVAVVELGSNNKAQRAWTNEMIKDVCVPLKIDRLGNIIKIGF

SEQ ID NO: 3738 - protein, 1507 aa, unidentified
  REGION 1..1507: note = Description of Unknown: Cas Enzyme sequence
MKRILGLDLGPNSVGWALVNSIVKEQTERIWIEMAGSRIIPMDAAVLGDFEKGNSISQTAERTRIRGMRRLRERQLLRRERLHKVLNILGFLPKHYRDEIDFNKHPGKFLANTEPKLPWVKNEQGKYTFLFLNSFEEMLQDFKEHQPSIVSDKKKVPYDWTIYYLRKKALTQKISKEELAWILLNFNQKRGYYQLRGEDEEENTGKQVGYYALKVVSVEATDEKKGKDIWYNVHLENGWVYRRSSNVPLDWEGQVKEFIVTTSINPDGTPQLDKSGEIKRSFRAPKEEDWMLIKKRTEMDIENSQKTVGCYIYDTLLQNPQQKIIGKLVKTIERKYYKEELRQILQKQCILHCELQDKNLYKQCVEALYPSNEAYRTNIVNRDFVYLLMEDILFYQRPLKSKKSLIDNCPYEEYEYVVDKHTGEVKKAHLKCIAKSHPLYQEFRLWQFLYNLRIYQKEKEINGTIHTDVDVTSEFLKIEDDYVTLFDWLNRREKIEQKTLLKYPAFNIKKDVDNFRWNYVEDKTYPCNETRSLILSCLNKANLSEDFLSYQKEEALWHILYSVNDKQEIVKALQTFARKNGLDGTFVDAFKKIRPFNKEYGAYSAKAIKKLLPLMRTGKHWNVESIDGKTKERIDKIITGEYDEKISNRVREKAIYLSDISCFKGLPLWLACYVVYGRHSEQKEITKWETPDDIDAYLSTFKQHSLRNPIVEQIIMETLRVVRDIWKKAGSIDEIHIELGREMKNPADKRKRMTAQILENENANLRIKALLTEFMNPEYEIEDVRPYSPNQQEKLRIYEDGALNAAEQVPEDIETILKKFKENKQPTRSEFLRYKLWLEQKYRSPYTGELIPLGKLFTEAYQIEHIIPQKRYFDDSFSNKVICESAVNSLKGAQLGYEFIKEHHGEKVETGFGKVVTIFSVTAYEQFIKEHYAKSKAKMKKLLMDDIPEQFIERQLNDSRYISKVIKGLLSNIVREKDESGEYEQEAISKNVLVCNGSVTDRLKKDWGMNDVWNNIVYPRFERLNTLIGKECFGHWENKNGKRIFQTEVPLEYQKGFSKKRIDHRHHAMDAIVIACATRNHINYLNNASASKNAQISRYDLQHLLCDKTKTDDKGNYKWVIKKPWDTFTQDTKGILDNIIVSIKQNLRVINKTTNIYQHFDTDGKRTFYKQTKGDSWAIRKPMHKDTVFGIVNLRKTKEVRLSIALDIPYLIVDKKVKKKVFQLLKYKYEKKRIEKYFKENACLWKELNVAKVPVYYFTESSSERMVAVRKTIDTSFNAKKIQESVTDTGIQKILLKHLEQKDDKADLAFSAEGIEEMNRNIIALNDGKKHQLIYKVRMYEPLGNKFNVGTTGNKGKKFVEAAKGTNLFFAIYRTEDGKRIYDTIPLNIVIEREKQGLLPVPDKDEKGNTLLFWLSPNDLVYLPTEEEREFDRINEPIDKKRIYKMVSSSGNQCFFIPVNIANAIVPILELGANNKAEKSWEGNMIKSICIPIKVDRLGNIIKIKKV

SEQ ID NO: 3739 - protein, 1499 aa, unidentified
  REGION 1..1499: note = Description of Unknown: Cas Enzyme sequence
MKHILGLDLGTNSIGWAVINSNFDEATQKEQLKGIEAAGSRIIPMDAAQLGDFNKGNSVSQTANRTQYRSTRRLYERKKLRRERLHRVLQLLGFLPSHYAGQLDRYGKFIANSEPKLAWEKGANNLSYFIFQESFQEMLKDFSQEDRCTKKVPYDWTLFYLRKKALTQKIEKEELAWILLNFNQKRGYYQLREEEAEKSTSKTRQYFDSQIVIDIVDTEETYKGLKIFTLTLANGEKGKWYGKNIPDWKGQKKEIIVSIDLDKNGNDKCDENGEPVRHFKIPTEKEWEEQWGLVKAKTEKDLNTSKKTVGTYIYDTLLRTPDQKIRGKLIRTIERKYYKDELYQILTTQEKFHPELRDGNLLQSCIEELYHNNEAHRNTISKYSMSKLLVEDVIFYQRPLKSKKSLISNCPYEEHTYVDKETGEIHTASVKCIAKSHPLFQEFRLWQFLSNLRIYQKEGILNGKFTTDIDVTNEFLKNADDYTNLFDWLNQKKEIKQDAFLRYPPFGLKKNVANYRWNYVEDKTYPCNETHSRILLYWEKAGIDQSILTTDIEEKLWHILYSISDKNELQKALKHFADKNKLEDKFADIFQQIPPFKKDYGSYSAKAIKKLLPLMRMGKYWHLESIDNATLTRIHQILNGEMDEATASRIKEKYIHLDNFSSFQGLPTWLACYIVYNRHSEIKDITKWKQPSDIDAYIQSFKQHSLHNPIVEQIIMETLRTVRDIWKQIGHIDEIHVELGREMKNPADKRKKLTRQIQENENTNLRIKALLTEFANPEFEIENVRPHSPSQQDLLRIYEEEVLNESAKNMPEDIVTILKKFNETDAKKRPSTSDVLRYKCWLEQKYRSPYTGAMIPLGKLFTPAYEIEHVIPKSRYFDDSFTNKVICETAVNKLKDNMLGYEFIKNHSGQIIELGFGQKIQIQTVEAYEQFVKEHYSYNPVKMKKLLMEDIPEQFIQRQLNDSRYISKFIKSLLSNIVREEGESEATSKNIIVCNGSITDRLKKDWGVNDVWNKIILPRFLRLNEITNSDHFTTTNTNNKIIPTMPLALQKGFNKKRIDHRHHTMDAIVIACANRNIVNYLNNESASKNAKISRMDLRQILCKKTEPDALGNYQWIINKPWETFTQDVYAVLANIIISFKQNLRIINKTTNHYFRYQNGKKVQCVQEKGDNWAIRKPMHRETFYGEINLRKVNTVSLKVALENPQRIVEKDLKKKIKELLQQGLSEKQIKKYFEENNDIWQDVNLKKIQFYSFTKERKERFFASRESIDTSFNQKKIEKQVSDTGIQQILLRHLRQNNNDPNLAFSPEGIEWMNKNIISLNNGKWHQPIYKVRIYKQATKFAIGQTGNKTTQFVEAAQNTNLFFAIYETEHNRSFASVPLNVVIERLKKGLPPTPEDSKGNPPKYVLSPNDLVYVPTKEEMENRHINQPIQKDRIYKMVSCTEGECHFIPYFVAKPIIQTIELGSNNKAQKSWQDEMIKETCIPIKTDRLGNIITLISL

SEQ ID NO: 3740 - protein, 1499 aa, unidentified
  REGION 1..1499: note = Description of Unknown: Cas Enzyme sequence
MKHILGLDLGTNSIGWAVINAITDENTQKEQLIGINAAGSRIIPMDAAQLGDFNKGNTVSQTANRTQYRSTRRLYERKKLRRERLHRVLQLLGFLPPHYAAQLDRYGKFITNSEPKLAWEKGANHLPHFIFQKSFQEMLKDFSQKDGSAKKVPYDWTLFYLRKKALTQKIEKEELAWILLNFNQKRGYHQLREEETEKNTSKTRQYFDSQTVTDIVDTGETYKGLKIFTLTLANGEKGKWYGKNIPDWKGQQKDIIVSIDLDKNGKDKCDESGEPIRHFKIPTEQEWEEQWGLVKAKTEKDLNTSGKTVGTYIYDTLLRTPDQKIRGKLIRTIERKYYKEELYQILTTQEKFYPELRDEKLLQACIEELYPNNEAHRNTISKYSMSKLLVEDVIFYQRPLKSKKSLISDCPYEEHTYVDKETGEIHTVSVKCIAKSHPLFQEFRLWQFLSNLRIYQKEGTINGKFTTDIDVTNEFLKNADDYMNLFDWLNQKKEIKQDTFLKYPAFGLKKNVANYRWNYVEDKTYPCNETHSRILLYWGKADIDQSLLTTDIEEKLWHILYSISDKDELQKALQHFADKNKLGDKFADIFQQIPPFKKDYGSYSAKAIKRLLPLMRMGKYWHPESIDNATLTRIHQILNGEMDEVTASRIKEKTIHLDNLSSFQGLPTWLACYIVYNRHSEIKDITKWQQPSDIDAYLQSFKQHSLHNPIVEQIIMETLRTVRDIWKQIGHIDEIHVELGREMKNPADKRKKLTQQIQENENTNLRIKALLTEFANPEFEIENVRPHSPSQQDLLRIYEEEVLNESAKNMPEDIATILKKFNETDAKKRPSTSDVLRYKCWLEQKYRSPYTGAMIPLGKLFTPAYEIEHVIPQSRYFDDSFTNKVICEAEVNKVKGNMLGYEFIKNHSKQIIELGFGQKVQIQTVEAYELFVKEHYSYNPVKMKKLLMEDIPEQFIQRQLNDSRYISKFIKSLLSNIVREEGESEATSKNIIVCTGGVTDRLKKDWGVNDVWNNIILPRFLRLNEITNSNHFTTTNTNNKIIPTMPLALQKGFNKKRIDHRHHAMDAIVIACANRNIVNYLNNESASKNAKISRLDLRQILCKKTKTDASGNYQWIINKPWETFTQDVYTVLANIIVSFKQNLRIINKTTNHYFRYQNGKKVQCIQETGDSWAIRKPMHKETVYGEVNLRRITTVSLKAALENPQRIVEKDLKKKIKELLQQGFNEKQIKKYFEENKDTWQDVNLKKIQFYSFTKEGKERFFASRELIDTSFNKKKIEEKVADTGIQQILLRHLEQNNNDPNQAFSAEGIEWMNKNIISLNNGKWHQPIYKVRTYEQAEKFTVGQTGNKSEKFVEAAKGTNLFFAIYETGHKRSFASVPLNVVIERLKKGLLPAPEDSKGNPPKYVLSPNDLVYVPTQEEIKYGHINQPIQKNRIYKMVSSSGNQCFFIKSSVANTIIDKYEYSPLNKMERAITGEMIKEICIPIKIDRLGNITSSINL

SEQ ID NO: 3741 - protein, 1508 aa, unidentified
  REGION 1..1508: note = Description of Unknown: Cas Enzyme sequence
MRTILGLDLGTNSIGWAVINSVIKEQTERIWIEMAGSRIIPMDAAILGDFDKGNSISQTAERTRFRGVRRLRERQLLRRERLHKVLKILGFLPEHYLKGIDFEKHTGKFLSGSEPKLPWVKDRWGKYSFLFQTAFNEMLADFAKHQPSLVFDGKKIPYDWTVYYLRKKALTEMISKEELAWILLNFNQKRGYYQLRGEEEEDNAGKSVEFYALKVLSVEATDEKKGRDIWYNVHLENGWVYRRSSNVPLDWEGRVKEFIVTTDLNPDGTPKLDKYGEVKRSFRAPKEDDWMLIKKRTEADITGTHKTIGSYIYDALLQEPQQKIIGKLVKTVERKFYKEELNFILQKQCAFHAELQDRDLYMRCIEALYPGNEVQRRNIANRDFIYLLIDDVLFYQRPLKTKKSLIANCPYEENEYVNRKTGEIKTAPLKCIAKSHPLFQEFRLWYFLSNIRVYQKEREVNGTLHLDVDVTTEFLKTEDDYVALFDWLNSRKEIDQKAFLRYPAFGLKKEINNYRWNYVEDKFYPCNETRHAILSRLEKAGIGIDFLSDEKETALWHILYSVSDKQEIEKALATFAVKNGLNESFVEVFKKFPPFKSEYGAYSAKAIKKLLPLMRCGKYWDMSLIDGTTKERIERIIAGECDESIGAKVREKAMNLSDISCFKRLPLWLACYVVYNRHSEDKEITKWESPADIDAYLAAFKQHSLRNPIVEQVITETLRVVRDIWKQVGKIDEIHIELGREMKNPADKRKRMTTQILENENANLRIKALLAEFVNPEYGVENVRPYSPSQQEILRIYEDAVLKGEEQIPEDIDVILKKFNTSKLPTKSEFLRYKLWLEQKYRSPYTGELIPLAKLFTAAYEIEHVIPQSRYFDDSFSNKVICESAVNKLKDNQLGYEFIKNHHGQKVEVGFGKTVEIFSVDSYERFVKEQYAKSGIKMKKLLMDDIPEQFIERQLNDSRYISKVVKGLLSNIVREKNDSGEYEPEAVSKNILVCTGSVTDRLKKDWGMNDVWNSIVSPRFERLNALTETQCFGHWENKDGKKVFQTAVPLEYQKGFSKKRIDHRHHAMDAIVIACATRNHVNYLNNESASRNAKISRYDLQRLLCDKSRGDGNGNYRWIIKKPWTTFTQDAREALSGIIVSLKQNLRIINKTTNIYQHFDANGTRVYEKQKIGDSWAIRKPMHKDTVFGAVNLRKVKVVRLSVALDTPSMIVDKRVKNKVLELLSYKYDKKKIEKYFKENAFLWKELDIAKVAVYYFTENTTEPLVAVRKSLDSTFNEKKIASVTDTGIQKILLNHLKSKEGKAELAFSAEGIEEMNRNLLQLNDGKGHQPIYKVRVYEPRGNKFKVGVLGNKGAKWVEAAKGTNLFFAIYITEDGNRTYETIPLNWVIEREKQGLVPVPDRNEKGDKLLFWLSPNDLVYLPTEEERDFGRINEPIDRGRIYKMVSSSGNQCFFIPQSISNAIISTKELGSNNKAEKSWDGEMIKNICIPVKVDRLGRIIEVKYRVNE

SEQ ID NO: 3742 - protein, 1499 aa, unidentified
  REGION 1..1499: note = Description of Unknown: Cas Enzyme sequence
MKHILGLDLGTNSIGWAVINATTDENTHKEQLIGINAAGSRIIPMDAAQLGDFNKGNTVSQTANRTQYRSTRRLHERKKLRRERLHRVLQLLGFLPPHYAAQLDRYGKFIANSEPKLAWVKNTNHLYHFIFQESFQEMLNDFTQADGSAKKIPYDWTLFYLRKKALTQKIKKEELAWILLNFNQKRGYHQLREEETEKPTSKTRLYFDSQTITDIVDTGETYKGLKIFTLTLANGEKGKWYGKNIPDWKGQKKDIIVSIDLDKNGNDKCDESGEPIRRFKIPTEQEWEEQWGLVKAKTEKDLNTSGKKVGTYIYDTLLQAPDQKIRGKLIRTIERKYYKEELYQILTTQEKFHPELQDKNLLQACIEELYPSNEAHRNTISKYSMSKLLVEDVIFYQRPLKSKKSLISDCPYEEHTYVDKETGEIHTVPVKCIAKSHPLFQEFRLWQFLSNLRIYQKEGTLNGKLTTDIDVTNEFLKNADDYVNLFDWLNQKKEIKQDAFFKYPAFGLKKNAANYRWNYVEDKTYPCNETHSRILFHWVKTDIDQSLLTIDLEEKLWHILYSISDKNELQKALQHFADKNKLGHKFVDTFQQIPPFKKDYGSYSAKAIKRLLPLMRMGKYWHPESIDNTTLTHIHQILNGEKDEVTASRIKGKAIHLDNLSSFQGLPTWLACYIVYNRHSEIKNITKWQQPSDIDAYLQSFKQHSLHNPIVEQIIMETLRTVRDIWKQIGHIDEIHVELGREMKNPADKRKKLTQQIQENENTNLRIKALLTEFVNPEFEIENVRPHSPSQQDLLRIYEEEVLNESAKNMPEDIATILKKFNETDAKKRPSTSDVLRYKCWLEQKYRSPYTGAMIPLGKLFTPAYEIEHIIPQSRYFDDSFTNKVICEAEVNKLKGNMLGYEFIKNNSGKIVELGFGQKVKIQTVEDYELFVKEHYSYNPVKMKKLLMEDIPEQFIQRQLNDSRYISKFIKSLLSNIVREEGESEATSKNIIVCTGGVTDRLKKDWGVNDVWNKIILPRFLRLNEITNSNLFTTTNTNNKIIPTMPLALQKGFNKKRIDHRHHAMDAIVIACANRNIVNYLSNESASKNAKISRLDLRQILCTRTKPDTFGNYQWIINKPWETFTQDVHTILENMIVSFKQNLRIINKTTNHYFRYQNGKKVQCVQETGDCWAIRKPMHKETVYGEINLRKITTVPLKSALENPQRIVEKDLKKKIKELLQQGLNEKQIKKYFEENKDTWQDVNLKKIQFYSFTKEGKERFFASRESLDTSFNNKKIEEKVADTGIQQILLHHLEQNNNDPNQAFSPEGIEWMNKNIISLNNGKWHQPIYKVRTYEQAEKFTVGQTGNKSEKFVEAAKGTNLFFAIYETEHKRSFASVSLNVVIERLKKGLSLAPENSKGNLPKYVLSPNDLVYVPTQEEIKCGHINQPIQKDRIYKMVSCTEGECHFIPYFVANPIIQTIELGSNNKAQKSWQNEMIKEICIPIKIDRLGNITSSISL

SEQ ID NO: 3743 - protein, 1498 aa, unidentified
  REGION 1..1498: note = Description of Unknown: Cas Enzyme sequence
MKHILGLDLGTNSIGWAVINATTDENTQKEQLIGINAAGSRIIPMDAAQLGDFNKGNTVSQTANRTQYRNTRRLYERKKLRRERLHRVLQLLGFLPPLYAAQLDRYGKFIANSEPKLAWEKGANHLPHFIFQKSFQEMLKDFSQKDGSAKKVPYDWTLFYLRKKALTQKIEKEELAWILLNFNQKRGYYQLREEEAEKPAPKTRQYFDNQIITEIVDTGEIYKGLKIFILTLANGEKGKWFGKNMPDWKGQKKDIIVSIDLDKNGNDKCDENGELTRRFKIPTEKEWEEQWGLVKAKTEKELNVSGKKVGTYIYDTLLQAPDQKIRGKLIRTIERKYYKEELYQILTTQEKFHPELQDKNLLQACIEELYPSNEAHRNTISKYSMSKLLVEDVIFYQRPLKSKKSLISDCPYEEHTYVDKETGEIHTVPVKCIAKSHPLFQEFRLWQFLSNLRIYQKEGTLNGKFTTDIDVTNEFLKNADDYVNLFDWLNQKKEIKQDAFLKYPAFGLKKNVANYRWNYVEDKTYPCNETHSRILFYWGKAGIDQSLLTTDMEEKLWHILYSISDKEELRQALLHFADKNKLGNKFADVFQQIPPFKKDYGSYSAKALKKLLPLMRMGKYWHPESIDNATLTRIHQILNGEMDEATAHRIKEKTIHLDSLSSFQGLPSWLACYIVYNRHSEIKDITKWQQPSDIDAYLQSFKQHSLHNPIVEQIIMETLRTVRDIWKQIGHIDEIHVELGREMKNPADKRKRLTQQIQENENTNLRIKTLLTEFAKPEFEIENVRPHSPNQQDLLRIYEEEVLHEEAKNMPEDIATILKKFNETDAKKRPSTSDVLRYKCWLEQKYRSPYTGAMIPLGKLFTPAYEIEHIIPQSRYFDDSFTNKVICEAEVNKLKGNMLGYEFIKNNSGKIVELGFGQKVKIQTVEAYELFVKEHYSYNPVKMKKLLMEDIPEQFIQRQLNDSRYISKFIKSLLSNIVREEESEATSKNFIVCTGGVTDRLKKDWGINDIWNKIILPRFLRLNEITNSDHFTTTNTNNKIIPTMPLALQKGFNKKRIDHRHHAMDAIVIACANRNIVNYLNNESASKNAKISRLDLRQILCKKTKTDASGNYQWIINKPWETFTQDVYATLANIIVSFKQNLRIINKTTNHYFRYQNGKKVQCAQETGDSWAIRKPMHKETVYGEINLRKITTVSLKAALENPQRIVEKDLKKRIKELLQQGFNEKQIKKYFEENKDTWQDVNLKKIQFYSFTKEGKERFFASRESLDTSFNNKKIEEKVADTGIQQILLHHLEQNNNDPNQAFSPEGIEWMNKNIISLNNGKWHQPIYKVRTYEQAEKFTVGQTGNKSEKFVEAAKGTNLFFAIYETEHKRSFASVSLNVVIERLKKGLSPAPEDSKGNLPKYVLSPNDLVYVPTQEEIKCGHINQPIQKDRIYKMVSCTEGECHFIPYFVANPIIQTIELGSNNKAQKSWQNEMIKEICIPIKIDRLGNITSSISL

SEQ ID NO: 3744 - protein, 1561 aa, unidentified
  REGION 1..1561: note = Description of Unknown: Cas Enzyme sequence
MKKILGLDLGTNSIGWALIENNFENKTGKIINAGSRIIPMPQDKLGDFEKGNSVSQTADRTKYRGVRRLNERNLLRRERLHRVLNILGFLPEHYAKCIDFNKKLGQFYENTEPKLVYFKNEKTNKNNFLFKNSFEEMLQDFKEHQAELVKDNKKIPYDWTIYYLRKKSLTKKIEKEELAWLLLNFNQKRGYYQLRGEDDDENKNKLVEFYSLLVTDVIDSGDKKGQHEIWYNVHLENGWIYRRPSKTFLDWKGKTKEFIVTTDIDEKGNVKKDKDGKEKRSFRAPQEDDWTLLKKKTEFDIEQSNKTVGCYIYDTLLINPNQKIKGKLVRTIERKFYKEELKLILEKQKEFHAELKNIDLYNECVEELYENNESHQKSIENKDFVHLFLNDIIFYQRSLKSKKSLISNCRYESRTFIKDGKKEIEPIKCIAKSHPLFQEFRLWQFIQNLKIYQREKLIDGKLQTDVNITNELLQTDEDYTELFEFLNDRKDIDQKALLRYFKLKFETHRWNYVDDAEKKYPCNKTRNVILNKLDKNTKAILTQENEIKIWHLLYSINTKEEIDIALKENEKREHKITKENEVRKFKKTSMLNFLKENKFSLNEIEEIKKVRITEKDYGSYSAKAIKKLLPLMRMGKFWNEDAIGVEVKNRINSITQRLNSIDFDYKKIDNISDDDIPKQVLKSFIDCKNPLKGLNTYQACYAVYGRHSEDSKSDKWKTPSDIERFLKEDFKQHSLHNPIVEQVITETLRVVKDIWNYYGNGEENFFDEIHIELGREMKNPADVRKQMTNKVTENENTNSRIKALLAEMLNCNDVENVRPYSPSQQEILKIYEECVLNVEDNFSEEDEDILKISKNAQPTKSELKRYKLWLEQKYRSPYTGEIIPLNKLFTPAYEIEHIIPQSLYFDDSFSNKVICESEVNKDKTNSTAYAYIKNNSGKKIELSYGKEATIFKLEAFEDFVKNNYSKNRGKMKKLLMEDIPDKMIERQLNDTRYISKYVKNLLSNVVREENEQETTSKNVLSSNGTITTILKQDWGLNDVWNEIITPRFERLNELTKSNSFGEWTNKEGKQVFQTQVPIELQKGFTKKRIDHRHHAMDALVIASASRNHINYLNNEFAKADKKDIRHDLRTILCFKKYNSENKDNYKWIFKKPWETYTQEAKEILFSTLISFKQNHRVINKTINLYQKWEKDDKGNLKKVIKKQEKGENWAIRKSLHTPMPYGKKLYDFDILKIYENVSKREFIIDEGIKAKVNEIFEQNGNKITTAQKYIKENPLKDEEGNIILVTAFRIETEKFRKRQPISKLSNRGQGGIKTTADAIKFINKVADFNLQQDLLKHLKENNNNIDNAFSPDGIDKFNSKRKIPVYKLPIAESGDKRFSLGNKIGSKHKWVEAAEGTNLFFAIYKDEKGNHNYESIPLNIVIERLKQKLSPVPESKFDEETKKEYTLLFYLSPNDFVYVPTIEERENPKLIDFSNLTKEQINRVYKMVSSSGNQCFFIKNEVAISIYNKFEYSALNKMEKSVEGIMIKDCCIPLKLDRLGNIIEAEGKKINTKEHTMILSN

SEQ ID NO: 3745 - protein, 1373 aa, unidentified
  REGION 1..1373: note = Description of Unknown: Cas Enzyme sequence
MKKILGLDLGTNSIGWALVNEADNEREKSSIIKIGVRVNPLTVDEQQNFEKGKSITTNADRTLKRSMRRNLQRFKLRKENLIEILKKQKFINDETILSENGNKSTFETYNLRAKSATEEITLEQFARVLLMINKKRGYKSSRKAKSQDEGQLIDGMEIAKKLYNDNLTPGQFVFQILKEGKKYIPDFYRSDLQAEFDKIWSFQKQFNPDILTEEFNKQIIGKGKVNTTKIFLAKYGIYTIDNKGADKKSQAYNWRVEALTNQLTKEELAFVISDLNGIISNSSGYLGSISDRSKELYFNKQTVGQYLIAQLKENPHTQLKNQVFYRQDYLDEFNTIWETQAKFHKELTNELKEEIRDIIIFYQRKLKSQKGLISFCEFESKQIEINIDGKKKLKTVGSKVCPKSSPLFQVFKIWQILNNIQVIEKSTGKSKFLEQDEKEILFKELNFKDKISKTDALKILYKNYKELDFNFKENIEGNRTQATFLKAFQSIIELSGHEVSDFSKIKTDEILEIVTPIFEGFGFNTNLLQFNSNLKGKDFEKQAVYQLWHLLYSFEGDNSNTGNEKLIQKISELYGFEREYAIIIANISFQPDYGSLSTKAIRKILPHLKEGIEFSLACEYAGYRHSKNSLTKEEKNKKILKDKIDILPKNSLRNPVVEKILNQMINVVNATIETYGKPDEIRIELARELKKSAKEREDLTNAINKSTLDHEKYKALLQKEFGLSNVSRNDIIRYKLYLELEHNGFHTLYSNTYIEPNKLFSKEFDIEHIIPQSRLFDDSFSNKTIESRSANIEKGNETAFDYVSNKNGEVGLKDYLKNIEDLFNNGKISKTKYNKLKMKGDEIPSDFIARDLRDTQYISKKAKSILEDLVKDVVSTGGSITDRLREDWQLIDIMKELNWDKYDKLGLTEVIENNDGHKINRIKDWTKRNDHRHHAMDALTIAFTKRSYIQYLNNLNARSDKSGSIYGIEQKELYRDKNNKLRFKPPIPLDDFRAEAKKQLENTLVSIKAKNKVATININNTKKQGGENKKKQLTPRGQLHLETIYGSIQQYVTKEEKVGANFNKELIEKVANKKCREALLKRLIEFDNDPKKAFTRKNSLNKNPLYIDTIKTYKVPEKVKTVTTETIYTIRKDINPDLKIDKVVDKKIKNILELRLKEFNGDAKKAFSNLDEKPIWLNKEKGISIKRVTITGISNAIALHDKKDKEGNFILDNQGKKQAVDFVNTGNNHHVAIYKDEKGNLQENVITFYEAVERVNQGIPIIDKTYKQNEGWQFLFSMKQNEYFVFPNEKTGFNSNEIDLLNPENYHLISPNLFRVQKIATKDYFFRHHLETNVENITTTKDLTWKRLGINGIINILKVRINHIGQIVSVGEY

SEQ ID NO: 3746 - protein, 1408 aa, unidentified
  REGION 1..1408: note = Description of Unknown: Cas Enzyme sequence
MKRILGLDIGTTSIGWAYVNEAETEDEKSSIKKLGVRVIPITTDEETDFQKGKSVSVNADRTLKRGARRNLDRYQLRRKTLKKILRENNFITNNIIFSESGKQTTYSTYKQRTKAVHSKISKENFVRILLMINKKRGYKSSRKAKTQDEGEAIDGMEVAKNLYENNLTPGEYVYKLLLKGKKYIPDFYRSDLQNELNKTWSFQQQFYTEILTNKLKEEIKGKNKGATWKICEKPFNIKGISQKGTAQEKKIEKYKWRYIGIKKQLDLEQLAIVLQEINSQINNSSGYLGAISDRSKELFFNKITVGEYLYSQLEKNPHTRLKNQVFYRQDYLDEFEIIWEKQKEFYPEFTDKLKSEIRDIIIFYQRPLKSQKGLLGFCEFESWEEEYFDEKLGKKKTRRVGHRVIPKSSPLFQEFRIWQNLNNIVLTDKTTGEIEPLTQELKELAFQYLIVAGKITCTNLLKMIVDQHRNYELNYENIEGNRTNSELIKAYQKIFEYEGWEYDFSKMTAKEVIRIVEEKFTKLNISTDILHFNSDLEANDFDKQPIMQLWHLLYSSVDDEKLIKNLTQKFGFKKEYAKIIANVSLQGDYGSLSARAIRKILPYLKEGNTYDEACALANYNHSKSLTKEEIQERELKDKLELLPKNSLRNPIVEKILNQMVNVVNAIIDDENLGKPDEIRVELARELKKSASEREKMTQNIGKATKRNEEIRTLLRSDFGITKVTRNDIIRYRLWEELESNGYKTLYTNKYIPKEEIFSKKFDIEHIIPQAKLFDDSFSNKTLSARDINIEKGNETAFDFFKKKLSPEEFEKYLARIERLYKKDKITRAKFNKLKMKNTEIPDGFIDRDLRNSQYIAKKAVQMLNEVFRKVNTTTGSVTKRLREDWQIINVMKELNLPKYEKLGLVEPIVGKDGQPEKRIKDWTKRNDHRHHAMDALTVAFTSYAHIQYLNNMSARSNERHKKYHEVYGIEQKYLYRNDKNKLLFKPPMPLHQFREDAKKHLETILISFKAKNKVVTRNKNKIKIKGKNNYNTKIELTPRGQLHKETVYGSINRYATKEEKIGKKFDLEKIKTIANQSYREALLIRLADFKGNPQKAFTGKNSPSKNPIYIDNAKILKVPEKVKLVWKEKQYTIRKEISPDLFKDSKKRDDFVKRIDNIYDEGIKRILKKRYENSKREVEKFNVTINKTSEKKKVLETAFSNPDENPIWFNKEKSISIKRVTISGVSNVVAIHSKKDHNGNFILDKEGNKQPVDFVSTGNNHHVAIYRDENGKLQDEVVSFYEAVHRVNADLPIINKNKNDWDFLFTMKQNEYFVFPSEDFVPNDIDLLNPDNADIISPHLFRVQKFSKLDYGNSVVREYVFRHHLETQLIDKKETKNVTYKVLKSLSAIDSIVKVRINHLGQIIKIGE

SEQ ID NO: 3747 - protein, 1526 aa, unidentified
  REGION 1..1526: note = Description of Unknown: Cas Enzyme sequence
MKKKILGLDLGTNSIGWALIEADEKENNGNIVAAGSRIIPMTQDVMGKFDSGQSHSQTAERTGYRGVRRLRERNLLRRERLHRVLNMMGFLPAHFAAEIDFEKRLGQFTHEKEPKIAYKKDDNGKFDFIFKNAFAEMLLEFQNQHDELKDNNLKIPYDWTIYYLRKKALSHKLDKEELAWLILNFNQKRGYYQLRGEEDEINTTQKIEFHALLVTAVEATEDKKGLDIWYNVHLENGWIYRRSSRIALHDWVGKTKEFIVTTDINEDGSEKINKEGTIKRSFRAPKDDDWTLVKKKTEFDINKSGKSIGAYIYDTLLINPKQKIKGKLVRTIERKFYKEELKAILDKQKEFHPELSDAALYTSIIHHLYPYNESHRNNIQNRSFTQLFIDDIIFYQRPLKSKISEIADCTLESRTYVDKNGEKQTAPIKVISKSHPLFQEFRLWQWIQNLKIYQRQAEVNGRLKADVDVTTNFLQTEDDIVKLFDFLNEKKEITQDVLLKYLFEPRKLKPAVVKNEIEKYRWNYVEDKEYPMNKTRYDMVSRLKKCDTIPENFLSKDKELALWHILYSVSDKMEIKKAITKFAKDNNLGDDFIQQFERFPPFDSDYGAFSERAIKKLLPLMRMGKYWDETHIHPQTINRINNIINAEYDETIKNRVREKAINLTDISHFRGLPLWLTSYIVYDRHSESGDLQQWKTIDQLNTFIKEFKQHDLRNPIVEQVILETLRVVKDIWEIYGVKQASFFDEIHIELGREMKNNAADRKKITENVTNNENTNLRIKALMIEMLHDQNVENLRPYSPSQQEILKIYEEGVLAKFSEKELDEEIRKISKMAQPSSSELKRYKLWLEQKYLSPYTGAIIPLNKLFTSAYEIEHIIPQSRYFDDSFSNKVICEAAVNKDKDNLLGLEYIKSKGGSIIELGFGKSIAILTTEQYIEFVQKQFGNIRGKMKKLLMDEIPEGFIERQMNDTRYISKYIKAILSNIVRVEKDDDGVTAKNLLSCNGTITDKLKQDWGINQIWNELITPRFERLNAMTNSNGFGSINVHTGKFLPTVPLAISKGFSKKRIDHRHHAMDAIVIAATTRNHINYLNNQSALDNKDQKLVEKNRMDLKNALCKKIFTDTHGNYKWEFKLPWELFTLDAKQTLENTVVSFKQNLRVINKSVNYYQRWVDDNGKMVKKTEKQTQGDQWAIRKPMHKETIAGLITLTEKKTVTLKQAIANESQIVDKPLRKHIKHLKEQGFDDIKMLKYFKDLNNTWNDVDISKVALYEINNQMVASRTSLDTTFNAKKIKEEIADTGIQKILLNHLASYDIVKADGAIIEQPEIAFTPEGIDDLNKNIVQLNDGKFHQPIFKVRTIEPLGNKFNVGATGNKKDKYVIAATGTNLFFAIYVDSEGKRNFETIQLNTVIERFKEGLTAVPEVNEQGNKLLFHLSPNDLVYVPTEAEKETPNLVDINNMTKDQAKRVYKMVSSGGPQCYFIINSVATTIIDKVEFEKKNKMEKSIDGIMIKANCWKLETNRLGQITKIHQ

SEQ ID NO: 3748 - protein, 1432 aa, unidentified
  REGION 1..1432: note = Description of Unknown: Cas Enzyme sequence
MKRILGLDLGTSSIGWALVNEGEGAEEISSIVQLGVRVNPLTVDEMQNFEKGKSITTNADRTLKRSMRRNLQRYKLRRDVLIELLKKIGFITDKTILSEQGNRTTFETYRLRAKAAEEEVSLEELARVLLMINKKRGYKSSRKAKGEEDGSLIDGMEIAKKLYDEDLTPGQFCLQLLESGKRTFPDFYRSDLQDEFDRIWNFQKQFNPQSFCDAAKEEVKGKNKSQTWAILAKYFTWTKEVSVWNENESKTENQEKEYRLVGIKRTVKGEALKKENYRWRVQALTEQLDLEEIAVVLQEINGQISASSGYLGAISDRSKVLYFNHQTVGQYQMAELDKNPNMSLRNMVFYRQDYLDEFNVIWEKQTEYHKELTPELKKEIRDIIIFYQRRLKSQKGLVSFCEFENREVIVEKDGKKQTKIIGCRVIPRSHPLFQEFKIWQTLNNIEVFVGEKRKKRKQTNVSFGLFDNTVDALAMEGRRFLYQEEKEILAKELSCKKDLTKTEVLKLLFENPQELDMNFKQIDGNCTGFALFSAYSKMIEKYGYEPLDFKKPADEIIAQLKAVFVDLGWNTDLLSIDLDKEGKDLEMQPYFRLWHLLYSFEGDNTPTGNGKLIEKIMQLCRVEKEYAIELANISFQDDYGSLSAKAIKKILPYLKEGSQYDIACEYAGYRHSKSSLTKEEIENKVLKDKLDILPKNSLRNPVVEKILNQMVNVINAVIDAYGRPDEIRVELARELKKSAKEREELTKVIAKNTREHDEIRKLLQSEFGMIHVSRNDIIRYKLYEELKENGYKTLYSNQYIPKEKLFSKEIDIEHIIPQARLFDDSLSNKTLEYRAINIEKGNKTAYDFVKDKYGEEGLQEYLNRCENVCKDRKAKLRKLKMEQSDIPDGFIDRDLRNTQYIAKKALAMLNDICRRVVATTGSITDKLREDWQLVDVMKELNLPKYEALGLVESFEDKDGRIIKRIKDWTKRNDHRHHAMDALTVAFTKDVFIQYFNNKNAAWKSDCKEHTNIVGIKTRYFESGKAVPPMPLGQFRTEAKWHLENLLVSIKAKNKVVTTNVNCIKKKGGIFKKHQQTPRGQLHLETIYGSHKQYLTKMEKVNASFDAAKIATVSRQNYRNALLKRLEAFRNDPKKAFTGKNSLEKNPIYLDRAQTMQMPDRVQIVELETVYTIRKPIDPGLNVDKVVDTKIRTILEQRLKEYGGDAKKAFVNLDENPIWLNREKGISIKRVSIRGINNAQSLHVKKDKNGNPILDENGKQIPVDFVNTGNNHHVAIYRKPVLDKKGQEMFDEDGNLMYELDEVVVSFFEAVTRANLGLPVIDKDYRRSEGWQFLFSMKQNEYFVFPNEKTGFNPMEIDLLDPNNYAVISPNLFRVQKFSSKYYVFRLHLETTIEDKKELQEITWKRITSLTKIDRMVKVRINHIGQIVSVGEY

SEQ ID NO: 3749 - protein, 1435 aa, unidentified
  REGION 1..1435: note = Description of Unknown: Cas Enzyme sequence
MSKIFGLDLGTNSVGWALRNLDLTENQIEKFGVLTFNKGVGLGKTGEYSYAADRTKKRSTRRLYQARKYRLWATLKHLITEGYCPLSIDDLNRWRKYNKEEALKSNNSGRVYPVDNLAFDAWIKLDFDGNGKPDYTSPYQLRHELATIKLDFNKKENRFKLGRALYHIAQRRGFKSSRKSADDTKEKEVDDSETMNLQYSEKKKNKNITELLEKYPEAKTIGSLFAFLENDNVRIRENITQYAIRENYKDEIKHIFIVQELSFESNLYKSLVESEKNKNNGSIFYKRPLRSQKGLIGKCTLEPNKYRAPISHPAFEIFRAWSFINNIKYKENNKQQQLPLAIREEIYHKLFFRKSKPYFPFSEIADFIKKEKKQNWQLNYSLKTTVTACPVSARLKDIFGDDYLNVKVKKVKAPKSDKNYYDIEDIWHVLFNYEDQEYVAEFAEQKLKLSDEKVKQFIIAWNALPVGYGMLSINSINKINIFLQQGLIYTEAVLLANIPEILGAELWKENKDTFLKEISNVITENRREKTILNIVNNLISKHKNLEANEKFGHKNNNYQLVESDLNDIKTVIAETFGNNSWNEKLADEQKNIFDTVKDCYQAYFATQGIIRDNGHDERIVTIQSKGKNYYKTETGYYRLPKLIDTLGEFLLLNFSIDEKLLSKIYHPSEINIYPPAKEDKNGVLKLGSPKTGSFKNPMAMRTLHELRKLMNYMIETNQIDNETRIVAEVARELNDSNKRWAIEAWQRQREAENQEFAEIIKQLLAEDKHLTADASNANDIDKLRLFYEQNEEQNLPPVIELEEDEKGKKKKSSAQKDETVRWIGHGKKLIDKYRLWKEQGYLCLYTGKLIKLTDLFNENVIDFEHTVPRSQSFDNSLANLTVCYHDYNRTIKKNQIPTQLLNYNEEYNFGGSVGKCLPIKNRLKTWEEKIERIKQQIDFWKTKSKKASDRGWKDDAIRQRHLWQMELDYWQNKLNRFTITEITSGFKNSQKVDTQLISKYAFHYLKTYFDKVDVQKGSITAEFRKIYGLQTADEKKDRSKHSHHAKDAAVLTLIPVAAKRDAILEKYYEAQEKKTTFIPEPPFKGFKREFVFGIDEDVLINNISNNQTLTPAKRKVRKRGKEVFIEKADGTKVQKWATGDIIRGQLHQETFYGAIKPAQKGEKGNLLKDENGKFIQEDNIRYVQRVPFNADFASTEKIVDDGLKKQIKEHTLKAGSFKKAFGEGIYLKNKDGNPHGNKIRHIRVWASVSEPLKIKKQTNLSDKEYKQHYWAANSTNSFFAVYKSENIKDFDYRTLFDTAKTRSLNSIKNPKDLFEDKIKITKNKKINELALTYILEAGVKVIFKKDKNEDLKLLDNREILKRIYVYTSFEKNGNSARLNFKYHMEARVKFEEDYIESEIDFFNPKPTQRFGWAKYDFAVEGHDFEVKMDGTVKWK

SEQ ID NO: 3750 - protein, 1536 aa, unidentified
  REGION 1..1536: note = Description of Unknown: Cas Enzyme sequence
LIIYFIFEKIVNTILVMKKIVGLDLGTNSIGWALINAYIDEYNKEHLYGIEACGSRIIPMDAAILGNFDKGNSISQTADRTSYRGIRRLRERHLLRRERLHRILDLLGFLPKHYSDSLNRYGKFLNDIECKLPWVKDETGSYKFIFQESFKEMLANFTEHHPILIANNKKVPYDWTIYYLRKKALTQKISKEELAWILLNFNQKRGYYQLRGEEEETPNKLVEYYSLKVEKVEDSGERKGKDTWYNVHLENGMIYRRTSNIPLDWEGKTKEFIVTTDLEADGSPKKDKEGNIKRSFRAPKDDDWTLIKKKTEADIDKIKMTVGAYIYDTLLQKPDQKIRGKLVRTIERKYYKNELYQILKTQSEFHEELRDKQLYIACLNELYPNNEPRRNSISTRDFCHLFIEDIIFYQRPLKSKKSLIDNCPYEENRYIDKESGEIKHASIKCIAKSHPLYQEFRLWQFIVNLRIYRKETDVDVTQELLPTEADYVTLFEWLNEKKEIDQKAFFKYPPFGFKKTTSNYRWNYVEDKPYPCNETHAQIIARLGKAHIPKAFLSKEKEETLWHILYSIEDKQEIEKALHSFANKNNLSEEFIEQFKNFPPFKKEYGSYSAKAIKKLLPLMRMGKYWSIENIDNGTRIRINKIIDGEYDENIRERVRQKAINLTDITHFRALPLWLACYLVYDRHSEVKDIVKWKTPKDIDLYLKSFKQHSLRNPIVEQVITETLRTVRDIWQQVGHIDEIHIELGREMKNPADKRARMSQQMIKNENTNLRIKALLTEFLNPEFGIENVRPYSPSQQDLLRIYEEGVLNSILELPEDIGIILGKFNQTDTLKRPTRSEILRYKLWLEQKYRSPYTGEMIPLSKLFTPAYEIEHIIPQSRYFDDSLSNKVICESEINKLKDRSLGYEFIKNHHGEKVELAFDKPVEVLSVEAYEKLVHESYSHNRSKMKKLLMEDIPDQFIERQLNDSRYISKVVKSLLSNIVREENEQEAISKNVIPCTGGITDRLKKDWGINDVWNKIVLPRFIRLNELTESTRFTSINTNNTMIPSMPLELQKGFNKKRIDHRHHAMDAIIIACANRNIVNYLNNVSASKNTKITRRDLQTLLCHKDKTDNNGNYKWVIDKPWETFTQDTLTALQKITVSFKQNLRVINKTTNHYQHYENGKKIVSNQSKGDSWAIRKSMHKETVHGEVNLRMIKTVSFNEALKKPQAIVEMDLKKKILAMLELGYDTKRIKNYFEENKDTWQDINPPKIKVYYFTKETKDRYFAVRKPIDTSFDKKKIKESITDTGIQQIMLRHLETKDNDPTLAFSPDGIDEMNRNILILNKGKKHQPIYKVRVYEKAEKFTVGQKGNKRTKFVEAAKGTNLFFAIYETEEIDKDTKKVIRKRSYSTIPLNVVIERQKQGLSSAPEDENGNLPKYILSPNDLVYVPTQEEINKGEVVMPIDRDRIYKMVDSSGITANFIPASTANLIFALPKATAEIYCNGENCIQNEYGIGSPQSKNQKAITGEMVKEICFPIKVDRLGNIIQVGLCILTN

SEQ ID NO: 3751 - protein, 1365 aa, unidentified
  REGION 1..1365: note = Description of Unknown: Cas Enzyme sequence
MKRIIGLDLGVSSCGWAYVKEAEKEDEKSEILRIGVRVNPLTVDEQTNFEKGKSITTNAERQMKHSARINLQRYKLRREHLIDYLTKAGFINEETLLCENGNRTTFETFRLRAKAANEEISLSELARVLLMINKKRGYKSNRKANGSEEGALIDGMAVAKYLYENDITPGQYAYELKKKGKKQLPDFYQSDIMDELDKIWNFQQPFYPNILTDEFRQMLAGKSKTNSTKLFLARYSIYTAQNKEKDKGLQALKWRSDALARKLDIEQLAYVICELNGLINNASDYLGKISDRSKELFFQNLTVGQYQMKMLDENPNVSLKNMVFYRQDYLDEFERIWETQAKFHPELTRERKKEIGNMIIFYQRPLKSKKSLISICELEGKQIEVEMEGKKKTITVGSKVCPKSSPLFQEFRIWQRLNDIELTDLSTRQKYGLNQGQKELLAKELEYKTKMTKQQMLKCLSLKPKDYDMNFKEVDGNTTQAMLFEAYRKIIEMSGHGEHDFSKMSASDISTLVESVFAALGFNTSVLHFDAQAADISQDSMYQLWHLLYSYESDNSAMGNKALICRIQELFHFDSDEYAKILAGISFKPDYGSLSAKAIKKILPFMKEGNDYSTACVYAGYNHSKRSLTKEELDNKPLKDHLDILSKNSLRNPVVEKILNQMINVVNSLIDTYGKPDEIRIELARELKKSAKEREAMTDAINAANRENEEYKKILETEFHIPHVSRNDILRYKLYLELKDNGFHTLYSDTYIPREKLFSRDFDIEHIIPQASLFDDSFSNKTLESRSINIEKSNSTAYDYVKGKYGEEGAKNYKTRVEDLFKNGTISKTKMTKLLMTADDIPTDFINRDLRDSQYIAKKAREILEEIVRVVVPTTGSITDRLREDWQLVDVMKELNWDKYDQLGLTETFEDKDGNTIRRIKDWTKRNDHRHHAMDALTIAFTKPSFIQYLNNLNARSDRSQSIYGIERKELYRDKHNKLRFNPPIPLDEFRTEAKRHLQNILVSIKAKNKVVTRNVNKTKCKEGFNTKVQLTPRGQLHNETIYGSQQRYAIHEEKVGASFTAEKIATVANKKQREALMARLQAYNNDAKKAFTGKNALDKNPIWLNEAHTTSVPLKVKCLTMETIYTIRKPINKDLKLDKVVDSRIKQILQQRLDKYKGDANKAFSNLDENPIWLNQEKGIAIKRVAINAGLSKPEAIHAKKDKQGNNIPVDYVQTSNNHHVAIFADEQGHLQEHIVSFYEANSRAIQGLPIIEKDYQAELGWKFLFTMKQNEYFVFPDIENGFNPKEIDLTNVENYSIISPHLFRVQKLSSKYYVFRHHLETTVEDKSTLQEITWKRITAIDKLANIVKVRVNHIGQIVSVGEY

SEQ ID NO: 3752 - protein, 1197 aa, unidentified
  REGION 1..1197: note = Description of Unknown: Cas Enzyme sequence
  MOD_RES 1191..1194: note = Any amino acid
MKKILGLDLGTTSIGWALVNQAENNEEKSSIIKSGVRLNPLTVDEKSNFEKGKSITTNADRTLKRSMRRNLQRYKLRRNALISTLKRAGWINDETMLSENGNKTTFETYRLRAEAALHPISLEDLSRVLLMINKKRGYRSNRKTDVSEGMVSFDGMDVAKELYENNLTPGQYCLDIIKSDKKSLPEFYRSDLYNELDKIWEVQKNYYPDILTDDFKNQISGRGKNDVAKIFYAKYGLTTADNKGKDKKLLAFTWRVDALSSMLSKEQMAYVICEVCGDIRNSSGYLGDISDRSKELIFKGKTVGQYLYENLTGNPDFSTKNKVFYRQDYLDEFEKIWETQARFHNELTPELKTEIRDIIIFYQRNLKSQKGLVSICELEGRDILINKAGKERIVPAGPKVAPRSSLLFQEFKTWQVLNNLSLTDKDTGEIRQLSIEEKECLAKELMTRAKMTSPEALKCLFGKSNACELNYKSLEGNATYSAISDKLIEIVNIEEGIDLKTKNMSTDDIILNICAYLKRYGFKKEILDFDSSLEKQDFEQQPIFKLWHLLYSYVGDSSKTGTGGLIKKISELTGLPEDLSLKLSSVRFLQDYASLSHKAMHKILPFLKSGLTYDKACAEAGYIHSKHSLTSEQIENKKLVDSLEILPKNSLRNPVVEKIINQMIHVVNGIGGEYGRPDEIHIEFARELKQNQQEREKKHADIEKSTKRDEDYKKILETEFNIKYVRKSDILRYRLWLELKENSYKSLYSNMYIPKEKIFTPEVDIEHIIPQSVLFDDSYANKTLEYKSINIEKGSSTARDFVLSKYGEDGLREYIERVNYLAKKESISKGKAERLLKKGNEVGGGFINRDLSTSQYIAKKAREILESYVKVVMPTSGSITAYLREDWQLVDIMKELNLDKYRKIGMTHFEEREGKITEKIDEGWTKRNDNRHHAMDAITIAFTKPSHIQYLSSIHAGTLNDSLFSKVGKKKILTPPMPLDELRAAFRDSLSSILVSIKAKNKVATRNENKIKTKNGVKSVVQLTPRSQLHMEQVYGLRYVYKSSFVSVGSSMTSDIIAKVASKIEREALEKRLAEFGFDPKKAFTGKNSLEKNPVYLDKLRTKVLESKVKIVELKPIFTIRKEIDRNLSVEKVLDSGVREILKKRIESFGGDQGKAFSNLDENPIWLNEERHIKLKRVTIGENFELTAIRXXXXVSS

SEQ ID NO: 3753 - protein, 1526 aa, unidentified
  REGION 1..1526: note = Description of Unknown: Cas Enzyme sequence
MENKKAKTVLGLDLGTNSIGWALVDQEDQKILGMGSRIIPMSQEIIGDFEKGNKVSQTANRTAARGVRRLRERHLLRRERLHRVLNILGFLPEHFSESLDDYGKILQEQEPKIAYFKNMEGEHQFFYKDAFNEMITLFRKENPAHFKDNENALIPYDWTIYYLRQKALSEKISNEELAWLLLSFNQKRGYYQLRGEDEETNQNKLEQFYNFKIVDVEATEKGKSEGEVWYNVILENGWVYRRSSRIPLFDWVGKYRDFIVTTDINEDGTVKVDKDGKEKRSFRAPKEDDWGLLKKKTEQDIISSDQTVGQYIFRNLLENPKQKIKGKLVRTIERKFYREELDKILTTQLSKNEDLQNNSLFAEAIESLYKSNEQYRNSIKSKDFKYLFLNDIIFYQRPLKSKKSLISNCELECKYFASDGGKIETQPIKCISRSHPLFQEFRLWQWMQNLKIVKLEKEVNGKLLSDVDVTTDFLRSQDDYVSLFEYLNDRKDIDQKATLKHLFEKSGLKGKALSAEIEKYRWNFVDKPYPSNETRSNILNRLAKVINVKQDFLTKELEIALWHILYSVSDKNEIIKALEKFAKKNDLDKETFVENFKRYPLIKSDYGAYSEKAIKKLLPLMRMGKYWDESNIHPQTIDRINKIINSEYDEKIRIRVRAKAINLQDINQFQGLPLWLTSYIVYDKHSEAGDTQQWKDINQLNKFIHEFKQHSLRNPIVEQVLTETLRTVKDIWKHFGNARESFFDEIHIELGREMKNNAEDRKAISDANNKNEATNLRIRAMLEEFAKPEYQIENVRPYSPSQVEILKIYEDGVLNSSIEISDEIQKISKSLQPTNKEIMKYKLWLEQGYRSPYTGQIIPLSKLFTPYYEIEHIIPQSIYFDDSYSNKVICESEVNKLKGNQFGYEFVANHEGEIVDLGLGKTAKVFMLADYETFVKANYSKSYGKMKKLMLDEVPEKMVERQLNDTRYVSKIVKNILSNLVRSDSDDDGVTSKNVVSSNGSITSQLKHDWGLNDVWNGLITPRFERMNEITNSNQFGYWDVKDGKKVFQIQMPIELQKGFNKKRIDHRHHALDALVIALAGRNHINYLNNQSALSKDKTQDEKLKDRRDLRAILCEKVKVDSRGNYKWQFIKPWPTFTQDTRAALETIVISFKQNLRVINKTINYYQKYVNGKKEFVKQTKGDNWAIRKSLHKDTVAGLVSIQMIKEVSLLNAIDNYESIKKKSLRAQIIKLKEQGLDKAKINKFFKDLNFTWEESNIARVEIYYFDSDIVASRTNLDDSFNTKKIGSITDSGIQKILNMHLSRYDEIKGDKVVEHPELAFSPEGLEEMNKNITTLNNGKKHQPIYKIRTYETKGNKFQVGHSGNKNDKYVEAAKGTNLYFAIYIDDSGKRSYETIPFNVIAERLKQGLNLIPDKEGCTLLFSLSPNDLVYIPSEEDLNNFNTSNNLNLNKENVINIYKMVSSSGTQCFFIQKLVANAVVNKVEFSALNKMEKSIKGVMIKDKCWKLNVDRLGNIKVYKPTTKEHS

SEQ ID NO: 3754 - protein, 1534 aa, unidentified
  REGION 1..1534: note = Description of Unknown: Cas Enzyme sequence
MKKILGLDIGTNSIGWAMIESNAYDKPENLEGRIIDLGSRIIPMDGAALSKFESGISETKAAARRKARGARRLNQRYKLRRSRLIETLQILGWLPIDFPNERKDFKIFKKLDKHKIQDYLPYSSELIVEANQFFETAGIINSKGSEYSIPEDWVIYYLKTKALKEKISLTELARILYHYNQRRGFKSSRKDAQIEEEVAEIKYPIYEKWVEIVNIKAIKNNGNGTGKDADFTFYEITCSTPNLEFTAIKKRRTFPDWLNQNKEVEITKKTTKNGEVNYTISEVDPSKWENRKLALENDITNSNLTISEYYLNNLKQNPNYRIKQRIVDRKFYQKELEKIWKKQEEEFYKEEFNDKSKIEAIAKSLYHHNVEKQRELIGKGLFHILVNDIIYFQRGLKSQKGSIGNCIYEQKAYFNKDGNKVNVGVKVCHKSNPIFQEFRIWQTIHNLKVLKKESIINGKLHLDIDVSHEFLSNDTKERLFELFDASKEVSIDGILQALGFKKDKVEGGSKTFSFKLNYPQETIFPGNETKALFSKVFKKSGYSEEGKLLLSKPNQFYRLWHIIYSLPEEKDIIKALSNKNHFSLPDHVIQALSKLPEFKSAFASISQRAILNLLPLMRVGKYWKEEQLAIGKNEKDGLNLMPSLNLIEKIEMILSGKVSLPDSAKKEIEKRDFSDISNISGLPTFLAAYIAYGRHSEKVNTDKYLTIEDFKINELIPYNSMRNPVVEKVIRETLKIVKDIWGNERLGRPDFIHVELGRDLKKTNKEKKNISEANYNNRLERDRIISLLKELKFPNFNHESMADLDKFKLWKQQGGSEGDEKFEALFKSKKSEIISNAEVEKYKLWAEQGYKSPYSGKPIPLAWLFGAEKRVEIDHIIPRSRYYDDSYGNKVLVEAEFNAEKKNRLAIQFIEDCQNIEISLSDGSKRSVLDLESYQRTIDSMFSNKKKIRHLKLYEVPEGFIERQMNDTKYISRTVAQFLRPVALGNETVSEDGKKTIDEGVIYTSGEITSDLKSKWGLNLLWKELLKPRFQRLEKILGEKLIVEDDTKKGVYHFTKEYKRIDHRHHALDALVIACTTRSHIQYLNSLNSFSNNKNDIIKYNEWQKWMYLLKKKKQLEGLEVGFTEFATPWGTDRSFYSDVMEKMRCMVVSHKPTAKLISKAKNKYKRWTNEDGTWVLKYTQQVVPKDEDKYWVAARQSLFGQPYGKVLLAEYKKNIELRQAIKTQIEFLTTHNNSWKSENWRIAKTNIRWQLDKIIRENNFDEKKILKQLESSPLKDEKGNKIEKLDLLIFKKYASKRVSLDDTFKLDKINGMPYAHHPKNWLTNMLRQHLEEYKDPKTAFKGEALEELYKKIPANKTISKVTRKEGGSKIENNNKLLEGDAGVNQFFVIEITTVVDKKTGELIEVRKYSTPPFLECIERLAKDLPIYDEKEGSKFLVLSPGDLVYSYGDINELSQINWSNLNHLEIQNVYLMEKATGTSCYFLPFEVSNLIAKGEFESSGKSEKTKDGSKVIKSSCIKLKIDRLGKITPIYPY

SEQ ID NO: 3755 - protein, 1612 aa, unidentified
  REGION 1..1612: note = Description of Unknown: Cas Enzyme sequence
MKTVLGLDIGTNSIGAALIQLPETLQDYGTNGNIKWIGSRIIPVDGEYLQKFESGAQAETKAALRRMKRSSRRLKHRYKLRRSRLISVLKILEWVKNDFPLDNPKQIKNIIRENNGKFQFKISNYLPFSKETIDEATELLGVKGKKNEKGNIIIPEDYIVYYLRKKALTQKITVHEFARILYMMNQRRGFKSSRKDLKETSILSYTDFQKKKEDIDAGKYPEYKEGNGEEHKTQFVSITRIKSITQEGKEKDKKGKFTFRVETEDSRVKPWFVKREKKPEWEGKEYRFIVEQKINKKGEIKQDSDPKMPKPDDWNLLMVALDNQIDESGKQVGEFFWDKLVEFSKKKEVYKIRQNVIRREKYQKELRAIWDKQIELRKKEGTEEELLNSKKIPLIASELYNHNHVKQNELKERGLYHILANDIIYYQRDLKSQKNLISECRYEKHVGKEKNSNGEFVTTGIYGLKCAPKSSPEFQEFRIWQDIHNLRILEREKIIDNIKKVDVDVTQEWIDETTKEKLYELFDNETEITEKKIFDLINSIKPEAKLTDETYRINLFTNRKSLKGNETKSLFRKIFKQTSYSTEGEKLLQNKDSLYRLWHIIYSISSSDITKSTKGIRTALKSFNLPNNVVDAFTRIEEIKKEYAAYSSKAIKKLLTVMRCGKYWNWQEIEQTEIKTPESPIDKPEKIKLSERIDKIIDDGWERDIKVDKRTGEIINERQFKKREQFSGLPVWLAGYIVYGRHSERESNKKFTQEEIKRLDITNLVPHNSLRNPIVEQVVRETLAVVKDVCNEYGQPDEIHIEIGRDLKKNAEQRQAIAENNTKNLEEKLRAKKLLQELLNGAFEHYDEYGGKIKAPFSVKPNPNSPIDIEKFRIYQSLARFEFDKKENKSENQVQLDALFREGKKERVPSSAEVKKYILWLSQKCISPYTGKIIPLSKLFDEAYYEIEHIIPRSRMKYDATDNLVISETGVNKAKGNELAANFIAKCNGKCEYGGIQYELLTYEAYTKHCENTFRRSNYKKYKNLMATEVPKDFIERQINDTRYIGKKLGELLFPFAKDKEGIVFTIGSITSELKANWGLNKIWKQLLKPRFERLETLTGNKYMFQNEKDQTDIVFDVPEVRDFDAKRLDHRHHALDALVIAATTREHIRYLNSLSAADTDDELKKVKRALVKKKIREFELPWKSFTHDAKEKLSELVVTFKSNNRIITKPFNRYWKWIETKDGIFEKQTVIQSPNKRWLAVRKSMFKEPQGIVWIKEKRKVPIKEAFQIQIERMQVEHDKEKRKTASYVYDQIARPIIKEIINKTSEIAGIPLTKTNELLAAIEKNYLKKNEKKTSSGKCYSLEGKEYEKIEIAEFVMYKAKRVPLDSSFNHKKIDKIPYSATSRIPTLLHNHLREYEKRGLGSSEAFSNEGLELLAKKNNNMPITTVTILDGELKDEHFDNLFGNKYMESDAGSIAYFIIYENETTKERTDMYSLSTHKAIERIIQGKPIAEEREGYKTIILSPNDLVYVPTENEWNRIKAGEKNVIDWSNTKAISERIYKMVKCTGKQCYFIPANISKLIIPYDSDNKIGEIESQNCSENTIFDEEKISIKQNCIKLTVDRLGNITPML

SEQ ID NO: 3756 - protein, 1442 aa, unidentified
  REGION 1..1442: note = Description of Unknown: Cas Enzyme sequence
MKTILGLDIGNGIGWALVKTDENNNAESIIDMGSRIIPVGAELSKFEQGQAQTKNANRRIIRGSRRLNKRYKQRRNKLIYVLGQLNMLPDQIKLSENFNDPNRIDKVSILPIAENQRQLSAFDLIELRVKALRESVSLKELGRIIYLFNQLRGYSGGNAEPEKENNDNGDEEKSGKNSFIAFGKINTISEPETITFKNKEVKKFKISFETEDGLFEGETFLEILKVTESRELQVNISKSKKDESIFFKLPNKTNWRKKMENLEKELTEKSKEARKEVFLSEHFFEVLKENKWAKIRNNVVLRYRYKAEFDAIWKCQYEKNTEFKNLVDDKSNLEKIVSFIFPDRSQEKSETEHSRNSQKIKYRQEALGNGFKYLIKDQIIFYQRELKDQSHLISNCRFEKEQKVVAKSHPIFQEYKVWEQINKLTINTKTENGKNKKCEIKYTYIDRPIPPKLKEWLFDELQIRKEIAFPAILNKLKKEYKLKDNIDFLNGMNTKAKLRGNETKLILEKSLGSFWETLNLESIDRQIELWDILYNGKGNEYELTSDRTSKVYSFLTKYEPGIPEIEKLSIQISKIKFSRSYAELSLKAIEKILPLVRVGKYFNPKFSEDIHNKIVKLSNEYVKDSFEKAAQDYLQNNVEVLTDGGLMNSYATILVYDKHTAKEYKQEELINDYTQIKSLEQGELRNPLVEQLINETLAVVKDIWKKYKIKPDEIHVELSRDLKNNAERRAKIYKANRENQNANDEIKSVLSDLKKEISMANIEKYKLWVSQENLTQEFIKQFADPSKSEIEKLKLWREQGHVSPYTGQPIPLSGLFDKSLYDIDHIIPQSRYFDDSLANKIICERQVNKDKGNKTAMEYFETGSSTQAILTKEEFIDHVNKSFHGIKRKNLLATKVPDDPIERQIKETQYVSIRVKEELNKIVGNENVKTSTGGITDYLRHQWGLTDKFKDILKTRYETIEPALADVEYDAYLKSIEEKKKEFQKSGIPFTEIVPDKENFSKQFRENYIKYKNNKLVIRDWTKRIDHRHHAMDALVVACTKSEHVKRLNDLNKELQNWIDNHRKELLPDFEGSPSELLDEILSLEPDKQKKIFTQIENFRIIDLPWKGFPEDATQKINEIIVSHKPKDKLVIQNDNDGKPQIKIRGQLHESTLYGKSQGVECYRIPLSKLAGKKFATEKTIEKIANPFLKKVISDHLKEFNDKKEDAFSAEGILNLNKKLALKTNKKGKSAPHTPISSIKVFYRDPIKIKKKKGQDEPEDALQKLEREKAFNNSLYVSTGGNYLFAVMEKESKRIFDIITFFDAANLLKDEFNRSSNKQFFNKDLVFKNYFEVKNNAKLLFTLKQNEIVYLPDENEDIIFDKDSTLYNSYWGNKKELSKNIYVVQKFSDNRIYFINHAVANTIKKKIEFGSQDCYENIVGRSIKQYCYKIETDRLGNIKPVS

SEQ ID NO: 3757 - protein, 1230 aa, unidentified
  REGION 1..1230: note = Description of Unknown: Cas Enzyme sequence
MKKILGLDLGSTSIGFALIEENEEKREIITMGSRIIPLSVDDKNQFSQGNAITKNQDRTTKRSQRKGYDRYQQRRTNLSKVLGSLDMLPDEILWKLPSLELYGLRNKAVSEKILLMELGRIFLHLNQKRGYKSIGKEDSADKKDTEYVAEVKGRHQTIRDLKLTIGQFFYNKLKEDFKKNEANGKGFITYRIKEQIFPREAYIEEFEAIWKEQSKYYSNILTAELKEEIKDGIIFYQRPLKSQKGLVSVCDFEGFILKKAKDGKEKEYFVGPKVAPKTSPLFQVTKIWETINTITLKSKKGEIYIISPEKKTEIFEYLNNNEKLSQTDLLKILKLNKEDYYGNKHIGKGLQGNLTKVAIAKVLGENHPLLNFNLKIEESDREVYLIDRKTGEVIGENNFKIISSVIEKETLYDLWHTMYSIKNVEECKKALIKKFSLEEIQASELAKIDLNKQAYGNKSNKAMRKILPYLMLGFVYSDAASFAGYNHSNSLTKNEKTERILKERLEQLPKNSLRQPVVEKILNQLVNVVNAIIEKYGKIDEIRVELARELKQSKEERNDAYKFTTLREKENKIIIERLQGYGIKATRNNIIKWRLFHEINNEESKLNATCIYCGKAFGLVDALKGNEVDVEHIIPKSLLFDDSQSNKTLSHRSCNTAKGNKTAFDYMSLKGDEELDSYLERVNSLFKKKIIGKAKRDKLLMAQNNIPQDFIERQLRETQYIARKAKEILEDVCNNVWSTSGNVTEYLRRIWGWDDVLMNLQFEKYRAVGQTKWVEWETDKGNQKHKKEVIDGWGKRDDHRHHAIDALVIACTKQGFIQRINKLSSEHTRKEMYAEIESQGVEFKEKLNLLDKYLIPQRPFNTIQVQSSAEKILISFKSGKKVATIGTRKVRKEERKIVVQEDVIIPRGSLHEDGVYGKINMNGSIEIVKRYKLGIGAQGFVFTGKETISSKEKIDKKTGVKIIVVDDKIESTLKDIVDGGIRIAILNRLNKGFEDGKSYKDDVKKALSNLKNIDNDPVWFNKDKGIAIKSVRMKTGLSAVESIITVDRNNKLQYEKYVKPGNNHHIALYKDKDGNLHEHVSTFWHAVERKKYRLPVVINNPTYVWDKINSQNGNFPQSFLEKLPKDGWSMYLNMQQNEMFILGMGDDDFDSAFQNNLKNELSKYLYRVQKMSIKGNGQIDLWFRHHLETELIDTKESSSSKRYYNIQSLGALEKLNPKKIRINVLGEIVF

SEQ ID NO: 3758 - protein, 1614 aa, unidentified
  REGION 1..1614: note = Description of Unknown: Cas Enzyme sequence
MKNILGLDIGTNSIGWALIETNAYENPESLDGKILDIGSRIIPMYGDALTKFENGTPESKAAARRTSRGARRLNQRYKLRRARLIDVLIKFGWIPENFPNERSHSKIFKNLDKHYINDYLPYPNSLIQEARQYFGIEDKVNAKGEVYNIPEDWLIYFLKVKALYDKVSLPELARILYHYNQRRGFKSSRKDKKEDIENTETKYPITEKWIEIIKVTNIENSGQGEGKDKEYTFYTLSCQASSFDFTAIKKRKNPLDWVGKNIEVEITKKTTKDQTITYNISEVDQNAWENRKLALEKDVEKSGLSISEYYLQNLKRDRDYRIKQRIVDRRFYQEEFKAIWQNQAKYYEQEFNDKSKVQNIAEALYHHNQDKIKELTNKGLFHILFNDIIYYQRGLKSQKSQLANCTYESKSYQDKDGKEVKVGVKVTSRSNPFFQEFRIWQTIHNLKLIQKEANINGKLALNVDVSQDFLDIKAKEIIFELFDNNKEVSEAAILSLLGFKKDRIENGEKTYSYKLNYPDGHSFQGNETKALFRRVFKKCDFSEAGEELLKNPEKLFQLWHIIYSLPEENEIKKAFSNKKHFELPENVILALSNLPEFKPSYASLSQKAILNLLPLMRVGKFWNEEYLNGKPVNHKAFSDKPSINLTTKINDLLEGKIRNLPDNVQKLLNNKDFSTINERSGLPTFLAAYIAYGRHSEKENDYKYQSLEDFNISTLIPYNSMRNPVVEKVIRETLKLVKDVWKMYGRPDFIHVELARELKKNNKEKEEITKNNNKNKLEKERIVKLLTELKLENFNPDSPTDVDKFRILADQGGELGKEKFDSLFKGGKSEIINKADIEKYRLWAEQGYRSPYSGMPIPLSWLYAEPKKVEIDHIIPKSKYYDDSFSNKVLVEAQFNSEKGNRLAIQFIEDSQNRNFIHDTDRKVLPLEEYKKLVDEMFTNKKKKKHLKLYEVPEGMVERQMNDTKYISKAVAQFLKPVAEGNKTIHEDGKITFDDGLVYTSGEITSQLKTKWGLNHLWKEMLKPRFERLEKILGEELIVLDESNKSAYHFMKDYKRVDHRHHALDALVIACTTRGHIKYLNSLNSFSNDKKEIVKYNEWSKWKYLLNKKKQLENQTNGMYEFDTPWTHFYQDAKNHLESIVVSHKPSSKLISKAINKYYKWRQNGEGLWVKTTHLQESPKDDDKYWIAVRQSLFGQPLGRVHLPEYKKGLDLKKVIKIQIDFIQNGYHWNSEEWRIAQSIFRKKIDGIIERFKYNEKDILKYLDENPLKDQQKNIVNTLDLLQFKQKASKRVNIDESFTLDKINAMPLAHAEKNWLTTLLKNHLEEFGKEGFKGENLEMLFKKANRPINKVTRVEGGNKIERNNKLLDGDKGVNQYFVIEIIKEIDKKTGLEKEVRKYSTPNFLDVIERLAKNLPVYDEKPDSQYIVLSPGDLVYAPEPDENIEQIDWSDKRQLANKIYIAKSFGDSKCYFLPANIANLIQKYDAKIGKGEFESKNQSEKTIYGNQFIKANFVKLSVDRLGNIKPYRQTLHNQYPLNDDIDQSTTASEPAVAYQPKLTFYADHAEQNETEAKYSAFLTMQERLEQTLGLIKSIYGERSISPDFPGRFTIKKLNL

SEQ ID NO: 3759 - protein, 1565 aa, unidentified
  REGION 1..1565: note = Description of Unknown: Cas Enzyme sequence
MKTILGLDLGTNSIGWALIQQDFENKKGEILGMGSRIIPMSQDIMGEFGKGNSVSQTAERTGYRGVRRIRERYLLRRERLHRVLNVLGYLPKHFAAQIDFEKRLGQFFTETEPKLAYQAFTNENSLKENKTEYDFIFKKSFEEMLADFKAHQPELLNRKNNKGEDAKLPYDWTIYYLRKKALSQKIEKEELAWILLNFNQKRGYFQLRGEDEETSEKREYVLSLKVVEIVKGEVDKKNIKRNWYSFTLENNWNYSATFTSEPQWLNTEKEFLITEELDENGVIKIVKDKKSDISGKEKRKITPLPTFEEIDLMTKKDQDKIYKKIKAKTEITITNTGKTVGTYIYDTLLQKPNQKINGKLVRTIERKFYKDELKQILIKQLEFHKELQSEDMYGDAIRELYLNNEAHQLTLDKKDFAHLFLEDIIFYQRPLKSKKSSISNCSLEYRTFKAKDKDGNEAERTEYLKAIPKSHPLYQEFRIWQWMYNLNIFKQEDDKSPVTSEFLRTVEDYENLFEFLNDRKEVDQKALLKHFKLSEKTHRWNFVEDKKYPCNETKIQISTRLDKTENVFVGFLTTEIEQKLWHIIYSVTDKMEYEKALKTFAEKHKLDVNSFVENFKKFPPFKSDYGSFSEKAIKKLLPLMRMGKYWSWDTIDEKIKLRIDKIITTVDDEYIKDRTREISKQLTDESHFQGLQLWLAQYVVYDRHSEAALVDKWDTIADLEQYLEDFKQHSLRNPIVEQVVTETLRVVKDIWSKYGNGTKDFFSEIHIELGGEMKNTAEDRKRITEQVTSNENTNLRIKALLAELVNDKKVENVRPYSPTQQEILKIYEDGVLNSGIEIDDDILKISKTAQPSSADLQRYKLWLEQKYRSPYTGQTIPLNKLFTTEYEIEHIIPQSRYFDDSFGNKVICEAAVNKLKDNQMGLEFIKNHHGQIVETGFGKTIKVFEEREYEEFVKDNYTKNRGKRNKLMMEEIPEKMIERQLNDTRYISKYISSVLSNIVREAAKDDGINSKNILPSNGKITSTLKQDWGLNDVWNELVLPRFERMNAITNSTDFTAYNEKYQKYLPTIPIELSRGFQKKRIDHRHHAMDALVIACATRSHVNLLNNQHAKSDERFDLNRKLRRFEKVSYFDVNKKRQIEKEVPKDFLKPWNNFTVDAKKELEKIVISFKQNLRVINKTTNKYESYKDENGRVRIGKDGKPKKEFIAQTKGDSWAIRKPMHQETVAGLIKLRKQKTVTLNAAIDEVENIVEKSLRKQIQKLVNKGLDKKQIAKFFKELDNKWEEKDISKTLIYYWETDENGTGINASSRVLLNDTFNEKKIESIADTAIQQILVNHLTNYKGKLDEKGKEIPAALLAFSPEGVEEMNKNIIALNKGKFHQPILKVRTYEPKGNKFSVGQTGNKKDKFVIAAIGTNLFFAVYEDEKGKRKYETIPFNEVIEHQKWRATLSRDEQKATPMFPVKAENGKFLFSLSPNDLVYMPTEEENANLNIINFNNLDKEQTENIYKVVSFTGNRLYAIPNKVATSIVDKTEFSLLNKVEFNLDKKSIKEHCIKINLDRLGNISKA

SEQ ID NO: 3760 - protein, 1565 aa, unidentified
  REGION 1..1565: note = Description of Unknown: Cas Enzyme sequence
MKKILGLDLGTNSIGWALVENNFEEKAGNIIGMGSRIIPIDQGSLGEFDRGNSISQTADRTGFRGVRRLRERYLLRRERLHSVLNILGFLPDHYSQHIDFEKHFGQFLDEAEPKLAYKPNPETGKADFIFKSSFEEMLADFSKRQPQLLTKKNGDPALIPYDWTIYYLRKKALTQRIEKEELAWLLLHFNQKRGYYQLRDEEDENKKDKIEEVYTLKIIDVVEGEKDKKNKDAKWYEIKLENGWIYKRTSKTKLDWIGKIKDFFVTTEVDENGNIKKDLNANEKRRISVLPTFEEIEKLSQQEKNRLFKKIKLKTEIEIEHSQKTVGTYIYDTLLQNPNQKIKGKLVRTIERKFYKEELRIILEKQKTFHPELQNKQFYTACLEELYKSNENHRSSVAQMDFTYLFLNDIIFYQRPLKSKKSLISNCRYETLSYKDKEGNIISVPLKCIAKSHPLYQEFRLWQFLQNLKIYQREKEVEGKLQFDVDVTSDFLKTEEDWVSLYEWLNDRKEIDQKAFLKYPAFNLKKNAEQYRWNYVEDKIYPANETRAQILTRLSKVANVPSGFLTEEIEEHLWHILYSVEDKKEIEKALKTFACKHQLGEDFVDHFIKFPPFKKDYGAYSAKAIKKLLTLMRRGKYWKQEAISSETTAHINAITERLVSVAFDKKKIEEITDDEIPKQVLKSFIDCENPHKGLNTYQACYAIYGRHSEEGEMISWKNPADIERFLRDFKQHSLRNPIVEQVITETLRVVNDIWKYYGKGGENFFDEIHIELGREMKNTAEQRKKMTEQVSESENTNLRIKALLVEMKNDDSIENVRPYSPSQQEILKIYEEGALNSPIEIPEDILKISKNAQPTPSELTRYKLWLQQKYRSPYTGDTIPLTKLFTTAYEIEHIIPQSRYFDDSMSNKVICESEVNKDKDNATAYEYIRNNPGKIIELSYGKTAKLFTVESYEDFVKNNFGKNKGKMKRLLMEDIPETFINRQLNDTRYISKLVKNLLSNIVREDGEEETTSKNVASSNGGITSILKQEWGLNDIWNDIISPRFERLNELTHSNHFGEWTNKDGKQVFQTQVPLELQKGFSKKRIDHRHHAMDALVIACATRNHINYLNNVSANSNKRYDLRSNLCFKYKTDANGNYKWMFYKPWETFTQDAKNKLLTTLISFKQNLRIINKTTNWYQKWQKDENGQLKKVFTKQEKGENWAIRKPMHKDTVAGLVNLRFQKTVSLSVALDQWEMIVDKPLKKQIKTLASEGYDKKQLLKFFKNNENRFNETDIAKVEIYYWATDNVASRTTLNETYSSTVIKSITDTGIQKILLKHLEKYNEVKDGKTIEHPELAFSPDGLDQLNENITDLNDGKFHQPIFKARAYEPRGNKFNVGYTGNKKDKYVEAAKGTNLFFAIYQDNSGKRSYESIPLNIVIERQKQGLPSVPETNEKEEQLQFYLSPNDLVYVPTEEERENQLSVDFKNLTKEQIKRVYKFVDGSDTTANFIPIMVSGLIYVLSKEDAKRFKEKHNLNYDGLLQNEYGVGSPQSKNQKTIENIMIKEVCWKLKSDRLGRIIEVNGSHI

SEQ ID NO: 3761 - protein, 1244 aa, unidentified
  REGION 1..1244: note = Description of Unknown: Cas Enzyme sequence
MKVLGLDLGTASIGWAVIDTNVENPNDIQLLGNGSRIIQYDNNEASDFSAGKGETPCTQRTFRRTARKCLDRYQQRRDKLRAFLVETGMIKPDEKFPPLNPLETWKLRSDAATPGTKLSTSEIARVLLHINQRRGYRHAKSDMSDSKQTEYVARVNNRFAEIKNLNQTVGQFFYTKLKASECTTVRGKKHYTYRIKEEVFPRNAYAEEFDSIISAQGEFYPQLLTTENVAELRNLIFYQRPLKSCKHLVSYCDFEKRVFKNSAGKEVDGGPKVTPKSSPLAQVCRIYEVINNIRLVNSRLKRRKAAVAPSLFDDIENLPLDYRKQQPEFILNEEEKQRIFNYLNTNERLTETKLLELIGLKRVDGFKSDMSLAKGIAGNKSYCSIAKALANLPNGENLLRFDLKITEKLDKTSGALEPVIDLAYLNEPLFLLWHTLYSISNKEELFNCLGAKFGINDPETLERLYALDFVKEGYANKSAKFIRRILPYLMQGYGYSDACAMCGVNHSNYITKEENSERELKPRLERLNKGELRQPLVEKILNQTINLSNAILDRFGEIDEVRVELARELKQNKEHRAETTIRINKQERENLMLANMISELNISPTRRRIQKMRMLRETDNKCIYCGAVVTPSQFIEGHGYEVEHIIPRSRLFDDSFTNKVCSCRECNAAKGNLTGYDFMKTQSEEKFNEYLDRIEQLCKDNKISKGKLKRLKMSASEIPSDFIERDLRQSQYIAKKAIEILSASFRNVYASSGAVTSFFRHVWGYDDILHDLNLPKYQKAELVEDVEYTTHGQTHTAQRIKDWTKRKDHRHHAIDALVIALTRQGYIQRLNNLNASANKEFGKMNLEKWAAQQPHLSVSEVKKAVDNISVSFKAGKKLSTPGKRYVRRNGVRKCVQTGILVPRAALTKEYVYGQIKVQDGKKDLKYIFKNPEAIADDDIRTAVLERLATNDGNVSATLKQLKKKPLEVNGRTIEQADCFRREFVINYRVDSIKTQKDIDSIIDPAIRQKFRERFEQVGAKDFVKSIAENPICSDAEGKCAIRNVRCFTGLKPDSLACVRKDASGKEIGFSQTQNNHHLAFYRLPDGKIIESVVSFWNGILRKRYGVPVFVHDPAAVWDRIAEMNENNDIRAIAESLPPRNSEFLMSLQRNEMLVLGMSDDEWNDAISAHDIAAINKHLYRVWRLGSKDYNFKFHTDTTAQIKEGDKEMKMFYRIGSIQALLALNPRKVSVSILGEIDLENLTKS

SEQ ID NO: 3762 - protein, 1165 aa, unidentified
  REGION 1..1165: note = Description of Unknown: Cas Enzyme sequence
MSRILGLDLGSTSIGWAIVEENSNEILSEDNSATSTEKDRIVAMGSRIIPYTGDEGDQFAKGQAITINADRTQKRTARKGYDRYQLRRALLLAELRKLGMYSGTTLKCSTLQLWGLRAKGVDQQLSLLELGRVLCHINQKRGYRTTKSDFSDKQQSAYVNTVVGRYRELQELQQTIGQYMYTHLVADSAFRCKDLVYPRDAYVEEFDAILSCQQQFYPDILTPAVVAHLRDYIIFYQRPLKSCKHLVAKCELERHDVELNGRVRNCGPRVAPRSSPLFQLCKIWETVNNLTIRNKYDESLNITPEQRQAIVDFMNTHEKLKTTDLKNLLHIKSKEWLLGKSVGTGLQGNTTYCTLAKALSDTSVDSEALLRFQPHIIDREVANPTTGEVLKQVDPSFEQQPLYRLWHAIYSIADSAELRTVLKEKFGIADDQALDALCRIDFVKSGYSNKSSRAMRKILPYLQEGKQYFEAKCMAGYTDTTLTTEQNKERLLADALPLIPKGELRQPVVEKVLNQLVNLVNAIIKEYGRPDEVRIELARELKQSREEREAAEKAINQNRRDNEQIAKRITDEYHLQPTRLRIQKYRMWEESKNCCIYCGAIVNVTEFLQGSGVEVEHIIPRSVRFDDSFSNKACACRSCNQSKGNQTARDFMESRGEAELEDYVTRVNQLADEKRISRTKQRNLLTPLTELPQDFIERQLRESQYIAKKAKKMLQTVCRNVYATSGSITDFLRHTWGWDDVLHQLNLPRYRDAGLTDWVSREEGGQIHEVERIHNWSKRMDHRHHAVDALTIACTKQRYIQRINNLNSLKEVSFHPISSDKQGEATQQRLTRLERYIRMQSHFSTAEVAQAVSTVAVSFKGGKRAAGIGKRYIYKNGKRICAQSHVIIPRGALSKESVYGHINKGKDTEKTVLKYALSSITSLRDVEYVIDKRIREILRTRLEAFDGNAKKAFAEAVYDHQGRAIRSVRCYTGLDSDVPLHYNEQGEPISFVVPGNNHHVAIYEDANGVWYEHIVTFWHAVERKKYGIPVIIVHPDEVWNSVTDTLPESFQNQLPESPMWHLKFSMQQNEMFILGMDDDAYAEAIRQGDNATLSRYLYRIQKLSAGYYVFRHHLETTVDDKYDGNKNANLSIKMRKMIRISSMKAFMQQHPHKVRVSITGHIVDA

SEQ ID NO: 3763 - protein, 1034 aa, unidentified
  REGION 1..1034: note = Description of Unknown: Cas Enzyme sequence
MQNKKVLGLDLGSNSIGWALLEENDGKPSRIIDLGCRIFIKAVEEKTPTPKNAKRRRARLARRILQRRTRRKQRLQNYLIKLDLLPAELQNHPHPELVLNSLGDPYPLRAKGLDHALTAHELGRALLHLVQRRGFLSSRKTLLGDMLDDPDVLAELDALENTDDADDERAKEESAFKHDIAELRAAIVNAGCRTLGEYLAGFDRHQCQRNRSHDGGHLRTDRAMYREELELIWQGQQRHHLVLTDSVKEQIEHIIFYQRPLKLRADRIGKCSLEPKNNRANIARLECQRFRYLQDINNLRYFERHSEQWLPLSEADRQKLVALFEHEAAPSFAKIRKTLGLDKRTEFNLERGNKKLKGNTTACKIRTVLSSAWDGFASEQRQALVEDLLTIQKKSILKKRLMQHWGFDAGIAVKLCLLEFEPGHSNLSSKAIRKLLPFLEQGQLFSEARVSAGYGYEIDVPKPFEKLSQPPEVTNPIVQKALHELRRVVNAVIAEYGKPDAIRVEMARDLEMNTKRYAEHEKQQKANTKANEEAETKFAEIRGQNPHLALSHKASRNDKIKYRLWKDQNHSCAYSGRSISLATLFGPEVEIDHILPYSESLDDSYMNKVVCFTAENRAKGQRTPIDAFGGDSERWNQIAQAISRWDKRMIAKRNRFFMTAAEVQQRDFINSQLNDTRYISRVALDYLKQLGADVSVSKGITTAWVRHQWGLNNLLGDSAEKDRTDHRHHAIDATVVACVDRRFYKALVDNAKDLERRKSQLDPRDIHVDPCWSTLRDDLDHALANMIVSHAPQRKLNGELHEVTGAGFIEGIGNVHRKTLDGGFTQTDKILDPTVKALVERHLARFGGKPKEAFAPGNTVLHKDGKTPIKRVRILQSKTTLEKLQKSKFGVRNRQGDVFKWLAYGNLHHVEILKDKVRGKYFGEFVTMMEASRRVKGIGMERQPIIKIDHGEGNEFVMALHINDIVSIQENGLTRFYRIQKLDAANKRLKLRIHTAATLIDDTETLPDRLSSIDALFNVGLTKYEINAIGKPIL

SEQ ID NO: 3764 - protein, 1392 aa, unidentified
  REGION 1..1392: note = Description of Unknown: Cas Enzyme sequence
MKKIIGLDLGTTSIGFAVVNEAGENDAQPSEILKIGVRVNPLTTDDLTNFEKGKPISTNRDRTLKRGARRNLQRYKQRRLNLFKVLKKAGIVNETTILAEDEKDSTHTTWALRSKAAAEKVGLEEFARLLFMINKKRGYKSSRKAKNEDEGQLIDGMEIAKLLHRENLTPGQLCYRLLTEGKKALPDFYRSDLQNEFDKVWDCQSQFYPEVFTTDFKKDIQGKGQRATSAAFWTHYQFNTAENKGTRDEKKLRAYQWRSEAVSKQLKVEEAAYVITEINNNLGSSSGYLGEISDRSKELFFNNQTVGQCLYEQLKANPHTRMKSQVFYRQDYLNEFETIWKTQSAYHPQLTEELKNEVRDIVIFYQRKLKSQKGLVSFCEFESKIVETTKDGNKSVKTIGLKVAPKSSPLFQEFKIWQNLSHLEIRHKKSKEVKIFDKETKQFLFDELNIKGNLKADLALKLLGLKSAEWELNFTTLEGNRTNQALYEAYLKMMEDDGHDSIDIEKLNGAEIKTAVKAFFETRSINQAILDFDAEIEGKAFEQQPAYQLWHLLYSYEGDDSNTGNEKLYEQLQAKFGFTKEQAKLLSNVSLQQDYGNLSAKAIRKIFLFIKESKYSLACEYAGYNHSSYITTAENEARELKPRLDLLAKGSLRNPVVEKILNQVVNVVNAIMADPSLGRPDEIRIELARDLKKNAKEREQMTAQINKATAEHDAIRVKLIKEFGVKNPTRNDIIRYKLYDELKFNGYHDLYTNEYISPLELFTNKYDIDHIIPQSRVFDDSFSNKVLVPRKINLDKGNFTAIDYINNKYHAEAVEAYKARLNAFLKFYPDRKAKFRKLQITGAEIGEGFIERDLRDSQYIAKKAKAMLHEICRHVVTTTGSITDRLRQDWGLVNVMQEVNMDKYRLQGLTEMIEQKDGNLKERIIDWTKRNDHRHHAMDALTIAFTKHSHIQYLNHLNARHKEDKYTAVVFAIENKETIVLQDDTGNRKRVFKLPIENFREEAKKHLENVLVSYKAKNKVVTKNKNKAKISKDKTPQTALTPRGQLHKETVYGKIKQPVNSLEKVSGKFDEQTIAMVTKPAYRQALLNRLHEYGNDPLKAFTGKNSLLKNPIYLNTQKTVLLPEKVQLTWMEDDYTIRKNISPENFKDAKNIEKVIDAGIRNILLTRLQDCKGDAKVAFSDLDKDPIWLNKEKGISIKRVTISGVKSAEPLHYKKDYLGNDILEDGKPVPVDFISTGNNHHVAVYRDKEGNLQDEVISLHKVITERVNFGLPVIDKTYNHHLGWKFLFTMKQNEYFIFPAYDFDPSAIDLLDPDNNKLISPNLFRVQKFSKITYGNSAVRDYVFRHHLETSVDDKKALKDITYKAVKSLPYLEGIVKVRINHIGKIVKVGEY

SEQ ID NO: 3765 - protein, 986 aa, unidentified
  REGION 1..986: note = Description of Unknown: Cas Enzyme sequence
MNNSNLILGLDLGVTSVGWALLEATDSYSEPRYLIKGTGVRIFPATTEGTKNEPKNRKRRDSRGSRRMLHRKSQRRRQFRALLTSNQLLPVQGDNIESLFQKLGDPYELRQMGATEKLDLYEIGRALSHLIKRRGFKSNRKSGKSSDDSVVYGSINSIREEMRNSEYLTLGSFLADKAKKRGRYTAREMVEQEFDQLWHSQAAHYPEILTPHLYSELSRTAFYQRPISSQRGLIGKCTFEAGKKRCDMARQDAQRIRFWQDVNNLKLQDRNTLEWRTLTHDERKKLAAALESPKKEKFNDSDLRKCLGIGADIRINIEKNLKGNTTAYKFSKAIGPKWKALTIEQQESLTTDFIRIEDERVLENRLRSFWAFTDLEIAALLKMELESGYSRCSLKAIKKILPKMIEGKRYDEAASEVYGDHRGVRSSSQHPILPPPSSDLRNPIVKKALGEMRKVVNAIISEYGLPSQIRIEMARDLKLNAKQKERVNAQIKKNEAANKEAIAFFTGLHLIDADAISAVNKLKYRLAKECGWICPYTGKPIAPESLLGDQWDIEHIIPYSRCFDDSYMNKTLCESDFNRRVKLNKTPFELFGHDEQKWFELGERIAEFPFAKRNRFIKKEVDTNEMIGRMLSDTRYICREARGYLRQLYPDHADENRYVQVVAGGSTAKLRQAWGINAILSDGDVEYKNRWDHRHHAIDAIVIAMTDRALFQRISKRAGQNEALHRRELKGFEMPWDSFLDDVKQWMDAIAVSHAPTRRVRGQLLEDTAYGRINDSDIFTVRTPVKSLTEAMIKNIADKKVKEIVELRLSQYGGDLKKAFAEPLFHVNGKTPIDTVRRLVKMSKDTVVGIKDRKGKIYKYYAVAGNHHVDIFENPDGERQALLVPRFYAAQRNWKPGDLGPEWNKLFSLCANDYVEFRGDNGELHILRIQKMSGGNRTRIDARPAQDARTEYIPGVSLALTSSEAFKRIIRKLQIDPLGRLTEARD

SEQ ID NO: 3766 - protein, 1521 aa, unidentified
  REGION 1..1521: note = Description of Unknown: Cas Enzyme sequence
MKTILGLDLGTNSIGWALIQQDFENKQGNILGMGSRIIPMSQDVLGEFGKGNSVSQTAERTHYRGVRRLRERHLLRRERLHRILNVLGFLPNHYANQIDFEKRLGQFFKETEPKLIYDNKEFIFKKSFEEMLEDFRKYQAQLVDDNKKVPYDWTIYYLRKKALTQKIEQEELAWLLLNFNQKRGYYQLRGEEEEENPNKLVEFHSLKITDVIADEPQKGKVDIWYSLILENGWVYRRSSKTPLFDWKNKVRDFIVTTDLNDDGTVKKNKEGEEVRSFRAPKEDDWTLVKKKTEQEIENSNKTVGAFIYDTLLQNPKQKIKGKLVRTVERKFYKAELESILKEQKKHHPKLQSDDMYNVAVRELYQNNDAHQVTLSKKDFVHLFLEDIIFYQRPLKSKKSSISNCTLEYRKFRAKDKEGNEVERIEYLKAIPKSHPLYQEFRIWQWMYNLNIFKKEDDRSPVTSEFLSSIEDYESLFEFLDKRKEVDQKALLQHFKLSEKTHRWNFVEDKSYPCNETKTQITKKLSKVEAVPDGFLTPETELMLWHLIYSVTDKIDYEKALKTFAKKHQLDVASFVDSFKKFPPFKSEYGSFSEKAIRKLLPLIRIGKYWNWGTINAKVKNRIGKIITGEYDETIKDRVREKSIRLTEEKHFQGLQLWLAQYIVYDRHSEASLAGKWQNIAELESYLKDFKQHSLRNPIVEQVVTETLRVVKDIWAKYGNGAKGFFNEIHIELGREMKNTADDRKKITEQITANENTNLRIKALLAELINDKQVENVRPYSPMQQEILKIYEDGILNSGIEIEDDILKISKTAQPTSADLQRYKLWLEQKYKSPYTGQIIPLNKLFTPEYEIEHIIPQSRYFDDSFSNKVICEAAVNKLKDNQMGLEFIKNHHGQIVETGFGKTVKVFEESEYETFVKEHYAKNRGKRSKLMLEEIPEKMIERQMNDTRYISKFISSVLSNIVRDDRNDDGVNSKNVLPGNGKITSTLKQDWGLNDVWNDLILPRFERINTITNSTSFTSYNENHQKYLPTIPIELSKGFQKKRIDHRHHAMDALVIACATRDQINLLNNQSAKSDTKRYDLKRKLMQFEKVTYTHPQTGERVVREVPKQFLTPWNRFTQEARSELEKIVISFKQNLRVINKTSNKSERWIDNNGIRVKEFVPQEKGDSWAIRKPMHQETVAGLVKLRMQKTVNLSVAIDEVDDIVDRGLRKKIQQLSKEGLDKKKIVKFFKDLENKWEDKNISKTAIYYWDVDENGRGINASSRVALNDTFNKKKIESIADSGIQKILLKHLSKYDGKLDEKGKEIPAELLAFSPEGIEEMNKNIIALNNGKFHQPILKVRTYEPMGNKFNVGHTGNKKDKFVIAAKGTNLFFAVYLDEKGKRNYETIPLNEVIEHQKWRATLPKEEQKSIPMIPVKAENGTFLFCLSPNDLVYVPAEEELEHLNAIDFSNLNKNQIKNIYKVVSFTGNRLYAIPCIVAISIVDKAEFTQLNKLEFSLNKKSIKETCIKLRTDRLGNITKA

SEQ ID NO: 3767 - protein, 1470 aa, unidentified
  REGION 1..1470: note = Description of Unknown: Cas Enzyme sequence
MMQKTILGLDLGTNSIGWALTQQNFETEQGKILGLGSRIIPMSQDVLGDFGKGNSVSQTAERTRYRSMRRLRERHLLRRERLHRVLNIIGFLPKHFANQIDFEKYYGKFKSDNETKLPYDANGFIFKNSFEEMLLDFQKYQPQILKNEKGEDKLVPYDWTIFYLRKKALTQKIEKEELAWILLNFNQKRGYYQLRGEEEEENENKLIEYHSLKIMEVTADEPQRGKPEIWYSLLLENGWTYRRSSKTPLFDWKNKVRDFIVTTDMNEDGSIKMDKDGKEKRSFRAPLETDWTLVKKKTEQEINTAQKTVGAYIYDTLLQNPKQKIKGRLVRTIERKFYKAELKEILEKQKEFHPELRDERLYHNCVRDLYKQNAAHQAILSNKDFIYLFLEDIIFYQRPLRSQKTTIANCPLESRKYRDKNGCEHTRHLKAISKSNPLYQEFRIWQWMYNLVIYKKEDDANVTDELLQSSADFEGLFEFLSSRKEIDQKSMLKFLLERKGFKSKLLSEELERYRWNYVEDKKYPTNETGMTIASRLAKVNHVPEHFLTREIEQKIWHIIYSVHDKVEYEKALKSFAKKNNLDQVSFQEAFQKFPPFKSEYGAFSEKAIKKLLPLMRVGKFWDEDEIVKNSNTYFANIEPLLSDLARRQQNILEDDQQQYNRSINNQLKNQLEILQSAEIQSFQKLRLHIAQYLVYGRHSEAAFAGKWTSPDELEDFLREFKQHSLRNPIVEQVVTEALRVVIDIWTQYGNSAKDFFSEIHIELGREMKQTKAERESATKRITENENTNLRIKALLAEMINDDDAENVRPYSPLQQELLKIYEEGVLNSEIEIDDDIFKISKTAQPTLSDLKRYRLWLEQKYRSPYTGEIIPLSKLFTPEYEIEHIIPQSRYFDDSLSNKIICESAVNKLKDNYTGLAFIKEFGGTKVECGRGKTVTVFKQDLYEDFVKRHYAKNRGKRNKLLMEDIPEKMIERQMNDTRYISKYISGILSNIVRAEDGSDQGLNSKNIIPVTGKITTELKRDWGLNDIWNDLILPRFERMNQLTNSKDFTVWHEYHQKYLPTVPIEYSRGFSKKRIDHRHHALDALVIACATREHVNLLNNLSANANSKRFDLKKKLMKFERVTYRHPHTGEKIERSIPKQFLKPWEGFTIDAKNNLQNIIVSFKQNLRVINKATNYYEKYIEQDGTMKKGKVAQNGTNWAIRKPLHKDTVSGKVDLPWIRVPKGKILTATRKSLDTSFNQKTIGSITDTGIQKILRNYLAEKGSAELAFSPEGIEDLNKNISKYNDGKDHQPIIKVRVFETGSKFPVGYSGNKKEKYVEAAKGTNLFFGIYRDNKGKRSFETIPLNIVIERQKQGLRPVPDTNSEGDNLLFHLSPNDLVYVPNEDNEMNFQLLQNENIPQVTTEFIYKVVSFTGNQIFFIRQEVASPIVNKSEFSTLNKMERALTGKMIKEHCVKLEVDRLGTIKTMKL

SEQ ID NO: 3768 - protein, 1244 aa, unidentified
  REGION 1..1244: note = Description of Unknown: Cas Enzyme sequence
MKKILGLDLGSASIGWALVKEIREADNHKTEIIDLGCRIIPYEGTEGKDFAKGTGESRNAVRTAARTIRRGYDRYQMRRRFLTDILVKHSMMPDETIIALPKMQLWALRSKAANSEISLQEFGRILLLLNQKRGYKSSRSEANLDKKDTDYVSEVKNRHEMIREQGLTVGQYFFRELQKDEYYRVKEKVFPREAYMEEFDRICKTQQVFHPEIAQELIDKIRNEIIYFQRPLKSQKGLVSVCEFAGKWIKKNGKDYFIGPKVAPKSSPLFQIEKVWETINNIKLTTRSGSDLELTHENKLAIFLHLDNNEKLTATDLSKILNLKKGSIILNKQFSKGLQGNLTKHLIWKCLGSTDNYTDLLKLDLKIMKADGEAYLYDRRTGEVLTSKPVHVIDPCVEKEPLYRLWHTIYSISDREKCKKVLQKNFNIAEPVSERLAGIDFSRQGFGNKSVKVIRKILPYLMEGDGYTEAMSYAGYNHSRSVTKVENLGRILESKLKLLPKNSLRQPVVEKILNQMVNVVNTIIEKYGKPDEIRIELARELKQSREERNETDKSMRKRERENESISKRLAEYGLRTTRNNIIKWRLYEEISSQESKLNAMCIYCGSAISLTEAILGNDVDVEHIIPKSKLFDDSQSNKTLAHRHCNRDKNEQTAFDFMKSKSEQAFNDYVDRVNLLYANRIIGKAKKDKLLMPESKIPDDFIDRQLRESQYISRKAREILQTVCHEVWATSGKVTSELRHLWGWDDVTMNLQLPKYKDIGLTEYREWESNFGEHKHRKEVIKDWSKRDDQRHHAVDALTIACTKQGYIQRFNTLNAQKTRDELQSAVNMSNLLTREKLSLLEKYIVSQKPIPVKEVEKAVSNILISYKPGKRVAVRGTRKTGRRGDKKVVQADILIPKGALSEESVYGKIKTVDRNKPLKYLFENSNLIINPRIKEMVENRISQYEGDTKKAITSLKSDPLYFDKEKGILLEYASCFKEEYVIRYKVDINFNKIDKVIDNSVRSILQKRLDKFAGKAKEAFKDITIGENKSVKWYEDEDLSIPIDSVRCFTGLSAVVPVRKDENGRDSGFVKPGNNHHIAIYVDSEGNKTEHVCTFWHAVERKKFGIPIIIKDSSKVWDSIFEAPEGTYPDSFLEKLPQPGLVLDLSMQQNEMFILDMPSEEVNQYLLSNDYKTIGEKLYRVQKLAERNYVFRHHLETQILDDKNAQASKRFLLIQSIGTLYSHSPFKVKIDCLGNISSTVPHD

SEQ ID NO: 3769 - protein, 1249 aa, unidentified
  REGION 1..1249: note = Description of Unknown: Cas Enzyme sequence
MKKILGLDLGSASIGWALITESFENGNAKCKIIGIGSRIVPYEGTEGKDFAKGTGESRNAIRTKARTARKGYDRYQLRRKYLVETLINNQLYPDEATLSLPKMKLWELRDKAVHSPVSLMELGRLLLWLNQKRGYKSSRSDANLGKKDTEYVATVKSRHEKIRELNLTIGQYFYKELSIDEFFKVKENVYPREAYIEEFDLICKTQQIAHPTILTNELINKIRNEIIYYQRPLKSQKGLVSVCEFEGFWRIGKDGKEYFVGPKVAPKSSPVFQLAKMWENINNIKIGSRTGEDLKLTIEQKWAIFQHLNNNEKLTAADLLKLLNLKKENCYVNKQLEKGLKGNITNHAIRQCLRDSDKYEKLFKIELKVVESENEGYLYDRKTGEILNSKPIKYIDPKVEREPLYQLWHTIYSIHDQEECSRVLQRKFEIEQPIADQLAGIDFSKHAFGNKSAKVIRKILPYLMEGAGYSEAMSYAGYDHSNSITKEENKQRKLLDFLKPIPKNSLRQPIVEKILNQTVNVVNAVIEKYGKPDEIRVELARELKQSKEERNDADKAMSKRERENNAIAKRLEEFGLRATRNNIIKCRLYEEIDNEEKKLNAFCVYCGQPISFTEALRGNDVDIEHIIPKSKLFDDSQSNKTLAHRHCNKNKNDLTAYDFMKGKPEAVFNEYVERVNMLYANRVIGKAKRDKLLMPESKIPDNFIDRQLRESQYIAKKAREILQTICHNVWSTSGTVTAELRHLWGWDDVTMNLQMAKYRELGLTHYVEWESEHGKNKHKKEVITDWTKRDDHRHHAVDALTIACTKQGYIQRFNTLSAIKTREDMKFDVEHRSLEFNEKRSLLEKYIIGEQPLRVDEVQKAVSNILISFKSGKKVAVWGTRKVGKRGNKEVVQEKIIVPRGALSEQFVYGRIKTQQQNRPIKYLFENPQLIFKPNIKAKVEERLFMFDGDVKKAIESLKKVPIFLDNEKTVVLENATCLKDEYVIKYTVDINFNKADKVVDPKVKVILLNRLTKFGGKEKEAFKDVQLQDKTIIKWYQDEGLERPIKSVRCFTGLSAVVPVKKDKNGNDIGFVKPGNNHHIAIYSDAKGNKQQHVCTFWHAVERKKYGVPVIINNTNDVWDNLHTQPDGTYPESFLEMLPPPNMNLMVSMQQNEMFILGMTTEEIENAISLGEYRQISGKLYRIQKMSIKPSSGQLDVVFRHHLETQLIDNENSKKSRRFYNVQSLGALFALNPYKIKINSLGNIVMKI

SEQ ID NO: 3770 - protein, 1553 aa, unidentified
  REGION 1..1553: note = Description of Unknown: Cas Enzyme sequence
MENILGLDLGTNSIGFSLRNPNINSDIIQQFENYGSTIFKKGVGSEKGVEFSFAAKRTQKRSIRRLNQSRKYRIWETLDVLMEHGFCPITEDELNQWRRYDKAKGLNRKYPADAIKFEQWVKLDFDGDGKPDYTSPFQLRKELATIQLDIDVEINKYKIGRALYHIAQRRGFKSSKGETIKEQEKEVEERGIVNDTEILIDLKKSEKKIAGKIEDYIEKQKGKGIEIKTVGWALAELENAGERIREIWTPIRLQYENEIKYIFEFQNQLKVQSEFYSKIHKAIFYKRPLRSQKGLVGKCTLEPTKERCPVSHPEFETFRAWSFINNIQFREKNIENGGWINLKQEEKDAIFEHCFMRTKANFKFEEINDFLIKRLNHHYSYNYKDKTNVAGCPISARLKNLFGKEWRSYKFYSTQSRTDKKGNNHIITYSIDDIWHVLFSFEDEENIRDFAENKICLGDKSKALLNLWLAIPQGYSMLSLKAIKNINRFLQKGHIYTDATLLAKLPEILGNDLWLKNEAFFLTHIGELTAKNRKQRKILNISNNLISQYKAKSLEHNEQFAYKSTNYSLDESDLLDIENHCIDSYGDKTWADKMTEEARLQIKSEVSKYYQAFFSSSKRDYFKIPKLGDTLKEFLTDNFEFLQCKNKERKKDEPCSCSACKKVNLLYHPSQIAIYAPAKEQSVEYNNLTLSLRLLQSPKTGAFKNPMAMRTLHELRKLINYLLLEGKINEETRIVVETARDLNDANMRWAIDAYQRQRESENKEYELAIRELLNDSDFDGNANPSNNEDIDRMRLLVDQYDVPEYGELVTDEETIVKSKKEKKKVEKVESFNRSPEFLQKIMQEKDLIKKYRLWKEQEFRCIYTGKTIKITDLFADSIIDFEHTIPRSISFDNSLENQTVCFADFNRNVKKKKIPYQLGNHHEIILRLSNWKSKVERLQDNVEFWKLKSKKATDKDAKDYAIRQKHLWQMELNYWKGKYDRFTMKEVTSGFKNSQLVDTQLISRYALHYLKSVFSSVDVQKGSVTAAFRKIIGIQDEYEKKNRDQHSHHAIDASVLTLIPKAATRDRMLELFYKKQENKDLIKGNTNSTEVAYLKAENGKIESDLEFEIRKCKIGSANKIVETIEGNIIVNAITNDKALSPARKVLRKRGKPVPIRDTNKQPVYITDANGNIKYRTHKDGNLLFKRDEKGQFIFDENGNKTPIPIVEPIIVTGDCIRGQLHEESFFGAIKKVKRDENNKPILLDGKFVFEDGLYYVIRKDLKYKKNANDTGFQTIDDIKKDIVDPNVYEAIRKQVESAGNSLKDAIDKGIYMLGKDGVPKKFDKHGSHLSKIRHLRVYVRSTEPLTIKKQTYISNKPLVHLQNREHKKYYYANNATSPYYVLYQGKIKDKIERKYEIINLFDAARLRINNKLEVQDYVFYDKKEMVKLDLHAILTVGQKVLFYKKEPIELQEIDKREQGKRLYIITGFEKDGRIRFTHHSEARDDKKLMEAFPENGLDKEDKKYGKSGKNGFSSLNWESPWPKLKLSIGNLNMLIENKDFEIKPDGKIILNRL

SEQ ID NO: 3771 - protein, 1512 aa, unidentified
  REGION 1..1512: note = Description of Unknown: Cas Enzyme sequence
MKKILGLDLGTNSIGWALVDTDEKKILGMGSRIIPMSQDVLDTFSGGKPLETQTAARTGFRGIRRIRERQLLRRERLHRVLNILGFLPEHYSNQIDFEKHFGQFVDESEPKLTYNNRNFIFTDSFNEMLSDFKQSQPQLFYTKPNGKETKIPHDWTIYYLRKKALSQKIGKDELAWIILNFNQKRGYYQLRGEDDTDATRTAQTRIYFDRQFINSIVDTGSVYKGLKVIQITLANGDSGKYFSKEVPNWLGLQKNIIVTVDLDKDGNDKFEEDGTLKRRFSIPTEEDWEKKWKLIKIKTEKEIKDADKTVGAYIYENLLQNPSQKIRGKLVRTIERKFYKEELIAILKKQIELQPELFTEDLYNDCVRELYRNNEAQQLILSKRDFVHLFVEDIIFYQRPLRSQKSSIGNCPFEFRIHKSEDGKKVKKYLKVIPKSHPLYQEFRLWQWLTNLKIYRKEDDANVTTEFLKSTEDFVALFDFLMTQKEVGHKDIMKHLATPTLKEKFPNVKPAVFNKEIDKEIAKYRWNYVFDDSKEKEEDKSKKYPCNTTGYEIRRRLGKIENVPTDFLEITDTKEVEIRKGQKKGQKITVSLGTREYQLWHIIYSVTDKKEYEAALKSFANKYKLDENSFVEEFRKFAPFPSEYGAYSEKAINKLLPLMRQGKYWNWNIIDAKTQSRIQKIVSGEYDENIKTRVREKAINLTDNNHFQGLPVWLASYVIYDRHSEADIAGKWNSVAELEQYIEDFKQHSLRNPIVEQVVTETLRVVRDIWKKYGQGAKDFFSEIHIELGREMKNTADDRKYITEQVTNNEATNLRIKALLAELKENSDGKLLVDNVRPHSPSQQDVLRIYEDAVLNSTAELPEDIAKISKSAQPSKTELQRYKLWLEQKYRSPYTGSVIPLGRLFTEDYQIEHIIPKSRYFDDSFNNKVICEAAVNQLKDKQLGWEFIKNHHGEKVECGMSKVVEIFTKEEYQAFVKEYYAKNKTKRQNLLLDEIPEKMIARQMNDTRYISKYISSLLSNIVRADKEDDGVNSKNLIPGNGKITTALKQDWGLNNVWNDLVIPRFMRMNELTKTNDFTSINQEGHTIPAMPLELSKGFQKKRIDHRHHAMDALVVACMTRDHVQYLNNENAKSQKFHLQQGLARKLRRFEVVEISKMKKNEKGCWVKGEEKIEKEVPKEFFKPWYNFTVDAKTALETVVVSFKQNLRVINKATNNYQKWVIKNGKKVKEPIKQEGVNWAIRKPLHKETVSGKVILNRIKVPKGKLLTASRKNVDTTFNRKTIDSITDTGIQKILISFLEFKSNNPEIAFSPEGLEEMNNNIRQYNNGIPHKPVKKVRIFELGSKFPLGESGNKKEKFVEAAKGTNLFFAIYQKEDGTRTFETYPINVVIERLKQGLTEVPEINEKGEKLIFTLSPNDLVYVPSEEEKQNQQTPNLEQLAAEQVGRIYKMVSCTGTECYFINHHIASLIKPYDAKSKIGELGSINKLETSFDGIRIKEVCKKLFVDRLGGVTF

SEQ ID NO: 3772 - protein, 1531 aa, unidentified
  REGION 1..1531: note = Description of Unknown: Cas Enzyme sequence
MKKILGLDLGTNSIGWALINHDFEKKEGEIIGLGSRIIPMSQDILDNFGKGQSHSQTSERTGYRGVRKLYQRDNLRRERLHRVLNILGFLPGHYRNKIDFEKKLGQFNNNEEIKLNYKPIQNEAGTGNKYEFIFKDSFGEMVKDFKAKGQSIKIPYDWTLYYLRTKALTHRISKEELAWILLNFNQKRGYYQLRGEEEEIDNDKLKEFCELKIAEVVDSGDEVKGKKLYDIKFTNGWSYDRQTTKPEDWQGKTREFIVTTSTTSKGEIKRTFKAVDSEQDWIAIKKKTEQDISKSNKTVGQYIYETLLKNPTQKIRGKLVKTIERKFYKEELRKILDNQREWHGELKDRSLYKACIEELYPRNEAHTSNIKDKDFTYLFLEDIIFYQRPLKSKKSSISNCSYETRAFKKKLQLKENDKVVEKEITVTEGVKAIPKSNPIFQEFRLWQFLQNLKVYKRETKVNNKTIIDLDVTNELLTTEEDWVELFEFLNTKRTIEQKQFVDYLRIQKKLLKTEKSNYRWNYVEDKKYPANDTKAQFLSRLKKVEGINLEEFLTNNVEQHLWHIIYSVKDKLEFEQALKRFALKYKVNENSFVENFKKFPPFDNDYGSYSQKAIKKLLPLMRRGKYWNEATISEEVKNRANSIRERLEIIDFDKLKIDETIADDDIQKQVLKSFASFKSKNMLQGLNTFQACYLIYNRHSEATETTKWKLPFDIAKYLEEFKQHSLRNPVVEQVVTETLRVVKDIWEFYGEGAIDFFKEIHIELGRDMKNPADRRKQIALKNTENENTNYRIKQILTELMNDSNVEGDVRSYSPNHQELLKIYEEGVYQNPDAKFNDINLDDIDKIRKNASPSQNDIKRYKLWLEQGYCSPYTGKIIPLGKLFTTDYQIEHIIPQARYFDDSLTNKIICESEVNQLKSNQTAYEFLKKENGRKVGIGQGETVTLFTTTEYEEHCNQYFKKNKAKLQKLLSEDIPEGFIERQINDSRYISKLIKGLLSNIVKEENEQAVISKNIVPVTGAITSKLKNNWGLNDKWNEIITLRFKRMNEIKDTNEFGYWDNKINAFRIQVPDEISKGFSKKRIDHRHHALDALVIASVDRRHIHYLNALNNEKENYSLRDSLLVKNGNRHYTKGFLMPWRNFPIQAKEALEKIVVSFKQNLRVINKTNNKTWQWIEKNGQLKKELVKQTKGENWAIRKSMHKETVSGEVKVRKRKLVSFTNGIKDWQNLVDKGLKDSIRSMINDGNDNKAIASYFKANPYQINGKPVSKVEVYEFTKNATATRISLSDKFTRKQLESVTDSGIRRILENHLKNYVVDDKERFDLAFNPTGVEELNEYIVALNNGKKHHPIYKVRLYEEGKKFQVGQNGRKASKYVEAAKGSNLFFSIYWNKEKQKREYETIPLNEVIEHQKQVAHLPKKERTPVPINHKKGEFLFSLSPNDLVYVPTDEEKENPSIVNFSELSVEQAKRIYKTVSSSTYQCFFVPNYVASTIQNKVELSALNKMEKSIDELMIKERCWKLGVDRLGNIVNKTL

SEQ ID NO: 3773 - protein, 1516 aa, unidentified
  REGION 1..1516: note = Description of Unknown: Cas Enzyme sequence
MKKILGLDLGTNSIGWALVGTNEEGKPCKIEGMGSRIIPMDAATLSDFDKGNSKSQTAERTGYRGIRRLRERYILRRERLHRILFKIGFLPNHYAQRIDFEKRLGQFLSETEPKIAWFKNSNDQYEFLFQNSFNEMLADFKEHQPQLLEDDKKVPYDWTIYFLRKKALNYRIEKEELAWILLNFNQKRGYYQLRGEDEDENPNKLVEFYALKVVSVEATDEKKGKDIWYNVHLENGWIYRRTSNVPLDWVGKIKEFIVTTDINDDGTLKLDKDGQEKRSFRAPKEDDWTLVKKKTESDIDQSRKTVGWYIYDTLLQKPNQKIKGKLVRTVERKFYKEELKAILEKQKEFHAELQNQELFSECLKELYANNESHRNTISNRDFTYLFMDDIIFYQRPLKSKKSLISDCPYEVRNYLDKETGENKAVPVKCIAKSHPLFQEYRLWQFISNIRIYQKERWMNEKLHTDVDVTSEFLKNEDDLTDLFDWLNNRKEVDQKAFLKYPGFGLKKEADNYRWNYVDDKSYPCNETRSMILNRLEKVDNVPANFLAKENEEALWHILYSVDDKHEIEKALKSFATKHNLDDGFVDAFKKFPSFKKDYGSYSAKAIKKLLPLMRMGKYWNEDSIDLNTKLRIDKILTGEYDEKIRTRVREKAISLNDISNFKALPVWLACYIVYDRHSESKEIAKWEKPEDLDAYLKSFKQHSLRNPIVEQVITETLRTVRDIWKKHDNFSEIHVELGREMKNPADKRKRMTEQINENENANLRIKSLLMEFINPEYEIENVRPYSPSQQEILRIYEDDVLKSGIEIPEDVENILKKFKETDAKKQPSRSDVLRYKLWLEQKYRSPYTNEIIPLSKLFTTDYQIEHVIPQSRYFDDSSSNKVICESEVNQLKDNCLGYEFIKNHHGQKVELNFGKTVEILSVEAYEKLIKDNYSRNRGKMRKLLMEDIPDGFIERQLNDSRYISKVVKSLLSNIVREEGEEEATSKNLISCTGGITDQLKRDWGLNDVWNTIVYPRFERLNELTKSNQFGQWENKNGNKVFQTQMPLELQKGFNKKRIDHRHHAMDALVIACATRSHVNYLNNEAAKASAKESRYDLRRKLRRIETVQIEKLIDGKKVLKYVEVAREFYKPWATFTQDAQTALGNIVISFKQNLRVINKTTNSYQHFDENGKKIIEKQKSGESWAIRKPMHKETVFGSVNLKKIKTVNLSSALDHPELIVDRRLKSKIKQLLSEELDNKKIQKYFKDKTEEWSDNNFSKIEQYYFTTDTKEKLVATRKLLDNSFTSKKIEESITDTGIQKILLKHLENNSNNPELAFSSDGIDEMNRNIRELNDGNHHQPIYKVRVYEPLGNKFSVGTTGNKSAKYVEAAKGTNLFFAIYVNEVGKRTFETIPLNIVIERQKQGLISVPEANEKGEKLLFWLSPNDLVYLPTPYEIDSNSLHDEIKKDRIYKMVSCTGNVGDFIPAFVANAIVQTIELGSNNKAQRAWTNEMIKEICVPLKIDRLGNVIEINRIEI

SEQ ID NO: 3774 - protein, 1516 aa, unidentified
  REGION 1..1516: note = Description of Unknown: Cas Enzyme sequence
MKKILGLDLGTNSIGWALVGTNEEGKPCKIEGMGSRIIPMDAATLSDFDKGNSKSQTAERTRFRGIRRLRERYLLRRERLHRTLFKIGFLPDHYARSIDFEKRLGQFLSETEPKIAWFKNSNDQYEFLFQNSFNEMLADFKEHQPQLLEDDKKVPYDWTIYFLRKKALNYRIEKAELAWIILNFNQKRGYYQLRGEDEDENPNKLVEFYALKVVSVEATDEKKGKDIWYNVHLENGWVYRRTSNVPLDWVGKIKEFIVTTDINDDGTLKLDKDGQEKRSFRAPKEDDWTLIKKKTESDIDQSRKTVGWYIYDTLLQKPDQKIKGKLVRTVERKFYKAELKAILEKQKEFHAELQNKDLFSECLKELYANNESHRNTISNRDFTYLFMDDIIFYQRPLKSKKSLISDCPYEERNYLDKETGEIKTVPVKCIAKSHPLFQEYRLWQFISNIRIYQKERWINEKLHTDVDVTSEFLKNEDDITDLFDWLNNRKEIDQKAFLKYPGFGLKKEADNYRWNYVDDKPYPCNETRAMILNRLEKVENVPANFLAKENEEALWHILYSVEDKHEIEKALKSFAIKHNLDDSFIDVFKKFPPFKKDYGSYSAKAIKKLLPLMRLGKYWNEDSIDSNTKLRIDKILTGEYDEKIRNRVRDKAIRLNDISTFKGLPVWLACYIVYDRHSESKEIAKWEKPEDLDAYLKSFKQHSLRNPIVEQVITETLRTVRDIWKKHDNFSEIHVELGREMKNTKTERERISKINSDNENANLRIKSLLMEFMNPEYEIENVRPYSPSQQEILRIYEDDILKSVIEIPDDVEDILKKFKETDTKKQPTRSEVLRYKLWLEQKYRSPYTNEIIPLSKLFTTDYQIEHIIPQSRYFDDSSSNKVICESEVNQLKDNCLGYEFIKNHHGQKVELNFGKTVEILSVDAYEKLVKDNYSRNRGKMKKLLMEDIPDGFIERQLNDSRYISKVVKSLLSNIVREEGEEEATSKNLISCTGGITDQLKRDWGLNDVWNTIVYPRFERLNELTNSNQFGQWENKNGNKVFQTQMPLELQKGFNKKRIDHRHHAMDALVIACATRSHVNYLNNEAAKASAKESRYDLRRKLRRIETVQIEKLIDGKKVLKYVEVAREFYKPWATFTQDAQAALINIVVSFKQNLRVINKTTNSYQHFDENGKIILEKQRNGESWAIRKPMHKETVFGNVNLKKIKTANLSSAIEHPELIADRRLKFKIKQLLSEGLDNKKIQEYFKDKTEEWSNINFSKIKQYYFTNDTKEKLVATRKSLDDSFTSKKIVESITDTGIQKILLKHLEDNSDKPELAFSPDGIDEMNRNIKKLNDGNQHQPIYKARVYEPLGNKFNVGNTGNKSSKFVEAAKGTNLFFAIYVNEEGKRTFETIPLNIVIERQKQGLISVPEANEKGEKLLFWLSPNDLVYLPTPYEIDSNSLHDEIKKDRIYKMVSCTGNVGDFIPAFVANAIVQTIELGSNNKAQRAWTNEMIKEICVPLKVDRLGNVIEINRIEI

SEQ ID NO: 3775 - protein, 1130 aa, unidentified
  REGION 1..1130: note = Description of Unknown: Cas Enzyme sequence
KMATSKILLKEHNIYTADIKGSRDEKKLKTFELRSKAITEKLSLDSLAYVLAEVNNNLNSSSGYLGAISDRSKELYFNKQTVGEFMHAKLSENPNYSFKNQVFYRQDYMDEFEVIWETQAKYYPELTNNIKHEIRDITIFYQRPLKSQKHLISNCEFEKYHKAIPKSSPLFQEFKVWQVINNIEVTQKSTKTKYNLDIEQKKQLFAELNIRGKLKDTQVLELLFKKPKEWSINYKEVEGNNTNKALFDIYKTILHQEGYDIDFEKISVEEIIETTTTIFKEIGINADILNFNTNLSGNEFDKQPSYQLWHILYSIESDKEVIKALQKHFGFKENYARLLSNIRLQSDYGSLSARAISKIIPFLKEGNQYDVACDYAKYNHSSYLTKEEIETRILSDKLNILKKNSLRNPVVEKILNQMVNVVNAIIDDPDLGKPDEVRVELARELKKSAKERENDTLNINKAKINHEKIRDLLSKEFGIKNPTRNDIIRYKLYCELESNGFKTLYSNTYIPREKLFSKEIDIEHIIPKAKLFDDSFSNKTLEYRNINLEKGDKTAIDFISEKYDKEFVEEYKGRIERLYKAKTDGLSKGKYLKLLMAEKDIPSDFIDRDLRNSQYIAKMATQMLNEVIRKVYTTTGSVTSRLREDWGLVDTMKELNFGKYKELGLIETIEGKNGESKERIKDWSKRNDHRHHAMDALTIAFTKHSFIQYLNNLNARSIKTSDASGIEQKELYRNDKGKLLFKKPFDNFRGSAKTHLESILISFKAKNKVVTKNINKTKQAGNHSPLTKVQLTPRGQLHKETIYGSMKQAVVKEEKIGLQFTAEYINNVTKPIYKEALLKRLNEFGGDPKKAFTAKNSLAKNPIYLDADKTLTLPEKVKVKLYEVDYTIRKEISPELKIEKVIDLGIQKLLYNRLKEFNGNSKLAFSNLDKNPIWINKEKGVSLKRVRISGVKNTVALHDKRNNRGELLLDSNGKSQPVDFVSTGNNHHIAIYEDEKGKLQEKVVSFFEAVSRVNAGLPIIDKEHNSNLGWKFMFTLKSNEMFLFPSDGFDPKEYDLLSTDNMTVIAKNLYRVQKIATKNYMFRHHLETNVDEAKELKNIAYKNLRNTEALKEIIKIRINHLGRVVHVGEY

SEQ ID NO: 3776 - protein, 1256 aa, unidentified
  REGION 1..1256: note = Description of Unknown: Cas Enzyme sequence
MKKILGLDLGSASIGWAVISEYEENGFPKINIDGLGCRIIPYEGTEGKDFAKGTGESRNSLRTQARTARKGYDRYQLRRKFLVKVLLANGLYPNDELRNLPKLKLWELRNIAVTQKISLHEFGRLLLWLNQKRGYKSSRSEANADKKETEYVTLVKSRHQFINENSLTIGQFFYKELSNDEFFRVKEKIFPREAYIEEFNAISKRQMIEYPTILTTELISKIRDEIIYYQRPLKSQKGLVSVCEFAGFWRKGNDGKEYFVGPKVAPKSSPLSQIVKIWESINNIKLSSSKGSDIEITMDQKHEIFEYLDNHEKLSLPELLKILKIKKEDCVANKQLSKGIQGNVTKHLIRKALGDSAKFDNLLALDFNVIEKEKQGYLYHKKTGEVIGSKPISEINPDIESQPLYKLWHTIYSIQDEDECSIALQKKFGLEEVDANKLAGIDFSKFGFGNKSTKVIRKILPYLMEGDSYYAAMCYAGYEHSDSMTKDENMSRKLLDYLKPVAKNSLRQPIVEKILNQMINVINALIYQYSEKDYTGTITKQFHFDEIRIELARELKQSKEERNETDKFMAKRQRENDAISKRLAEYGLRATRNNILKWRLFEEIDNDEKKLNALCIYCGQPISLVEAIKGTEIDIEHILPKSKLFDDSQSNKTLAHRHCNKDKNDRTSFDFMKSKPDHVFNDYLERVNSLYANNVINKSKRDKLLMTESKIPQDFIDRQLRETQYIAKKAKEILQAICNQVWSTSGTVTSELRHLWGWDEVTMNLQFEKYKAVGLTKMEEWESNFGKSKHQKEVIQGWTKRDDHRHHAIDALTIACTKQGFIQRFNTLSASKTREDMQFELDRRSIEFKEKLSLLEKYIVSQQPIPVKDVEKAVANILVSFKSGKKVAVKGTRKIGKRGNKKIIQTGIIVPRGALSEQFVYGKIKSIEAKRPIKYLFENPDLIFKPYIRRLIEDRIRQFEGDIKAAIASLKKAPIYIDKDSSVLLEYATCFKEEVVKKYEIDINFNKVEKVIDKKVKEILQRRLDKFGGKAKEAFKDVQFEDKRIIKWYDDEGLSRPIKSVRCFTGLSSIVPVKRDESGKEIGFVKPGNNHHIAIYIDEFGNSIEHICTFWHAVERKKYGLPVIIQNPSQVWDIIEKSKDGAFPESFLEQLPQLNWELKLSMQQNEMFILGLDEDDFKMAINANDKSFLSKHLYLVWSISESDYWFRHHLETKNAEIKSIEGARESKRFYRTQSLGAFNSLNPIKVKIDCLGNISI

SEQ ID NO: 3777 - protein, 1299 aa, unidentified
  REGION 1..1299: note = Description of Unknown: Cas Enzyme sequence
MEHTIGLDIGTNSIGWVLLKTDQILDKGVNIFPIGTNLIKGVQEETKNHQRGMYRRAKRNLFRYKLRRKELRKKLKELGMIPDFLKLNKVKNQYQASDLYKLRADALYGKIPIDEIGRIFLLINKHRGFKSNSKVLAQKTDEEGIVKEGINQLQSFMKESQAKTLGEYFHKMYERSKSIYEEKKWHNIDEPYDERAASKDGDLVLHNSRGIRRENGRYVARAMYEREFDLIWEEQKKHYPQLTGSRTEYDEICRLPIEQKRTALKVFKTTAYWGVKHETIFFQRPLKSQKKFIGKCQYEKNKRTAPSSSLLFQEFRIRKQLSDVRYSDVENEIRKQPLPYEWKIQLYNYLKINRKLNLREGNKKKDGTKNADVMDVLGLQNKKRYKFNFDNGDDDKVFEGNQTLYAIYTACGVDLFNELEKQNRLEKLWHLIYMAKDDEWLKDTLLSNWILDPDIVKNEEIVNKLVEMGLEEGFGNYSSKVLKNILPFMRDGKDEYDAKVLANYEKAPDEVKDEEPLKAQISQLKNNELRNPVVERAVAQTIKLVNTIIGNGTYNIDQEHLTIRIESTREFKKPKTEREKIRRGNSEKEKKREEYAKFLNEKRQEGKLSFVREIYKNDSIIGKFELWLELGGDKDEPSFKEFEKVAERKDREKHALWLECNRICPYTGKVISLSKLFSSDVEIEHIIPYSRSLDDSFANKTVTFCEVNKEKGDKTAYEYLKGKGERIFNEFKSRIKVFGKEKEENKFLLDKVPTEFSNAQITNTSYIAKYVRKKLQEVCWDVQFTNGSATGELRKNDWRLGNVLDKIRYEEETGIDIDDYFREIGLYKKDFEVWRSKKANSTDVLKTDWRNITPETTLEYEMQTKNPLYEWWQKIQDFETFRGGRGKKDRSDHRHHLLDAIITACCSRSIVQQLSTLNQTRERQGYSMYDGKGNLTRRKIECPLKYEQIKEALRGNLIYHKSDQKLITSKVNRIKISKEKGGLVKQKTFAVRGSLVGDNFYGKLKNPRHQGFDRDIVYVKRVTLNGENFKDKNGLDKIVDSNVKKILQRRLESSKYAGKGEKAFSEEAMKNDPVYLYSVKKYPNGIPENPVNKDGNMLPVIKKVRVANKNSRNLIQLAAKSDERDSAGKRIILNKNRYAEADGNYVMALYEKKQFDAKGRKKKSLREFEIVSLFESVRRKSEGKRLFSDEKNGIGLMESCPYLIIGDMVVMYEEDESEINWEDLDSLQKRLYRVSGMSSEEKYGILSFVKHDKTSQNASYGKAAYKYGSNQISFASRHTQLNIVKVSITQLGKIERLHG

SEQ ID NO: 3778 - protein, 1180 aa, unidentified
  REGION 1..1180: note = Description of Unknown: Cas Enzyme sequence
MKTKKILGLDLGVSSIGWSLIALNEKEEPAEILGMGSRIVPLSTEDADEFQKGAAISKNSRRTLLRTMRKGINRYQQRRTRLTRILQSQGMLPTQELIQLPTLELWELRAKAATAGEKLTLAEIGRVLYHLNQKRGYKHAKGDSNPDEDGKGKKETDYVVAVKGRYHELRESNLTIGQHFAQALKSSEQIGKHGPVYTYRIKDQVYAREAYIEEFDQIMEVQSAFYPEKLNKSLTQELRSTIYLQRPLKSCKGLVSYCEFEKKQRLVKVRLAGKEGEEIIKEQLVDIGPKVAPKSSPLAEVCRIWETLNNIRIYFPDGSDRPISIEERQRLFEELQTTEKLSFSKVKTLLKIKKQEETWTNDLLKGGIKGNATCQALRKAFADYSHYTELLAFDLSEKEGNADPDTGELRLVIDERYQQTPLFKLWHILYSIEDREAMGRALEQQLGITRKDLDAGLLDKLFQIDFTKQGYTNKSSKFICKILPYLQKGSMYSEACELAGKRHSAASLTTEEIDERPLLDVIPILPRNALRQPIVEKILNQMINLVNELRKQHGEIEEVRIELARELKMSREERAQATKNINKNKKENEQIAKLIEEHQLYPTRSRIQKYKMWKETNEQCIYCGKQVNLVTFLRGEEVEVEHIIPRSVLYDDSLSNKTCSCRACNHAKGNRTAMEYIQTLDTDRQDEYFKRVQKLFEEKKISYAKCSRLLMTTEEIPQDFIERHLRLSQHIAREAQHILRQGIRRVYASEGSVTATLRHLWGYDEILKDLNFDRYKSMGETEVIEVGGKLIEQIKDWTKRRDHRHHAIDALIVACTRQSYIQRLNRVNSEEDRDEMNDAVKGKKYKEKQLLLERWLIAQPHISTQQVKDKVSQILISFRPGKRTYSRGKNKFKQHGKTLTQLGILIPRGPLSEETVYGQILDRKGVEQIVVKYPLHSIQKEDLPYVVDQGLRRLLEERLTKYRDDPKKAFADPLYSDRDKTQQIRSVRCFTGRDREKMIPLRFDEQGKPISFVAPGSNHHVAFYRDSKGKAHESIVTFWHAIERLRYGLPIIIKDPAEAMKQAQSIPDLPEAIRQKLPNTDWKLIETLSSNEMFLIGMTDEEIQQTISQHDYSTLSKHLYRVQKIATKNYWFRYHLETVLDPPNGQGIIPKFYRITSFKRYAKLNPRKVHINILGQITLI

SEQ ID NO: 3779 - protein, 1398 aa, unidentified
  REGION 1..1398: note = Description of Unknown: Cas Enzyme sequence
MKKILGLDLGTTSIGWALVNEKEAEGEKSSIIRLGVRVNPLTVDEKTNYEKGKSITTNADRRMKRSMHRNLQRYKLRRNNLIDCLLEHHIITDETPLNEQGNNTTFKTYRARAKAVTEEISLDDFARVLLMINKKRGYKSSRKVKDGEEGELIDGMEIAKRLYEENLTPGQLLLDLYKKGKRNRPTFYRSDLQAEFDKIWEVQSAFYPNILTDDFKSSIHGFNKTQTSGAFYGVHQVFTAKNSGKEGYVQSLTWRTEALKHKLDIEEVAYALADINGAINNSSKRLAMISDRSKELYFNHQTIGQYLMQRLDENPNNSLTNIIFYRQDYLDEFEAIWEKQSKYHSELTPELKKEIRDIIIFYQRDLKSCKNLVSYCELEHTEREINIEGKKKTILTGCKVCPKSSPLFQTFKIWQVLNNLQVSVIGTQRKKNKKNKSELSLFNDVEAGALNRFLTQEEKDILYNELSIKDKMSKKDVLKLLFDNPKDLDLNYKEVEGNRTMATLFKAYQDIISLTGNGEYDFSKMRTNEVMAITTEIFAGLGYKTDFLSFDPLLEGKALEKQPAYHLWHLLYSYTGDKSVTGNEAMLNRIKEICGFEKEYAIILANVSLALDYGSLSAKAIRKLLPHMMKGYEYSEACKMADYNHSARSLTKEELANKDYKSHLDEIKRNSLRNPVVEKILNQMINVINEIVRTYGKPDEIRIEMARELKKSQEERELLDAAIRRNTTESEKLRKELEEEFGISHVTKNDILRYKLYNELKLNGYKTLYSNTYIPREEIFSKRFDIEHIIPQSRLFDDSFSNKTIEARDVNIEKGNMTAYDYVAEKYDDKGLVDYESRVEELFRNNVISRTKRNNLLMKEKDIPSDFLERDLRDSQYIARKAREILEEMVPFVVTTTGAVTNRLREDWQLINIMQELNWDKYDTLGLTERYTDKNGNIVKRIKDWTKRNDHRHHAMDALTIAFTKRSIVQYLSNMNARSDKSSSIYGIEQKELHRDEKDHKLVFNAPMPLDEFRAEAKKHLESILVSIKAKNKVVTKNINKAKTKDGYQQKVQLTPRGALHNETVYGKIRNYEAEYRKVDGKFTEETILRVSNQKYREALLNRLAEYGNDSKKAFTGKNSLEKNPIWLDKDHSYAVPPKVKLYKIVDVFTIKKAVDKDLKIDKVIDNKVRAILQARLDDYNGDASKAFSNLEENPIWLNKEKGIAIKRVKIKAKVSSDTSVPLHVKKDLLGNILKDGEGKVLATDYVNTANNHHVAIFIDSEGNWHEHVVSFFEATASALLGLPVVDKNYKNEEGWQFLFSMKQNEYFVFPNEKTGFVPSEVDLMDAKNYPLISPNLYRVQKFSSLFYVFRHHLETNVDESNELRGTTWKRITSIKGLDGIVKIRVNHLGNIVAIGEY

SEQ ID NO: 3780 - protein, 1044 aa, unidentified
  REGION 1..1044: note = Description of Unknown: Cas Enzyme sequence
MKYILGLDLGTHSAGWAILELDSAGKAAAVKDAGVRIFEAPVEPKTQAPKNLARRTARQHRRQLARRKQRRVKLTRVLQEAKLLPVNQVELETLLLDDNECNPYMLRAKGLDSELGGYEFGRVLFHINQRRGFKSNRKTSFSEVLKKVPAIAELIEQEESAESTKILQKQNKLSAATTGDDDDGVVKAGISLLRATIETSNARTLGEYLYLVKEGRASRPNRMSIEVPKKVRGLYTERAMYEDEFEQLWAKQSQYNQSLDAQLKVLVFDAIFSQRPLKTQKYLVGDCVFEYHRKRAAKATLEFQRFRFLQTVNDLEIKNTATRLYRKPTEQQRLNLLALLEKSEKVTWGRVRKALQIHSGETINFEEGGKEELLGDSTSSRIGKAISAQWEALSVEKRNELVADLLTIPQKDWLLVRLLDHWKFSPVEAYKLAILTLEPGYGAVSMKALRKLIPLMGGGLNYKTACDKLSYIEGANRKSTAGEVLPFPPNVRNPVVQKALYQVRRLLHAIVRKYGVPEIVTVELARDMKLSKKQKEESEARNRKNKRERDIARAALQSNGLPEPSHDDLLKYRLWKEAGCMCPYTGQPISMGMLLGKEGEVDIEHIIPYGRCLDDSYMNKTICLASENRAGKREKTPYEAYSINEERYEDLLSRVSHMSEMPFGKKRRFELRPEDISLDEFVTRQLNDTRYICREVSNYLLGLGCRVQVSKGEATSALRHKWALNEILSPDGSGEKNRADHRHHAIDAIVVALTTPTLFRQLSNLSAQTGFGIKNRRFLLEEPWRNFHKSVEDLVEAIVVSHEAHRKITGKLHEDSAYGPTEKEGQFVRRRSIEDLTAKDLPDVRDGAVKAILTQQLERFNGSAEKAFSMPVSHNNPSILIKKVRLNVRLNPEIVFPISRGGGTPFKYHNLGNNHHVEVIQDNASKKFEFEIVSAAEAARRVRREGSPVVKTDFGPAKKFVMSLCANDTVELSGKDGVRRVFRVKSFAKERDRRRIVLQLHNSASPTDFERLPPNGFQERKPRKLEVDMLGRIIDSRMNDKSNN

SEQ ID NO: 3781 - protein, 1194 aa, unidentified
  REGION 1..1194: note = Description of Unknown: Cas Enzyme sequence
MPPLLGLDLGTNSIGWALIDDSSSKIIDCGVRIFPEGVNRDTLGKEESKNATRRIKRQARRQLFRRKYRKLRLARYLMDHGMFPSVTNLSENIQKLRLSPELREFFGLNPYECRSKAYNGEKLSLLELGRTFYHFAQRRGYKESLKDDAADSGALYDGVVKEGKTGINETWEKIGQYGSLGNYLFHENPHQKRLRNRYTTRKMYTEEFEKIWEKQKVFYSSLLTDEMKQKIGDATEGFLFFQHPLKPQKHLIADCTFEPGKKRTSDSTIAFELRRMYEFINTILIDGLPLAVDQRSTVKDMMLSKEKFDFAEIAKKLKVAVTRFNYEENKRIVGTLSISTLRKIFTPKIWDAKSLNEQEDILNIKRFAEDKSKTINYLKTKHGLTDKQAAQFVKFRPSKGYSALSYKATLNILPFLEKGYIYNEAVLLGGIYNAFGKENWNSLSPSQKDYIETNALEIYDNMGAEHMAILRDWLGKEFGLAEKRLEKLYHHSKLVGRGDGEAQELPLPEDTRNPVVQQALYELRALVNVIIKEYGKPEEIRMELSRELKSSIDERDKMRLRQYENEQENDAIKKELSDYGLPHTNAYIIKLKLYREVLKRAGKVACPYSGNTIALSQLWNGEVDVEHILPYSISLDDSLANKTLCYREFNARKSNRTPAQFFLTEFGKEDWEERKKQAFSLLPYLKWLRFIDEKPHTLEEFENRKLNDSRYISKLAKGYMEHICKSVNVTQGEVTAKLRHYWGLDNILNPCIRIEGVPEGEYYAAINEEGKIIKLEKWQPDGRSNRKTEEQLAKLGVVISGNIKKNTFYPYKSRNDHRHHVVDALVIACTKRSFLQHLSTMKGKLSKEEFEARELSFPEPWAGFHRCAEEAVNQVLISHKSKRRVVTQVSKTIARDDKKFKTSGTSVRGPLHGETIYGKRKDIYGSEAFHIRKPLSQITKRAQVDKIVDPAIKKLVEQAIIQTWSEKDTATFKTYQSEGLLVARGEHWEINSSNKTKYEVPEGAFFDTQRDESGKKITGIYPKLFLPNRNGSPVAIRKVRLKENSSAAVQLKDNYNQWVEPGSNFGVIIYETQAGEWEEKLVSFWDAVECKKQNVPIFHLPADGKRVIATLQINDMLLIDLQDEEIDWKNKSLLSKHLYRVQKLSSYYYTFRKSSATTLDFAKEEARIVSFKSWRERNPVKVTVNLLGKIAPLK

SEQ ID NO: 3782 - protein, 989 aa, unidentified
  REGION 1..989: note = Description of Unknown: Cas Enzyme sequence
MARILGLDIGTNSIGWAVIEHNTATPSELAGTGKVLGSGARVFTAPVEDKTEAPKNQKRREKRGARRIIARRRLRRDELQEILTSVGLLPSGKEERDTLWNTINPYLVRAKGLAEKLTLHEFGRTLFHLNKRRGFKSNRKADRKEKDKDKGKVLGAIKELSENIARSGAHTLGEYLYKKGETVRIRNQYTHRDMYEDEFNKLWTAQSAFHPELTGDLNVKIHKAIFFQRPLKSQKNLVGFCELEKKIWRLPDGRHIDKGPKRAIKSHPIAQRFRTLQDITNLKINGRPLTAEQTKAIMAAINGKEKLTWVQVKKAAGLHKETKLNLEETGKKHIPGDYTFHRMAKELGKKWDGLDDSQRENLYTDIETIENDGALLKRLAGAWGFSAEESDKLAKVELEDGYAAHSLKAIKKLIPHMEAGLTYPSAKIAAGYGGVSGASEGVNFLPEPPQVRNPVVQKALYETRKVVDAIIREFGKPDIIRVELARDAKLPKKVKDDIRTKNNKRRDENEGINEDLKKEFGLANPTREDRDKYRLWVECNRTSPYSGKAISENQLFSPDVQVEHILPWKRSLDNSYMNRTLCFQNENLEKGDRTPFEAWGYLEQKWGEIETRISHLPLAKRRRFYMTEIPEGFLDSQLTDTRYITKEVCGYLEALGVKVQTNKGLFTSWLRYEWGLASDILPRRKTDEKSGKDRSDHRHHAIDAIVIALTGPWMVHVMSRATSTNGRIRIPNFPAPWHGFREEVKETINNIIVSHRATRKIRGALHEETSYGKTSQPGVFVRRKAIANLSASEVGNIRDARIRQMVEDRISEYGGEIDKALKSEFFIGKTPVKKVRISVKMREDTVFPIKDETGQPYRYVTFGNNHHIEIIKNLKTGKYGGVVVTTMEAARRARIGKKALIQRDHGQDYEFVMSLSINEMVKIPVDGKEECYRVQLLDQASSTITFRKHNSADIKDNSTRLFKNPNTLMQSNVVKITVSPIGEVSKAND

SEQ ID NO: 3783 - protein, 1018 aa, unidentified
  REGION 1..1018: note = Description of Unknown: Cas Enzyme sequence
MNHKPVTVPMVLGLDIGTNSIGWALIDTDPTTGRAVGIRDCGVRIFQEAVDAKTRTPKNAARRSARLLRRLLARRARRKRKLMNLLIKYGLLPPEIAADDAKPEIILNALGDPYELRTKALDEPLQPYELGRVLLHLCARRGFLSNRKAHLVAYLAEEFSDYLAQIDDTDDAANSSASTEDLGKVKDGIKKLSEEIHVSGCRTLGEYLYRLDRHTRKRARFTSRQMYLDEFEMIWESQARYNPILTDDLKIQVHQVIFFQRPLKSQKSLVGKCLLEPGRKRTAKARLEAQQFRIWQDINHIEIQNPETRAWRRLTQEERQKLFHALHEKKSLSWSGVRKLLGIHRGERINLEEAKDKLIGNLTWIELSEALGDRWSRMSDTERQSLVEDLLTISDLTARARRLREHWKLSREEQYLLCTWEPQPGYTNHSLKAIRAMLPYLERGAIYSEARQAAGYKYEVLQLNKPLLGEPPYVRNPVAQKALYQVRRVVNAVIRRYGKPAQIIVELAREMKLSKKQKKALNKQNKRNREANQEAAEQVIRITGVEHPSYDDKLKYRLWKECGGVCPYTGKAISLHELFSDAVDIEHILPYHRTLDDSYMNKTICWADFNRNVKRNQTPWEVLGGDADAWGQLLQRIRSWPKAKRDRMERRSLDGIEDFINRQLNDTRLICRETLGYLKELGVEVCVSRGALTADLRHHWGLNALLSSSEDEKERRDHRHHAVDALVIALTTRRLLQTLSELSSKQGSRSLKDRLRVGLPWPSFREDAKLAIEKIVVSHAAARKIAGALHEETAYGCRKDGRYVYRKPLNGLFKREHAKDIVDPQIKKIVLEHLDRHGNDPKKAFIPENLPLLKDGAGFRPIKKVRVFAKHRPTSVFAVRDRHGRDFKFLKYGSNHHLEILENPSTGKREMRFVTTMEAAVRARRKNVPVYDRSAPAGWRFLMSLGINDMVEVNQDGGTDYYRVQKLDGGNRRFYLRHHASATTEAREEGLVVSTKSLPLIVRKLSVDPIGQISTAND

SEQ ID NO: 3784 - protein, 1110 aa, unidentified
  REGION 1..1110: note = Description of Unknown: Cas Enzyme sequence
MGYVLGLDLGPSSIGWAAVNIDDDGNYKGLAQLPDGPNLIPAIGARIFPAGVERYGQGQREQTRNKTRREKRGTRRTLRRRKARRTKLIALLRANNILPQDDAKLQKLQQQTDPYELRAKAIKEDEQLSLMELGRIFLHLCKKRGFKSNRKAPPKKEEKGEINEAKTKFKEELGNKTPGQFWNGQIPAPKQSGPFKAIRNKGGKFQSLAIREQYKEEFNKIWENQKKIYQKNGNGSFFSVEMKKQIESFLFDQISYKQLPSKMRKMWGRCSLMPKEFRCSLANRKAQQFRFLQKVNDIRVIKRSITRGLNEEERKKIINLLSCKNEVKTKEIRTVLKLLDDERLNFEFDDDNALTGNEIDSQLCKLVGKDVWLNLSEETRDKIWQEILKYIEDEKGKITEKKTADEIYKICGIKIDDLDKFSEIELPDGNVKFCEKVLNEILPKMSKEGLSLSDAIKAAKFTQKWDELSSLPVPDKKAGFYITNPNVATVLYQVHRLVNRLIAEIGKPEKIVVEFTRDLKASKEQRQKILKQQSERRRMKALIAEDVQKSPEWEWGGKIPQWAIEKYMLWVEQNTLSPYSGDQISKRQLFGEDTQIDHILPYSMSLDNSLNNKVVCFTSENQEKGQNTVFDWLGHDEKKWEKVQQAIDHWKPQRRTRGSKKTARNSANSKLINERKWEKFFITGDQIDEIYEPERYLNEAGYIANETREYLERLYDSNEAKKRVKTTKGGVTGELRKWWDLNRILGVAPKIDEPEENTDKESQPTKKNREDLRHHIIDAVVIASTCPKLVKKVTSELQKAYPRKKRKEIYIERPWKDFEGELAAAVESVKISHRTQRKVCGELHAATHYWKETNGKYASKYITRKFLTDLSKAEVGQICDDAIKKLVEDRIKEKGDIKGAFDNPIYLPNKEGSPVPVRKVRIWTKHTDENMIPIRGKEGEPQTVWVEKPENHHIEIFQIKENGTKRYICKIWNIWEISQRIEEYKKQKIKDKDPIVLRKHPNHPDAEFVMWLSKADTVLIENNDKKEVLARITGIGEGDERDESVDLKLWELRVNCKSTDLPTKETKDGYRLRNINDFMVMKPRKVTVDFLGRIRWAERKMGWEKCFGND

SEQ ID NO: 3785 - protein, 1026 aa, unidentified
  REGION 1..1026: note = Description of Unknown: Cas Enzyme sequence
MTRYTLGLDLGSNSVGWAMIANEGQAFPNGKGIIAGVRVFPEGVGKTTTGAEQPRGQDRRVARGQRRMHYRRRQRRRLLARILKEAGLLPRSDVELAKVRALDPYEERTTGLDKPLEPYHFGRALMHICQRRGFKSNRKTEKKADDGKVAKETAALQREIEKAGCRTLGEYMARRAAEFEHKKSDSRRIRKQYTLRSMYENEFEMLWKSQAAFCPKVLNEELKAKVKDAIFFQRPLRYDPATIGDCELEPGEKRCPRAHWLAQQFRMLQEINHLCVLEPGVGERPLSKNERNRLAQALGAKKEMTFDQIRKCLGLLDGQQFNFEDRAKRKKLRGNEVEASLRHALGTWYEDAPADLRERIHNTFAEIEDEGELRRIATAEWDLSEAQAAKLLKADAPKGHFSLSLKAVRKILPFLEQGYVFSDAKDKAGYSIAATTQRLDRLPPVDKAVKYLTNPLVHRALTEVRKVVNAMVREYGAPTDVVIELARDMKKTRPQREEATWENREREKENNAIRDRLVSDFGILSPRSPDIQKYRLWQECGGVCVYTGRPIPQTALFTGEVQVEHIFPYSRSLDDSYYNKTLCYVDENARKHNQTPYEAYNGDPERYEKVLEAARCLPYEKRRRFTQKEIDLDKFVQRQLNDTRYISTQAVRYLAPLVGGRNVRCVKGGTTAELRWQWGLTGLWANGGARDGDHRRHAVDAVVVALTTRAALQRLSAVKYNPERPQFEPPWEGFRDDVLEAWTDINVSFRPTRKLAGGLHDETGLGPVKDCPQSYVHRVPVENLTVAMVAQIRDPAIRKLVEDRCRERRVDLEGSGKIEKAVWTPVLTMPSGVPIKRVRITTESTKAVPVCKTRQLTGGPKQTRFAKPGENYRIVIYGKPKVSCGAQNAQPSRKWAWEDIAECTGAGLSLFQASAPLRRSKKARKEKPFVDINPQKSGWTLLFAFCKNDMVLLTNPKTGECGLYRVQKTSIKSDSGQPYIVFRLHLAANIKDDSTMVRVQTWETFLSWRPQKVTVDPIGRVFPCHD

SEQ ID NO: 3786 - protein, 1229 aa, unidentified
  REGION 1..1229: note = Description of Unknown: Cas Enzyme sequence
MTISLGLDIGSNSVGSAWVDTNKKQIVMGVSVFPAGVEESDAKRGSPKNQRRREKRSQRRSVARRAARKRHLRELLTSAGLLPADEVTRQVLIEANPWTLRRKGLAEPLTPHEFGRILVHLNQRRGAWGVQTNPEDQDEGKVKEAIDHLTQAMEEAGAQTFGQFIADLMDKRRHPVPGKCNLEAPGDYCPPKCSSQNQKCRFYCDSVRNRRDVFEFHATRDLIRHEFRELWDRQKKLGGGLAALLTDDLRRQLDDPTGDRFWRQRGTIFGQRRTYWNLGTLGRCDLEPSDRCCPSADMHAQEFRVLETVNNIRISEYGGTQRGLTSQERASVRKALQCQKAGSVATVRRALGIDKAALRRKNLPDIYRLNLESDKDREINTDWFHREIIREVFGEDAWREMDDAKRESVNRAVLKFDPESSSEAEGLRSGATQWWGLSPEAAEKLIKAWKTRPRLEKRLNLSRRAILNLLPYMREFGCGVTEARQVFAEDGANCATPEQRRRYALGGSVLTKADRRFLRKHPGLLPPAPMLANPVVRIAIHQVRRHVLAYIRKFGRAPDRIVIELAREAKQTERVRNKILAANREREAQKKQIIAEFNLGAKPLNQQSAAVERVVLCRQQKCICPYTNLTPGAAGRQITEKQAAEGTDVETDHIVPLSRSQDNYLNNKVLCLRQANRGKGNHTPKEWLSAEQFSLLEQRMGHWKDELPRKWENLHRDPPPLEDFLTSQLTATAYAATQVGAYLSDALYGGEPDGRRRVFFTKGKYTAMLRKDWQLFQTLKEADEGQAAIAPSDPQERLDPGKKNRGDHRHHAVDAVVIALTGPDIIQEVARLAAAAEECHERTGYWPKRVPLPPPWGTPAEFRRQVLCQLFGVFDKANMDGTRAEGAETGEPLVVSHRPVKRKVKGYLHKEDLWGLVDEGEGVFRIRCPIADLNPKMLRLPELETDDQVRTRLARELQAVGFTEPEARKAATNRLRQADFKRQWAEPALGKGGLVRDWGLRRAIRKCLKDNGIDPDRFTNKQMQQFAKTGKLRMPDGGVPIRSVITIGPISDPVKIAVRDPITRKQAVNPRTKKPLFRYHISRNNHHVEIMQEAATGEWCARDGKCVTMFEAAQRVRPPKNKKGEHPKTPSAVNRDDGAGQTFVMSLSQGEMIHARRPHRPDGIGYFVVVKLDGNRIYFAPHWDARSEKEQDRWDVTYSDLKHCGPTKDNPPIKVRINPLGQVVPVYHD

SEQ ID NO: 3787 - protein, 1153 aa, unidentified
  REGION 1..1153: note = Description of Unknown: Cas Enzyme sequence
MTRYTLGLDLGSNSVGWAMIAAAGDTFEDGRRIRAGVRVFPAGLAMEKDKVGTPRGQERRQKRSQRRTVRRREQRIRKLRRILQQANLLPKDRQALADLMMKYNPYLLRARGVEDALEPHEFGRAIFHLGHRRGFKSNKRITKTKENKDEEKESAEAKKDRKAEDAGKSLEEHLHEQDMTLGQYLSQFAVNDASKEERKEAHKDPEGTKEWVRNRDRNPQNRRTLRSMYEEEFERLWSKQAEFHPEFLTEDLKADVHEATFHQGRLWWALDSIGRCELTGDLRCPKGHWEAQEFRLLQEINNLRLYSRETGQEKPLTRDQKARLVEELRPKPKMKFKEIQSFLGLGADRSFRGFEVRAMREGLAGNAVDAAFVKSSLAEWYEELPVERRGELHDLLVAVEVDETKNRAYGIDEAALRSKADEWGLSAEQADELVDIQQGLPDGHLQFSLNAIRELLPHIRRGRRVDEAIPAASLKRKAKPAALNRLPSVKQFDPYLTNPLVCRALTETRKVVNLLVQEHGKPAEIVIELAREMRQSRKHRREILKRQKGEEELNKEAEAEVAKAGGVLRKGEARRRYKLWKEYRARCGDPAACPYCGKHICGTAWISDAYEMDHIIPRSLRPGDSGFNNLILCCAQCNQAKGNQTPYQWLGHDEQRYQELLRRIDKLPARKRDRFHLQTPEELEGAIHRLIDTTDPLLKATQHTSRAAVAYLQCLYRAEEQRRRVRCVKGFTTYELRGFWGVNARSLGLGPADRKNRYDHRHHAIDAVVIALTTRKHVHNLCTAYANIERRQPPDMSPPEPWPDCETFRREVQEVMDEIGEGQELAVSYRPTRMAERPRAKSGKGRRGVQVVTRGSLHEDTGYGPVRGRNTGKRIMNVYVTRKPIGQLTPAILNGTKGKVRNPEIRDLLRAECIRRGVAHRVASDVKKAWTLERKHFRLIRRALAYWQAQERDAVDSWQPDGGRYWVDVDKRKVQNTLSNPLPILPCNESKGGAIPIKRVRVLVTANTTYEVRRDGGKQAKFVIPGGNHHVEIYETPGGKWTGRCVSRFEACKRLRRGRPVVCRDSGDGSEFVMSLAINDMVLLTHPETGELNLYRVQKISSGDHMVALRLHTAARIDEKECAGPSDSVNVLRRWNMEKVIVDPIGRLLPCHD

SEQ ID NO: 3788 - protein, 912 aa, unidentified
  REGION 1..912: note = Description of Unknown: Cas Enzyme sequence
KAKVYETIFYQRRLWWPLDSIGRCELTGDLRCPKGHWEAQEFRLLQEIGNLEVYDRATGQEDPLSQDQKARLAEKLRPRPKMTFKQIHKFLRLKPDQRFRGFEERAMRQGLAGNAVEAAFAESDLAEWYAVLPAGRRAELHDLLVAVEVDEVKNRAYGIDEASLRNKAVEWGLTAEQAGELVEIQQNLPDGHLRFSLQAIRQLLPHIRRGMRVDEAIPAAGLKRQPKPAGLQRLPPIKQFDPYLTNPLVCRALTEARKVVNMLVKEHGKPEEIVIELAREMRQSRKHRREILKRQNKEETLNREAETEIVKAGGDPKSGEARRRYKLWKEYRTHCGDPAQCPYCPYCGSKKISGTGWLGSEFEIDHIIPRSVRPGDNAFNNLILCCAKCNRAKGNRTPYQWLGHDEKRYEAMLRRIEKLPARKRDRFHLQTTEELETAIHRLIDTTDPLLKATQHTSRAAVAFLQTLYPEEEKRTRVRCVKGFTTYDLRGFWGLNARSLGMGPADRKNRYDHRHHAIDAIVIALTTRKHIHNLCTAYARTERGERPDMAPPEPWPDRDSFRREVQQLMDEIGEGKTLGVSYRPTRMAERRRPKSGKGRRGVQVVTRGSLHQDTGYGSVRDRKTGEPIENVYVTRKPIGKLTAAILNGSKGKVRNPEIRDLLRAECIRRGLAHPVAPGAKNGWTLERKHFRLIRRALAYWKTQEAQGGNTWQPDANRYWVDADKRKLQNTLGNPFPVLPCKKSKGGAIPIKRVRVLVASNTAHEVRRDGGKPARFVEPGGNHHLEIYRAPGGKWTGRCVSRLEACERLRRGEPVVDRAEQHDKRGVPDGSNFLMSLAINDMVQLTDPETSEVTLYRVQKVSSGNHMVVLRLHTAANIDDKETAGPSDYVNVLRGWNMQKVTVDPIGRVLPCHD

SEQ ID NO: 3789 - protein, 1009 aa, unidentified
  REGION 1..1009: note = Description of Unknown: Cas Enzyme sequence
MTSYTLGLDLGTNSVGWAMVAREGEVFENGRCILAGVRVFPAGVPNLNEKKEQAPGQTRREKRSQRRVVYRRKQRRRLLRRILVKTGLLPPNREGLSALMKRNPYELRARGLDDALEPHEFGRTLYHLCQRRGFKSNRKTESKDDNKVTKDAGQLQMEIEEAGCRTLGEYRAKRLATQQHTGDDNQRVRGRYTLRLMYEDEFERLWAKQAEFRPELLTEDLKARVHEAIFHQRPLRFDPDVIGDCELEPGEKRCPRAHWMAECFRMLQEINNLRVVRASGKTTPLSADERAKLADALGTKNKMKFSSIRKKLRLLDDETFNLETESKRDYLYGNRVEAALRHKTLRKWYDALADDARKAVHNALADVQDPDELRRLALEDWGCTETQTEQLMKIGLPKGHLRVSLKAIRKMLPFLEPDHVCDERCREVCPDKDPDAGHVVSEAKALAGYELTPPVATFDRLPPVADVIQNLTNPLVRRALTETRKVVNGLVREYGMPAEIVVELARDMKHSREQRRDIFFDNARRRKENDAIRDRLVAEFNIPNPSRQDVMKYRLWEECGGLCVYTGKNIPKTKLFSSDVQVEHIYPLDRSLDDSWWNKTLCFGHEVNVKKGNRTPYEAYHGKPEFDDILQRAKRLPWKKRRRFTVKEVEFDDFANRQLNDTRYASRLAVRYLRTLGCEVRPVKGQTTGKLGHYWGLYGVLGTDYSKARDDHRYHAIDAVVIALTTRSHLQRLSRVVSNAPKDAHMPPPWEGFWDHVRDAIHAINVSHRPQRKLRGGLHEDTGYGPTDKANTYAYRVPVERLTAAMIGRIRDPVVQKIVRDRLAERGIEEKGSGTFGNVLTEPPLTMPSGVPIRRVRITATEKTAVPIRCIEGKPTKFVIPGGNHHVEIYKKPDGSWTGKCVSRFEACERLRRGEPVVCRDRGDGSRFLMSLAINDMVQLTNPDTGEVNLYRVQKISSGSHMLVLRLHTAARIDDKETAGPSDSVNVLRKWNMQKITVDPIGRVLPCND

SEQ ID NO: 3790 - protein, 1128 aa, unidentified
  REGION 1..1128: note = Description of Unknown: Cas Enzyme sequence
MSYTLGLDIGAASIGWAMINDSEILHIGTRVFPEGLDAQSREPNNRKRREKRLLRRQIARKAMRRNATLQAFQILGWLPTNPAELEAIWHENPYALRKKALDEPLTKSELARIFFHLSKRRGFKSNRKTDTDEELMVEAAPETENKSKKSKNLLRDGDDEKHGYGEFEQLLKSGKVRTLGEYLASLNPHEVRIRARYALRKHYEDEFEKICDKQSAFHPELNWPVPEELLTKLCSRKQQAAWKKKSDTSLRAFIKSYLIFFQRPLKSQKHLVGKCSLEPSARRAPISSLVFQTYRIWDQLATIKLLAPEHRFLTPEEKARAAEILEKTKDIEIGKLLEQIGLPKSTICNYDPKKKIKGNETAVQLMTMFRETDGRLTKKEQEAIEAKWNKLSEAEKEHRWKIIYDATDNEWLEQYGKEKWGLSDAGARALTKIHFKQGYGNLSQRAMKKLIPFFKQGYNYAEACQQAGYHHSDKRPTVLQDKLGDPPNLRNPVVQQGLFELRRLVNAIIKEYGKPDAIHIEFARELKLPKQKREELTKENEARRKQNEHAADEIRKLGIPNPSSTDIIKYKLWLECKGICPYTGKQISAEMLFRNNEIDIEHILPYSRTQDDSFNNLTLCFADFNRERKQNLSPYEMKARGIISEAEYEQMIARVKEFQNKAKLQRFTQKEINTEDFIARQLNDTAYLAREAKAYLETICPNIVVSNGQATAKLRNLWGLNSLLHPLEKNRNELSLKELEELAEKNRKDNRHHALDAAVIAATTRGFVQKLSTYSKYKRIATAEKFPLPFPTFREQLKEELDELLVSRYQKNRVQGALHEDTFYGAVREHDGSHRKEGNYNIYTVRKPVSKLTESMVSDIANPYIRTAFQTIIEKLKAQGVKFKEPYKELPKEFYAAAKQVKMPIKRVTIKGNRVSAKTLTPRDIPNIEPYFIRAFFEKRLQDFPNLVPDQPLPEAFFENFGVPIKCVRIHQKSQTRRELRPGVFIEPDNNHHIEIFRKLNSNTEYTGRIVTLLDAATRKRLKQPVIDKTMEGHEFVMSLMIDEMFLMSEDGEDGFDVTKIDWAKPDYKTISKHLYRVQKMTGNQVFFCHHLDSTLDTSFGKSVNKLRGIKVKVDVLGRIKPVSEPMV

SEQ ID NO: 3791 - protein, 1080 aa, unidentified
  REGION 1..1080: note = Description of Unknown: Cas Enzyme sequence
KCVFEKNKPRCAVSRPEFEEYRMLCFVNNIKIKTPNDEKLRSLNSEERSKIIPRFFLQRDHFDFEDIAKQLAPKKRYSFYKSKNQNDYLFNYSMKTTVSGCPVSARLKDIFGNDYMNVNFEFIRQKDGKKSMMTVDDIWHVLQTFDSTVKLKEFAIEKLSLSEELAEKFTKIKLKQDFASLSLKAIKKILPFLREGLVYSHAVFLGNIETIIKSQFNGKMFSLDSKDVITNLKEELKRIFRIIDNKNTAINVANGFISKIRNYQIKPNDVSYDSINLELEAVHGERRWERLGESIRNRIIQDVDKLIGDASSTRWSFHKPITKEDMVWEFLADKYKIKRTKGILYHPSAIETYKDAQPGKDGKLYLGSPMVSSVRNPMAMRALHQLRKVVNELIKQNIISPDTAINIEMSRGLLNSNERQGLKRWQNEREKDRKEYAKLIQEHYDANSLDIVPSETDILKYQLWIEQGEHCIYTGEQISLSEFLGANPKYDIEHTIPRSQSFDNSQANKTLCCAKFNRQIKKNRIPFQLTNHDEVLERIKPWQNRIDELNKLIEKCVKASKGAADKNQKDSAIQKRHKLTYERNYLRDKCRRFTMEEVPQGFKNSQKVDIGIITKYSRLYLKTLFKKVYTVKGSTVADFRKMWGLQDNYSKKERINHVHHCIDAITMACMTKSNYELLAKFYHDWEELYQAGADAKPKVRKPWDSFVQDIKRVEDEILVSHYTPDNLPKKAKKILRKRGKKQKNDKGEFIYQKGDSVRGSLHKDTFYGAIERKAINKKTGEEEKIIKYVVRKSIEGLETSALKNIVDDRVREIVVNARDKEKQLKKEIDQLLKERKKADESQEQIIDKQVNEIKERMTLLYCMPNKNGSPIPIKKVRLYQPTVTNPLHIKKQRDKVRSGKRKEYKESYHVTNDGNYLMAIYEGKDKNGKLKRDFELINNIDSASFYTQKNNDKSIAPITKSGLTLRAMIKAGQLVLFWEDEPEELYSLPRKEQVKRLYKVIAFEADGRIQFRYQQTAMQQSSTNKEEMTITKFMKENAISNSFIDFVNPKLWLRLRRASWNFLVENIDFRISPIGEIERI

SEQ ID NO: 3792 - protein, 1127 aa, unidentified
  REGION 1..1127: note = Description of Unknown: Cas Enzyme sequence
MAKVLGLDLGTNSIGWALIDDKNNKVLGIGSRIFPEGVANLGDGNNEISKNAERTDARGSRRQFFRRRLRKRFLLRLLAQYKLCPIEQSSIKVWNSKEVFSEEKMAEWLRINPYNLRAQGINEEITLHELGRILYHMIQRRGFLSNSRSAGSEDNENSVIFKGDVKINKTGITETQEQIDKSKTLGSYLNEIYPDDFAPYKDGQERIRNRYTTRQMYVDEFELIWEKQASFHTELTDELKSILGGRKKEGYSEDGALFHQRPLRSQKHLVGCCSFEPKKTKCPISAIPFEEFRVYQWVNTVECNNRKLNNTDREIISKVLFSKDKVKFLALRKAINKADGSFQFNYKDDDSIVGSYTISNLSNKKFFGGNWAGFNEKEQEDIWHVLSFFDDREKLNKYAIDNWNLNKEQALKISKFNLKDGYSNLSRKAINNILPFLKQGHLYDIAVLLGGIKNAFGEGWKSLSTEQIDFMETNVPEIARAKIRGGYIAEIKNFLKVEFNLADKQLDKLYHHSATIEASEILDKLPLGKEADKEIQSIRNPIVTTALFELRKLVNEIIDDYGKLDQIKVEMARDLKISKTKRNQIRSDQKRLEKENDRVKAELDNLGQRPTHNNILKYKLWEECNKTCPYTGAPINVTELFTGSVQIEHIHPWSKSLNDSYMNKTLCFADENRAKGEKTPYEYYHAKGEAKWEHIKGQALNCFKNKKNYPNAYQKFKQFVKVKHDDDFISRQLNDTRYISREAKGYMSKICSNVQVAPGQMTANIRHKWGLNSILSDDDNKTRDDHRHHAVDALVMACSSRKHLQELSKWNRYDRKYDLSDFPLPWEGFRKDAEKAIDSVLVSHKKTDTVLTVRNIKTRKNGIDYKNKGVSARGQLHKETVFGKRTAPDGQTAFHVRKPIENLATHKHVDKVVDPKIRGLILQRIELLGGFEKGKNVPKDTFFITDESGASHPQIFLPNKNGNKVPVKKVRMRENLSGAEKLKTANQYVNPRSNHHVIIYKTEDGELKEDVVTFWTAVERKNQGQQVVQLPAEHKGSEIITTLQINDMFLLGFNEANIKEASKSILRKHLYRVQKISSSNFSFRKHEASTINNKHEELSIRSLSKLLSLNPVKTVITPTGNILKVTS

SEQ ID NO: 3793 - protein, 1018 aa, unidentified
  REGION 1..1018: note = Description of Unknown: Cas Enzyme sequence
MARYTLGLDLGSNSVGWALVAQDGTRFDNGTPILAGVRVFPEGVADLDQKKERPRGQERREKRSQRRVHYRRRQRRALLRRALAGAGLFPAAKADFLACLALEPYTLRARGLDERLEPHEFGRALYHLCERRGFKTNRKSQSKEDNKITKDASALQQEIESAGCRTLGEYRAKRLAKLDHGQRIRGRYTLRAMYEHEFNMLWESQRRFHADTLSDDLKTTSHDAIFYQRPLRFDPEVIGDCELEPGEKRCPLAHWLAQRFRMLQEINHLRVTDAAGDRPLSRQERAMLAAALGTKREMDFDAIRKCLGFLATQTFSLETEGKRKKLKGNVVEAALQNKVLRKWYKELSNEQRQTVNDALAEIQDPQELRRIAAEQWLCNAEQVEQLLKFTPPDGYLRLSAKAIRKILPYLEPDHVCDQRCREMFPGKDSESGHVFSEAKALAGYPPEPPIPTFEFVPPIPRRNDKKSWEAAHPTLRHMGTALTNPLVRRALTETRKVVNAIVREFGKPEEIIIELAREMKHTKEQRQEIHWDNVHRNEKNEEIKKRLQEEFHIPSPSRDDIIKYRLWQECSECVYTGKPIPKNKLFTPEIQVEHIYPLDRSLDDSYLNKTLCYGHETNTLKGNRTPYEAFADTPHFDAILKRAERLPWKKRRRFTVREVAFDEFASRQLNDTRFASRFAARYLRTLGVPVRPVKGQTTSKLAHYWGLYGVLGTDYSKDRDDHRYHAIDAIVVALTSRSHLQRLSTILGRSARRTPLDPPWDGFWDHVRDAVASINVSYRPARKLAGGLHNETALGPTPKSDTYTYRVPLERLTPAMVADIRDPAIQRIVRKRLNERGLEETGSAPLGKVLTEPPLTMPSGVPIKRVRIQTVEKTAIPIRKVNGRPVKFVLPGGNHHIEIYRKPDGSWTGRCVSRFDACKRLRKGLPVVDREGEEGWTFLMSLCINDMVQLTYPDTGEVKLCRVQWISDGPDIMFRLHSAARIDDKETGVRVKSWGKMQSLGAQKVTVTPLGRIQSSHD

SEQ ID NO: 3794 - protein, 1374 aa, unidentified
  REGION 1..1374: note = Description of Unknown: Cas Enzyme sequence
MKQKILGLDLGTNSIGISVRNTQKSGKITDQLEYFSSFIFPSGVGIGKSGEFSYAAQRTEARSTRRLYQSRRYRIWATLEVLTDLGFCPLSKEDLHAWCTYSKKENLFREYPADAKEFEQWVRLDFDNDGVPEYTSPYQLRAELMERQFDFGNPLERYKFGRALYHIAQRRGFKSSKGETLESQEDTANGVEVDVASELKKSEEKKAKGLKEYMGQNNCPTVGCAFYRMEQEGLRVRANEQMQAVRSMYEEEIDSIFTYQNGLSKDSELYRRIMSHKKGEGCIFYKRPLRSQKGTVGKCTLEKNKSRCPISRPEFEQFRAWSIINNLRYKTKDDSGKPSRELELSIRQQLYEEKFVRASNFKMEDILKWLKKKNSDVAELNYEDKTSVMGSPVCAKLKDILGDDWQHQTIEGYDYVELWHVCFQADEAENVKDFSITHLHADEVLCAKMIKLWGAIRPDYASLSLKAICNILRMLQEGYIYSDAVVLAKLPDVFGDNWEKVKEPILNEWISIQSTIEHSRLVAKITNNLIAEYKVLPAEDQFAFRNTDYLLDESDKKQIQKAIISNLSPKRWKQLTKQEQIDLQENVANAYQQFFKSQERNYLPIQHLTDALSSLIIDNFGDFVADNYKSKLEQGRDIFYHPSIVSIYAPQEPREVVTNRGIRQMKLLGSPATNVFRNPVVMRVLYQLRTTLNQLIADGIIDESDTSVVVETAREFNDANMRAAIAQYQRDREKENEKYKSELASYYPDRNISSTDIDKVRIWHEQGERCIYTGDIISLSNLLNDDSFEIEHTLPRSISFDDSLANKTICSAHYNRYVKKNLFPSELPEVDYQAILTRIEPWQEKIRSIKAQITLRKNKSKSATTPDMKNKAIKERHILEMELRYWQDKVSRFTIKKDDWNPGFRSNQLNDTRTITKYAYHFLRSVFGEVTVQRGEMTANFRKALGIQSMDERKDRGKHSHHAVDATMLTLIPGNTKRDQLLDLFYQREELQRRMESDASVKDALDEVSKQYTQILKSCDICGVDEVTEYIQNHILIHHCTKDQTLTPSKRRMRTRGKVVVKDGSERWVMGNSIRAQLHKGSYFGAIQSGETNANGEKEILMVARVPIDAFKSKDDIEKIVDSRVRTSVLHVVNKRMSEGMSFADALKQPIWMQDNNGQEIKMDKYGRRLQPIRHVRCKVAAGMGFLTKDKALPIREQVYTSKNTYKNYVYAQNDGNYLCLLYQGEYKGKLVRKMQFVNYFTIAQLGIRNIQELMQLPSYQTIEDGKKTYTLTAIMKTGTHVLMWKDYPEELRDMDPEQLYKRLYWVYKFNNSGSDYVFVQNHLEARSNDQIPKDETTFIPEQYQARLKLNANACNFLIEGVNFRITETGIEFL

SEQ ID NO: 3795 - protein, 983 aa, unidentified
  REGION 1..983: note = Description of Unknown: Cas Enzyme sequence
MLSTATLGLDLGTNSIGWALVRFDENQQPFELIDCGVRIFQEAVEAKTRAPKNLARRKARGARKLVARRRMRREALAKLLSDNGMLDPKLFFEWNEQAVNDLGDPYSLRMRGLDEKLSLVEFGRVLMQLCKHRGFQSNRKSKGDDDGVVKKSISELYQKMKQKGVRTLGEYLVAEPTKRGRYTHREMYKDEFEQLWAAQATHHSSTLTATLKVKIHNTIFFQRPLKLQKHLIGKCPFEPDRKRAPRALLEAQRARLWQDLNNLEVKNPITRAYRKLDTSEKSKLAALLEKQKTVSWGKAKKTLGLHENELFNLEEGKKSELIGNRTAYAMRDAMNDAWDAMPIDKQRELITDILTIDNDAGFLRRMREHWKFDEKIAQALAQTELEPGNGRLSSKALHKILPELQKGFRYDEACKEAGYNHSKPTQTKVLPKLDEPPMLRNPVVQKALYETRRVVNAIIKKYGAIDVIRVEMARDMKLSAKQKEAAQKQNKANEKLNKEATEIAAEHGIQHAKRDDRLRYRLWKECALTCVYTGKTISQEMLFSGEVDIEHIIPYSLCLDDSYMNKTLCMSEENRKVKKNKTPFEAYSGNENNYLQILARTKDLPHSKRRKFEQKDVKTDDFVSRQLNDTRYICVEVKNYLTRLGRPVEVSKGAATSDLRWHWGMDLLLNTDGEYKKNRADHRHHAVDAIVIALTTRSLFMKLSHKFDVGYLLPRPWASFDKDIRAKVDAIIVSHAATRKIYGALHEATAYGAGFIWNKNKKGESVEESIFTYRKPLDDKFTEKHAASIRDERVKEIVLARLAEFDGDSKKAFGNSDYPLLHEDGKTPIHSVRVVTRMNPATVHGIKDKSGKPYKFVSYGNNHHVEIIEHVETGKRRGVFVTAMEAARRVRIAKLAVTQKDHGTDWKFVMSLSINDSVRLNDQIWRVQMLSGGEQFVIALKGNRDTLSEYNAHSKWLKSEGATSNIQAKVSIDALGCIATCND

SEQ ID NO: 3796 - protein, 1049 aa, unidentified
  REGION 1..1049: note = Description of Unknown: Cas Enzyme sequence
MSKHILGLDLGSNSIGWALLKTTDAGKPTGLIDLGSRIFNKAVEDKTPTPKNQKRRNSRLARRVVQRRARRRQRMLNYLVSLNLLPSNLKDHPKPESLLNGLGDPYSLRAKALDSPLSAHELGRVLLHLVQRRGFLSNRKTLLGQEMLDDPDVQAVLAELEDDPVGADTDRTDEEKEETAFKHDISQLRKTIEASGCRTLGEYLALRKPSQSKRNRQRDGGHLRTDRQMYQEELDVIWEEQKKHHTVLTDKVKEQIDQIIFHQRPLKLQADRVGKCSLEPRCTRARIARLEYQKFRYLQDINNLRFVDAYTETWSPLSEEDRATLVTLFENTQAPTFAGLRQALGRNRKIEFNLENSVVKKLKGNATACRIRRVLPEWDTFPQDKQYALVEDLLTIQKKTVLKKRLIGHWQFDSATAVNLCMVELESGHGNISTKGIRKLLPYLEQGKGLSDARQEAGYSYEPESITAQDRLGPPPTIANPIVQKGLHELRRVVNAIIAEYGKPDAVRIEMARALEMNTKRYAAFLKQQKANTKVNEEAAQKYAEIREKTPHLGLSENASRNDKLKYRLWKDQDERCAYSGRQINLSTLFGADIEIDHILPYSLTLDDSYMNKVVCYTEENRDKRNRTPIDAFGNNEDKWNQITQNIRRWDKKLKSKRERFYKREADLPEERDFINSQLTDTRYISREAGRYLGTLGVEVTFPKAAFTGWLRHQWGLNSLIGTSDEKERTDHRHHAIDATVIACVDRGFHQRLARRAKQLERSRSELKLRDLHIDMPWNNFKLDVNEKLSSMIVSHVPQRRISGALHEETGVGFIEGNGVDGPGTVYRKALDADFKLTWVDDIIDPVVRQQVRAHLESHNNDPKQAFADGKGVVHKNDTILIKRVRVRESKVRNLDTLKKTRFGVRDRRGKVFRWMKYGNTHHVEIIRYRKTGKYEGRFVTAMEAVHRARGINGPKRPIIQTAHGEGYEFVMALHINDLVSVEVDGKRQFYRVQKLEYTNSRIGLQHHTVAAGKNSTEQLEKPLAISTLMETYVMQKHRVNAIGKLRND

SEQ ID NO: 3797 - protein, 1019 aa, unidentified
  REGION 1..1019: note = Description of Unknown: Cas Enzyme sequence
MSTSLGLDIGANSIGWALVQIDGDTERSVIAAGVRVFPEGVDRDTKGLEQSKNEQRRVARGVRRILDRRRRRRRKLVAILQSEGLFPTTADHLTQLWKSDPYKLRTKALKEPLPPLELGRVLFHLNQRRGFKSNRKTGRVKEDGKVHKGATDLQTAITQAGAHTLGEYLHRAHTNGVRIRGQYTLRRMYEEEFDALWTAQQPHHREILTDELKKRLREETIFFQRPLKPADHLIGKCPCEPAERRCPRADWHAQQFRVLKEVNNLTIRSPDGGEQNLTSDQRKKLVQTLGTKKDMTFDQMRTLLDLLEHQTFNLEEGPRGGRGDAKTKRAKLKGNTIEAAIVKAFGSRWPDLPDPAKETIRAAVVETEEADALRVLAVQEWGLAAKQVDALLAVDLPDGYAAYSLKAIQNMLPYLEQGMKEYEARERAGYTVDALAPAADFLPLPERDGKPLVNNPIVRRALYEVRKVVNAVIREYGKPDRMIVEMVRDMTRPAKDREAAVRRIKHNESEREQARTVLEADFHVPNPKGPDIFVYRLWKQQKESCPYTGRQISPDHLRLFFAGEGILEIDHILPYSRSLDDSQSNKCLCFAEANREKKDRTPREWREGTPEYEQMLQRVASLKETGMLWGKRRKFSQQEVELDKFIARQLNDTAYIAREARTYLETLYAGDRYERDQRVRTTRGQVTGDLRHHWGLNSVLDKDGSLQKNRQDHRHHAIDAVVTALTTHKRLNTLSRTDRALGTARQTLPDPWPGFRDEVNRIIQGINVSHRVARKVAGALHEGTNYGPTEKPNEFVYRVPVNELTGAMVEKIRDPIIRAIIEQRARERCCDPPTLGSKKFPAAVFPDTDPPKMPSGVPIRHVRILTTLGDGSFVKLDNPDGHKGYRAVKLGSNHHIEIIETTDKKGRSQRLGKVVSTFEAAQRIRRRQPIIQRDHGPDSKFIMSLSINEMFLLQLQDGSEVLHRVQKLSEGGIVLRPHNYAGKVSGYDRPPQIQRRTENTLRGRKVAVDPLGRIQDAND

SEQ ID NO: 3798 - protein, 1106 aa, unidentified
  REGION 1..1106: note = Description of Unknown: Cas Enzyme sequence
MTDYVLGLDIGSNSVGWAAIAREGQAFEGGKRILAGVRVFPAGLNAVKDRESTEMGLGPAPAAERRQARGARRTLARKVARKLALAGILREAGILPAFPEPGKPLPDLWKTDPYVLRKRGLDEKLSLPEFGRVLYHLCQRRGFKSNRKAEKDPKDASDTEKEAGELQGLIKQADCRTLGDYLAGTDAPKRVRPGVLRRLRAMYEEEFAKLWEAQKRHHPETLTEDLRQRIFDRIFHQRPLWWHEDSIGICELTGEPRCPKGHWYGQQFRMLQEINNLSVYDRRTGVAQWLEPEQREKLAEELGKRERMTFTQMKKLLGLPRTAAFRTFEEGAGRKALDGNLVEAKLREEPLGAWYTGLPVEERDALYDLLTETETREVVSFERTGNKLKKRVVRRRYGLNRDKLRRRAMERWQLDAAQAGALARLAEGLPGDYYRYSLKAIRQLLPHLRGGLTVDKAIVEAGLTSQQHAARRESLPPVDHVIPHLTNPLVHRSLTETRKVVNALLRRLGKPGEIVIELARPMTASRRHREQIIKRQRDNEKRNAEARAEAAKLKLNPESWENRTRYKLWKEYREQSQDPAECPYCPYCGKKISGTKWASADFEIDHILPRSRFGSNSFNNLTLCCAACNKEKGSRTPFEAWGTDEDRWTAILQKIEGFSRKGHNEAKYRNFTCQLTATRDGDKLLDDNENRLLKVTQHTATAAVDYLKAIYDPEEEPVRCISGAVTGNLRSLWGLNALLGADEEARKRKDRTDHRHHAIDAMVVAQANAKHVHALCNYYKEREVRKRPSFDPPWGKFWQEAKEVIDEIGNGNRVGVSHRAQRKVAGFLHEETFYGPTSVENAYAYHKPVAALTAAAINEPSPVRGPAVLYALRRACVERGLAAEVPEGTKGAWRFGDKWYRVGKLKGTALANPPVLMPLSRKRRKAGVDAGEQHPIRRVRLTMNASRDAVRRFRNERKYVLLGSNHHAEVFRANGEWGGRVIARWDVLKTLAEQRKANRGKSKAVHEHRVVNADGKPGLRLVLHAGDMVRIGEPIVRARGRSIAAGLYCVASLSGTNKSADIELRPHTLARPPERSDRLRITRWADFAHIHKVSVDPLGRIHPCHD

SEQ ID NO: 3799 - protein, 1353 aa, unidentified
  REGION 1..1353: note = Description of Unknown: Cas Enzyme sequence
MSKILGLDLGTNSIGCTLRDTSQRENQIVFSTVLTFDKGVGEEKGVEVPLVQQRTMSRSKRRNYNARRYRKWQLLETLIKASPPMCPLTMDELNRWRKYDNENGNEYPSSPEFLAWIRLDFDGDNISDFINPYELRALASKQKINNPLILGRIFYHITQRRGFKGRDEAESETILKGSDEKGIAGADATLNIMKDKNVSLSEALLIDHNENLKRIRNRYSLRKLVEEELKSICLKNEIDIESELYKNLAKSILWQRPLRTQKGNIGKCTFEINKPRCPISHPLFEEYRALAFLNNIKITNLENNEEQNLSLEEKEKIISKLFLRKSKPTFDFSEIMKLIDPNKNQYKFNFKDYVSVSGMPVTAALKELFGCNVYEISINKASSANGEKGYYDYEDLWHVLYTFTDSESLIKFAKSKLQLSDEDSVKFSKIKIPQGFAALSINAIKKILKYLHQGYIYSDAVFLANLSKVLDQSLTSEEEEKLIANVHRLMINQRSNKNKSAIINNLISNYINNEEMNGKKESSYISDDNLNKLVENEIINVLGNNRWIELGEQNQNHLINEIRDNFKNLLITRGNFSRGVLYDKVPRFDDQIKTLLKKEYPEWDEERFKYLYHPAESEFYPAAKEIDGKKILGSPEPISKGLKNPMALKTLYVLKKLINHLILTEKIDSETRVVVEIARELNDANRRAAYERWKNERQKENESLVDKITQSASEAGYPDISVDDNILTKYKLWLEQGMQCLYTGKVIAFSELLNGTSVDIEHTIPASISFDNELSNLTLANSRYNRDIKKKLIPTQLPNYNTTIEINGESYKAILPNIKFIENKVKHYSKLVEDAKKKSKSAQSKDQKDTQIQNRHYYKMHYDYWNKKLRTFTDTEIRSSWKNSQLVDTQIISKYAFHYLKTVFNIVDVQKGSVTAAFREIFNLGFKKDRNSSIHHAIDAATLTLIPYPKKRDYLLLKYFEATERKLAFHSKPEYWNNFSSEIIKELEEKTFVNYYKKDTTLVQTYKNVRKRGRIQYIRKQLANGKFEYILDDKGNKIPMVSQGDAIRGQLHKETFMGAIKLPLNNTGIRGNYKTSDKPLIFVERVPLKSLKKMEDLKKIIDDKVKGDIQKTLERKISQGKSFVQAINEDFWLLDKNGNEIKQDKNEKVLFPMRHVRCISSAGGGILTPEKALQIKQQTFLSEHEYKQYYYAQNKEMALCIFYEKNVKNKLLREFRFAGLFELAQLKIKNVNELATIPEYNLLEKRHIPSKYFIKTGYRVIVYENSPDEIRELNPDELIKRIYRVYKFNDSGANYIFLQYNSESRKDKELGEGSTKFDLSIYQPRLKLTANNFNCLVEHYDFNISIDGEIIFK

SEQ ID NO: 3800 - protein, 991 aa, unidentified
  REGION 1..991: note = Description of Unknown: Cas Enzyme sequence
MNSYTLGLDIGSNSIGWALLQDGKKQSIVDIGVRAFPEGVERDTKGLEKSKNATRREARGARRTRYRRNLRRDQIVKTLKSEGLLPKDDISLRKLFERDPYKLRARGLDEKLELYEFGIALFHINQRRGFKSNRKTGKAKEDGKVVKEAGELQEKIDKTGCRTLGEYFANVNPEENRIREQYTYRSMYEREFDLLWEKQAKFYPEVLTEDLRNKIRDEIIFFQRPLKPTDELIGNCELEPGEKRCPRGNWYARRFRLLQDVNNLKVFNPDGFVRSLSEDERRILLEELSLKKEVKFSTVRKKLGLLETQVFNAEYEVNEKGKKNEKLNGDVYNAAMRSKKIFGPKVWDTIDEAEKIRLNDWLVELEDDELVENLAGEYGLDEDKIESIRKISLPQRYMSFSRKAIKKLLPLMEEGKRTDEALDAVYPDRNKEIDIAEVDKLPLPEDLRNPIVNRALFEVRKVVNATVREYGKPEKIKIEMARDVRGNARERRELHFKMLENERRNDEVRKRLIEMGVLKPKRDDVIKYKLWEECGHICPYTGKHISQVALFGENPEFQVEHILPYSKSLDDSFMNKTLCCVKENRLKGVRIPYEYYSGDPEKFEELKQRVNRTAMPYWKKRKFWQKEINTDEIISRELNDTRYICREVVKYLKKVCKDVSGTRGKVTSELVYQWGFIKDRDDHRHHAIDAAVVAVTKNKHLRQLGESKYSKKGLAFAPPWQHFREELAEKVKHINVSHRVSRKVSGALHEETAYGPTGRLDEKGQDIYVYRKRLEDLTGPMVSKIVDPVVRQIITDRLKEHNINPDKDKKIPKEVWNEPLYMKNKKSKKKVPIKKVRIQDVFNNMILLKDKSGKPYRAVAPGNNHHIEIFEYKDKKGQTKRDGKVVTMFEAVQRSQRGEPVVQRRHGEGKEFVCSLSINEMFMFESDDGLNDLYRVQKIDQNKRIILRPHTYSGKLSDSDSAPLIQRKNPNTIKGHKVTVDMLGRVHMAND

SEQ ID NO: 3801 - protein, 1249 aa, unidentified
  REGION 1..1249: note = Description of Unknown: Cas Enzyme sequence
MKKTVLGLDLGSASIGWALISEGLEKKNSTIIDMGCRIIPYDGTEGDDFAKGRGESRNSARTLMRGARRGYDRYQMRRAHLVKTLKKNGIYPNDSLRSLPKMELWELRSKAVTEKVTLQELGRLLLWLNQKRGYKSARSDVNLDKKDTDYVAEIKSRHETIKEANITIGQYFYKNLLADRYYRVKENVFPREAYIEEFNAIVKKQQSFHPILSNELLDKIRDEIIYFQRALKSQKGLVAICEFEGKWVKKGEKEYFVGPKVAHRSSPIFQHTKIWEAINNLKLRTRDRSNNQIQLTQEEKRILFNYLDNNDKLTLKQLCKLLNFKESEIFVDKKLFSTGIQGNSLKVILKRHLSPTQYSSLTQFNIVIEPSEDKEDLGFLVDRKSGEIIEGTSRIRESVSPKIEQEPLYKLWHTIYSIPDIDETVNALISNFNIDRESAEKLAKIDLNKFGYSNKSVKTIRKTLPYLMEGYQYSDAMMLAGYNHSGSLTKDENLSRQLAKKLKPIAKNSLRQPIVEKILNQMINLVNAIIDKYGDIGEIRVELARELKQNKADRADTTSFINKRTKENERITKEIEAFGLRATRNNIIKYRLFEEIDNEEKRVNAICIYCGKGISITDTLRGDRVEVEHIVPRSKLFDDSQSNKTLAHTSCNSTKGNLTAYDFMKGKSVQEFQSYIDRVHWLYDNHLISRTKRDRFLMPEDKIPDNFLDRQIRETQYISKKAREILNTICHNVYVTSGSVTAELRHLWGWNDIIMNLQMEKYREANLTEIVTWQSNNGRNEHQAERIIGWDKRSDHRHHAIDALTVACTKQGYIQRLNTLNSQKTRKEMKLETEGVYSESTSLLERYLKAQTPFTTKEVENAISKILISFKPGKKVATRAKRKIGRVGNKRVVQEGILVPRGQLSKESVYGKIKILEREKPLKYLLDNPDLIVKEYIRKIVVDTLQKHDNNPKKALAHIKKNPIFLDSKNSVEFTHASCFKEEYVIKYPVNQNFNKVDKVIDNGIKEILKRRLAKFNDNYKEAFRDVEKEGDRVAWYEDEGLPHPILSVRCSTGLSAVVPISRDEEGREIGFVKPGNNHHIAIYTDQEGNLSEHICTFWHAVERKRYGLPVVIKDTNRLWDSLQLRDSKELPQQFLQLLPMPQLTLRTSLQENEMFLMGLSNEQAAELIQNGDMSQISDYLFRVQKISSKDYNFRHHYETQVEDNSRTAMEMRRFLRIRSLKAYKEQNPIKIKIDLLGELKLDKENAIL

SEQ ID NO: 3802 - protein, 1330 aa, unidentified
  REGION 1..1330: note = Description of Unknown: Cas Enzyme sequence
LNFRRKLRKYETLLVLAKNGMCPLTIEDVRSWRKSNFKKYPTNPDFLNWLKTDDEKNINPYLFRDKASKEKIDKLSLGRAFYHIAQRRGFLSNRLDASDNSIIEEKMYEIEQIIEESNTAVELQKYLDEYFNDFDKKNETEKPLFKLSRAFYGIIKNSDDDIAGLKKKVLDKLHRKENLGKVKQAISDISEKMQKEKFETIGQYFYSIYSKDKIRNQYTAREEHYLKEFEIICKKQGFDKINEKENIPNKRYFGLVKELYKAIFFQRPLKSQKGLVGNCTFEKNKPRCPVSHPLFEKYRMLSFINNIKIKTTEDEKLRQLTIDEKQKIKPKFFRKSKPIFNFGEIIKELGEENDFNYKKTFPVSGCPTSAQLKNTFGNDWENISFTYITKDASGKSTERNVDVHDIWHILFSFDSVEKLKEYAKEKLKLDEKSCKNFSKIILKKDYASLSLKAIKNILPYLEKGLIYSHAVFMANINKVVDKDIWKNETYRNELQTKINYIIENNSFENRINQVINGIIKTTKDNGDKYSPEKENYYRKIIEQALENEFGKSKWESIENKDAHFEQTIADFKFQINKYKNPFIKSKRLDEKIENLLLGNNDTGEIFCTDKKLLENLYHPSDIKKFKSKTIKNKEGKKFTGLGSPATPSVRNPMAMRSLFQLRKLINTLIIENKIDQNTKINIELARELNNSNKRIAIRQWQNSLEKRRAEYAEKIKESFQAETGKLVEPTKDDILKYQLWVEQNQKCLYTGTQISVSDFIGQNPKYDIEHTLPRSQSEDNSQMNKTLCQIRFNRDIKKNRMPSQLNNHEEILQRIEHWKTKYIKLDKQTAQITRSVKGATTKEQKDRKIQKRHLLSFERNYFKGKYERFIMEEIPSGFKNSQIIDIGIISKYSREFLSSVFNRVYSVKGEMTAQYRKAWGLQESFKDEFGNKHYKPKDRSNHVHHCIDAIVIANMDKKKYDTIAHAWASEEVGEFQKAKNILSKTKPWETFTQDVKKIKDEIFIVHHTPDKIKIQSKKKMRKRGVIQRNTKGEIIYEQGDTIRGSLHQDTFYGAIAQNKDGKILYDGKGKIIPSYVIRKELGNLNKHNVENIVDPKIREIVKNAILEKKIKFNNNGATVNGIIWQNEKKHIPLKKVRIYAYVKNPIKNFKKHRDVSKYEYKRQFNVVNEENYCMAIYEGKDNKGNLKRSFKLISAINIAKNLKKEDVINSKYLIPDSVEIGKKSKIILNKKGILKKGTMVIFYKNTPDEIWSLNKNEISKRLYKVAKFDARPRVISRHHQVAKPTSELIENFELNFDKLVDQLNLSLTNFNVIIEKIDFNITQTGNIEKC

SEQ ID NO: 3803 - protein, 990 aa, unidentified
  REGION 1..990: note = Description of Unknown: Cas Enzyme sequence
MSSYALGLDIGSNSIGWALLETEGKPSIVDMGVRIFPEGVDRDTKGLEKSKNATRREARGARKTHQRRSQRKEQLLKTLQEIGFLPTSDTEFRSLIHTTNPYELRKRGLDEKLKQHEFGRALYHLNQRRGFKSNRKSGKASEDGVVIKGANTLQIEINEKGCRTIGEYFAGLNPEEKRIRKQYTFRSMYADEFDLLWEKQKEFYPDILTEDLRKKIRDEIIFFQRPLKPQNERIGNCELEPEEKRCPRGDWYARRFRLLQDVNNLKIQNPDGSEGALNNEQRKALLEELGRKEKLRFDEIRKKFGFIETQKFNAEYRIGLKGKKVESIKGDAFAATIGNKKVLGSKAWDTMNEPQKIELNTAFVEMEDDELAEKLKSQYGLNDKQIEQAMKVSLPQGYMSFSRKAIMKLLPFMEAGAITSEAIEKSGYTHNTTTDSKTVEKLPLPPDLRNPIVQKALFEVRKVINAIVREYGKPKKIKIEMARDVQGNSRQREELHWKQHENKERNEETRKRLKEDIKTNNPTRDDIIKYKLWEECGKACPYTGKHISQTALFGENPEFQIEHILPYDRSLDDSYMNKTLCEAHENIHVKKGQTPFEAYSHNSSKYEEILERVNKSAMPYPKRRKFWQKEIDLDQHIARELNDTRYICREVVQYLKQLGVNVRGTRGKITSELRHQWGLDGVFDEIGTKRDDDHRRHAVDAVVVGVTENDHLRRLAKSKYAIKNEAFDPPWTDFREAVRENVKQINVSHRVQRKVSGALHKETNYGATNKEGLYVSRKNLEDLTQSMVEDIVDPVVRAIVKKKMEEKGTDFWKEPVYMKTTKSDKKVPIKKVRIFNVAKNMIPMKDEQGQTYRYVEPGSNHHIEIFEFTDAKGKIKKDGQVISMFDAVQRSRKGEPVVKKDYGDGKKFVCSLAINEMFMLKLNGGEKEIHRVQKITQSGNNISIIMRPHIYSGKVSDYDKPPLIQRKSPNTLQGYKIIVDPLGKLYPAND

SEQ ID NO: 3804 - protein, 970 aa, unidentified
  REGION 1..970: note = Description of Unknown: Cas Enzyme sequence
EIWETQKTFDGQLAEQFTNDCKKEIYNPQKTDTWRCQGVLFSQRKAYWNLGTLGRCDLEPTDEKCPKADMYAQEFLVLTSVNNIRITPPMEAIRKLTKEERTKVVNAVRKQKTASESTIRKALGIDKGANKTLYTLNTDGDKFTVNGNWFYSQIACGVFGEDAWAAFDNNMKESVNRAILKFDPGEDSDTKKLTAGCKEWWKLDDEQVEKIIAAWKTRTKKDTRVNLSRKAIKNLMPHLRKGWSVTEARNMFAEDASNGADDLTRKRYSTKEVVVNKRIRHFQGKHPGLLPPVSEGISNPVVRKSIHEVRRHLMEHIRQYGRPDRVVIELAREARQSEKVIAKRIRKNKAIDALKKEIIETHNLNASDKTSTQRERAIKRVRLCKQQREMCAYSGVTITDVMAADGSGLEIDHIVPRSKGGKNVMSNLVLCYATANQGKGQKTPIDWLSKENFEKIEQIFKHLRGDKKDRAVVKKDNVDMVDNAKWKNLHRKTPQEGFTEEQLRSAAYAATQTTDWINKVLYGSSDRGKRYVFASNGNYTGILRRDWGLFFDEDGERSEKGRKNRGDHRHHAVDAAIIAVTPQGLPKIKQSFVDFEEQKENKKVKANWKTVEQPWEGFSEQIAEEYKKLKVSHRAYNKQIAGYLYKDTLYGPAVIYEKHKKDDAKKGIKKGDIKTDKDGNPVLKEGMYIKSIPVIKIKQNHLRMPDGWDKLKEEYKSAGTKPQRKAIRRKMLALEDVPPAKTGIIRDIELRDKIRDWLKENNFENMEKAKAYLKKNRLIVNGTPVRKVRLLWKLKEVKEIARKGFDYENSTREKRRKSLRVYQTQNNHHIEIRENVNKKGEVKWTGEVITNFDAAKRVRADKKSIVDRNENKNGKFIMSLARGEIVHMKHPDIQKPNYFVVFKIDSNKAIHFTPHTDGNPASSRKKGVKLREDIVLVPNNLRQSIIFNGDEIPEKVKISPLGEIKVLAND

SEQ ID NO: 3805 - protein, 936 aa, unidentified
  REGION 1..936: note = Description of Unknown: Cas Enzyme sequence
VLFSQRKAYWNLGTLGRCDLEPTDMKCPKADMYAQEFLVLTSVNNIRLTPPREASRKLKEEEKEKVVSAVRRQKTASESTIRKALGINKGANKTLYTLNTDSDKFTVNGDWFYSQIVCGVFGEEAWLSFDDDKKDSVNKAILKFEPNEDSDIAKLAAGCNKWWGLDEEQTKELIAIWKKRNKKDIRVKLSRKAIKNLLPYLRDGWSVSEARDMYAEDALNGADDLTRSRYSTREVVVNKQIRHFQEKHADLLPPVSEGISNPVVRKSIHAVRKHLMKYIKRFGRPDRVVIELAREAKQTAKVIEGKIHKNKAIDKLRKEIIDTHKLDAPGITSTQRERAIKRVRLCRQQKKMCAYSGVTITDVKAANGRGLEIDHIVPRSKGGDNGMSNLVLCYSTANQGKGNRTPIDWLNKEDFGKLEKIFKHLHSEKSKKGQRFITKDNVDMVNEAKWKNLHRKTPKEGFTEEQLRSTAYAATQTTDWIRKVLYGSEDRSKRYVFASKGNYTGILRRDWGLFFDEDGERSEKGRKMRGDHRHHAVDAAIIAMTPKCLPKIKQSFIDFEKQKENKNVKPQWKTVEQPWDGFSEQIAEEYKKLKVSHRAYNKQIAGYLHKDTIYGPAVIYERHKKDDEIKGVKKGEIKIDKDGNPVLKNGMYIKSIPAIGIKQNHLRMADGWDKLKEEYKTATTKPERKAIRKRMLALDDVPPAKSGIIRDIELRDKIRDWLKEHNFADMGKAKTHIKENGLIINGTPVRKVRVLWRLNEVVEIPRKSFDYKNGKVTKSKDRKSLRVYQTQNNHHIEIREKVNKKGIVKWSGEVVTNFDAARRIRGDKKPIVDKSENNKGKFVMSLSKGEVVHMKHLETGKPDYFVVFKIDSSKTIHFTPHTDANPASSKKKGVKLREDIDLSPDKLRQNIIFNKDDIPEKVKITPLGEVEVLEKD

SEQ ID NO: 3806 - protein, 1003 aa, unidentified
  REGION 1..1003: note = Description of Unknown: Cas Enzyme sequence
MNSYTLGLDIGSNSIGWALLKKEGKPSIKDIGVRVFPEGVDRDTKGAEISKNENRRNARSSRRMHQRLSYRKSKLVKILREKGLLPQEDEELEKLFLKDPYKIRAKGIDEKLSLFEFGRALLHLNQRRGFLSNRKSSKSKKEDNIVNTNASALKAKIEQFSCRTLGEYLSKVDTAKERRRDRYTFRSMYEEEFEELWEKQKQFYPKILKEDLKKVVKDETIFFQRPIRWDRDTIRDCDLEPGEKVCPRSAWYARRFRILQDINNLEIYNTDGSSDKLSDERNEERRKVLLEELLNKKEVTFDALRKKFGMLESQTFNLEEGATDKKKAKLKGDELAAQMRSAKILGKKGWEKLSETQRIEINDLIIDDDIEDNELVKILIDKYGFSQTQAEETLDVSLPSKYSRFSKVALKKLLVEMKKGKHVHEAIQAVYGKPQAIPDKGETLDFLPAPDDLRNPIVNRGLFEVRKLVNAIIREYGKPKRINIEMAREIKGSKKERDEIRFKQNENKKRNEETRKTLIDDLKIPNPSRDDIIKYKLWIECNKVCPYTGKTISQNALFGQNPEFQIEHIIPYSLCLDDSYMNKTLCYVDENKNKSNETPYEYYAEKKPKQYEEILQRIRVLPYPKRRRFSQKEVKLDKFIERQLNDTRYISREVVKYLKKLGVIVKGARGQVTAELRHCWGLNNILDLSGEGLKNRDDHRHHAVDAAVTAVTRNEHLRELARTKFPKNSKEFQQPWPDFREELEERVKHINVSHRVKRKVSGALHEETSYGPTGKKDEKGQDMFVYRKKLEDLTVPMVEKIVDPVVREILKNHLIERGIDPEKDKKMRKEVWNEPLYMKTTKSKKKIPIKKVRISEVLGNAKGIRDKQGKIYRYVKPGSNHHIEIFEYTNKKGKVKRDGKVITMFDAIQRSQRGEPVVKRDYGDGGQFIRSLGINEMFLMDTGEGNTELYRVQKISQNGQIFFRPHTFGGDLKKQKAISKVPNQLKGHKVTVDVIGRIHMAND

SEQ ID NO: 3807 - protein, 1002 aa, unidentified
  REGION 1..1002: note = Description of Unknown: Cas Enzyme sequence
MNSYTLGLDIGSKSIGWTLINNKPCSILDIGVRVFPEGVDRDTKGAEKSKNATRREARGARRTHRRRNHRRNKLVKILRAIEFLPDNRQELKKLLEKEPYQLRAKGLDEKLELYDFGRVLFHLNQRRGFKSNRRTGKVKDDNKIAKAAGELEQKIEQAGCRTLGEYFAHINPQEKRIRAQYTFRSMYEKEFDELWKKQAEFYPDILTEELRRNVRDETIFYQRPLKPADHLIGDCDLEPGEKRCPRADWYARRFRIFQDINNLKIHNTDGTTSDLDENQKRKIFEQLSKAKEVKFDKLRKMLELSENQEFNAEYEINTKGKKKDKLKGDVFGASMQSKKIFGPVVWGSMNESKKIKLNDWLIELEDDELIERLAAEYKLNEEQVKSVLKIQLPQQYMRFSRKAIQKLLPIMQKGKRTDEALAEIYPDRNRNDIEEKGKLDLPEDLRNPIVNKALFEVRKVVNAIIREYGKPAKIKIEMARDVKGNLRQRQELQFKMWENEKRNNEAKKRLTDDIGIRNPSRDDIIKYNLWEESDHSCVYTGRHISQSALFSKNSEFQIEHILPYDRSLDDSYMNKTLCEVNENIHVKGNKTPYEAYNNEPEKYEQIKQRVKILPWPKRHKFLQKEINLDDSIRRELNDTRYICREAIKYLKQICSNVSGTRGKVTAELRHQWGLNNILDLSGSEIKNRDDHRHHSIDAAVVAVTKNEHLRKLAKSKYSQTAGGFELPWPDFRQELEEKVKHINVSHRATKKVSGQLHEDTSYGITGMKDEKGQDIFVYRKKLEDLTVSMVNKIVDPVVRQIVKQRLMEFGIDLEKNQKIGKEVWLQPLYMKTTRSDKKVPIKKVRIIDVFNNMILLNDTSGKPYRAVTSGNNHHIEILEYTGKKGRTKWEGEVVTMFEAVRRNQNGEPVIKRDHGPDKKFVCSLSINEMFMLQIEEGNGELHRVQKITQSGNNISIIFRPHTYAGKVSDYDKPPLIQRRSPNTLKGHKVTVDMLGRVHMAND

SEQ ID NO: 3808 - protein, 986 aa, unidentified
  REGION 1..986: note = Description of Unknown: Cas Enzyme sequence
MNSCTLGLDIGTRSIGWALLKTGKQPSIVGIGVRVFPEGVERDKGLEKSKNTTRREARGSRRIKYRRNQRRDKLVKILQSAGLLPDDKEKPNDLFQKDPYKLRADGLDDKLELYEFGRVLFHINQRRGFKSNRKTDNSKDDGQIAKAVGELQQKIKKEKCRTLGEYFAKIDPEEIRIRGHYTYRSMYEEEFDMLWNKQAEFYPEVLTGDLRKKIRDEIIFFQRPLKPTDDLIGDCELETGEKRCPKGDWYARRFRLLQDLNNLKICNPDGKVEVLEQDQRNVLIDELSKKKEARFSAIRKKLGLLETQKFNAEYEVSEKNKKNEKIKGDLFNAMMRNKKIFGPEMWDSKDDAEKIKLNNWLVELEDDELKEKLTSEYGLKEDKIENILKISLPQRYMSFSQKAIKKLLPLMEEGKRTDEAIDTVYPERGKEIDIKEADKLPLPEDLRNPIVNRALFEIRKVINAIVREYGKPKKIKIEMARDVRGSARERREIHFKMLENEKRNKETRKRLIEDMNNPKPSREDIIKYKLWEECAHTCPYTGKHISQTALFGENPEFQVEHILPYSKSLDDSFMNKTLCCVKENRLKGNNTPYEYYSGDNEKFEQIMQRLNKTAMSYWKKKKFWQKEINTDKIIERELNDTRYICREVVKYLKQICKDVSGTRGKVTSELAYQWGFIKDRNDHRHHAIDAAVVAVTKNKHLHQLGQSKYSKEVTFAPPWPHFREELAEKKKKINVSHRVSRKVSGALHEETAYGPTGQQDEKGQNIFVYRKRLEDLTGPMVSKIVDPVVKHIVRERLEKHNLNPDKDKKIPKEVWNESLYMKTTKSKKKVPIKKVRIQDVFNNMILLKDKSGIPYRAVAPGNNHHIEIFEYKDKKGQIKRDGKVVTMYETVQRSQRGEDVICKDYKDRKKFICSLAINEMFMLESDDDSENLFRIQKISQNGQVFLRPHSFAGDLKKTKAVSKVPNKLKGRKVTVDMLGREHSAND

SEQ ID NO: 3809 - protein, 1156 aa, unidentified
  REGION 1..1156: note = Description of Unknown: Cas Enzyme sequence
MKLLGLDIGSNSVGSVWVDTDKKLIQMGDSVFPAGIEESDTKRGAPKNQARRGKRSQRRSIERRAERTHQIRAFLLKRGWMPSDGEREKKWLEESNPWVLRKEGLYRELTQYEFGRVILHLVQRRGSYGFGVDEEEEDAGKIKDAISNTRKAMKDAGAETFGEFMAMKFEERKREIGIRGKMVRGAIRNRTKATGDGTYEFCADRDLIWEEFDNLWKKQKSFGGELSKQLSDECRRELDNPESDATWRYKGILFGQRKTYWDVGTMARCDLEPTDMKCPKADMHAQEFLVLETVNNIRITAKGELKRALTREEQEKVIGALEKQKTASEATIRKAMGIDKGEKKGDYTLNLEKDPKRGLNTNWFCREIIGAIVVETWESMDDRKRESINKAILKFDPQEKNDVKQLTEGCRKWWAFDEGQIERFIEGWKKRPKVDDRVNYSRKAIRNLLPYMREGFTVNEARQRFAEDATNGASDAQRERYSFGARAGNRRVRRYMEKHADLLPPAPKDISNPVVRKAIHEVRRHIQAYIRKFGCKPERVVVELAREARQSAVVRNRQLAENRSREAKRRDVVEEIRKYVNWEELSKTQQEKAVKRVLLCKVQKYHCAYCDNDNDTITDGLAAKGEGVELDHIVPESRGGDNGLNNLVICHTKCNRGKGNRTPREWFTEEQFSRLEHRLGHLKQENETKWDNLHKEVPDLNGFVESQLTDTAYAARQVVGWLEKTLYADRNDGKRHVFTTKGRYTAILRRDWGLFPGDKGEEATDKNRADHRHHAIDAVVIALSGPERLSQLARAAEAVEIERVGKREPITPPWGDFDSFRGDVVKEWKNLIVAHRPESRKVTGSLHNDTQYGLVVDEKGKSTGEFTVRKFAVALTPNHLRVPKGWEELRVKLEICHSKREQRRICKEMLALPDVAGGKSGLIRDRWFREELRECLRKENLDPDNFSSKQIKDLIKTKGLFLKSGVPVRRVTLIRKPTVIEIKRKRWNPNTGKMEHDPYPRSGRYYEPQNNHHIEIRENKKGKWIGEVITTFEAAQRVRPSNSSMRRPQSAVNHEDTKDGRFVMSLSIGEMVYMKHPETGKADYFVVFKIDGTGAVHFAPHWDAGRAEAKEKYPAREDVNGGLTAGQLQELGAEQGKGPQKVWVGPLGDVKVLHRD

SEQ ID NO: 3810 - protein, 993 aa, unidentified
  REGION 1..993: note = Description of Unknown: Cas Enzyme sequence
MNSCTLGLDIGSNSIGWALLETEGKPSIVDMGVRVFPEGVDKDTKGLEKSKNATRRESRGARRSHQRRNLRKEQLLRTLQIAGLLPKGESAITSLFQKNAYELRKKGLDKKLELFEFGRILYHINQRRGFKSNRKSGDSKENGTVKKEAGELQRKIEAAGRRTIGEYFAGINPEEQRIRKRYTFRSMYENEFDLLWAKQLEFYPQVLTGELRKKIRDEIIFFQRPLKPTDKLIGECELEPGEKRCPRGDWHSRRFRLLQDVNNLKIQNPDGSDDKLSDEQCKALLDELGCEEKLSFDEIRQKFGLIETQKFNAEYRIGTKGKRVESIKGDVFAAKMGSKKVFGAKAWDGMNEQQKMELNAAFVELEDDALAEKLKSQYGLNDKQIEQAMKVSLPQGYMSFSRKAIMKLLPFMEQGAITSEAKEKAGYNQNRVTDGKTVDKLSLPPDLRNPIVQKALFEVRKVVNAIVHEYGKPGKIKIEMAREGQGSSKQREELHWKQVENKERNEEVRNRLMQDMNILNPRRDDVIKYKLWEECGKVCPYTGKHISQEALFGKNPEFQIEHILPYDRSLDDSYMNKTLCEVHENIHIKKSQTPYEAYGHETQKYEEILTRVNKSQMPYPKKRKFLQKEIDLDKHIERELNDTRYICKEVVSYLKQLGVNVRGTRGKITSELRHQWGLDGVFDEIGTKRDDDHRRHAVDAVVVGVTENEHLRRLAKSKYAVKDETFDPPWPDFREEVRENVKQINVSHRVRRKVSGALHKETNYGATDKEDLYVFRKNLEDLTLPMVKDIVDPVVREIVKNRLEKKGVDLNGKDRKPPKEVWKESLYMRTTKSKKQVPIRKVRVYSVAKKVIPMKDRSGQPYRYVEPGSNHHIEIFEFTNPEKKEQRDSKVVTMFDAVQRSVGGQPVVQKNHGEDTRFICSLAINDLVMMKNKRGEMDLYRVQKMDANKMVRFRHHTASTIERKETYIDKTAHLFEGHKVTVDPLGRVWPAND

SEQ ID NO: 3811 - protein, 991 aa, unidentified
  REGION 1..991: note = Description of Unknown: Cas Enzyme sequence
MDSHTLGLDIGSNSIGWALLETEGKPSIVDMGVRVFPEGVDRDTKGLEKSKNATRREARGARTTHQRRSQRKEQLLKTLQGIGFLPTTDTELRTLFHTNPYGLRKKGLDEKLERYEFGRALYHINQRRGFKSNRKSGKANEDGVVIKGANSLQTEINAKGFRTIGEYFAGLNPEEQRIRGKYTFRTMYADEFDLLWAKQKEFYPDALTEELRKKIRDEIVFFQRPLKPQDEKIGNCELEPEEKRCPRGDWYARRFRLLQDVNNLKIQNPDGSEGVLNNEQHEALLDNLGRKEKLRFDEIRKQFGFIETQKFNAEYRIGLKGKKVESIKGDAFATTMGSKKVLGSKVWDAMNESQKIELNMAFVELEDDALAEKLKSQYGLNDKQVEQAMKISLPQGYMSFSRKAIMKLLPFMEAGAITSEAIEKSGYNHNKTTDGKTVEELPLPPDLRNPIVQKALFEVRKVINAIVHEYGKPGKIKIEMARDVQGSSKQREELHWKQHENKERNEEARKRLKEDIKINNPTRDDVIKYNLWEECGKRCPYTGKHISQEALFGSNPGFQVEHILPYDRSLDDSFMNKTLCEAHENIHVKKNQTPYEAYGHLPERYEEIKQNIKILPWPKRKKFLQENIDLDQHIDRELNDTRYICKEVVSYLKQLGVNVRGTRGKITNELRHQWGLDGVFDEIGTKRDDDHRRHAVDAVVVGVTENEHLRRLAKSKYAVKNEAFNSPWPDFREEVRENVKQINVSHRVQRKVSGALHKETNYGATGKEGLYVFRKNLEDLTLPMVEDIVDPVARKIVKKRLEEKSIDLNGKDRKLPKEIWKEPLYMKTTKSNKRVPIKKVRVYNVAKKMIPIKDRSGQPYRYVEPGSNHHIEIFEFTCPEKKGQRDSKIVTMFDAVQRSIGGQPVVQKNHGEDTRFVCSLAINDLVMMKNKRNETDLYRVQKMDANKMVRFRHHTASTLERKETYIDKTAHLFEGYKVTVDPLGRVWPAND

SEQ ID NO: 3812 - protein, 1002 aa, unidentified
  REGION 1..1002: note = Description of Unknown: Cas Enzyme sequence
MGSYTLGLDIGSNSIGWALVETKKKPSIVGIGVRVFPEGVDRDTKGLEKPKNATRREARGARRTHQRRNLRKEQLLKTLQKAGFLPTSESELRSVFHTNPYGLRKKGLDEKLERYEFGRVLYHISQRRGFKSNRKSGRAKDDSIVIKEANTLQTEMDTKGCRTIGEYFAGLNPEEQRIRKRYTFRSMYENEFDLLWARQSEFYPDVLTEGIRKKIKDEIIFFQRPLKTQDELIGNCELEPDEKRCPRGDWNARRFRLLQDVNNLIIQNPDGTEQKLSADQNQRKIILEELGQKEKLTFDKMREKLGLMETQKFNAEYRIGKSGKRVESLKGDAFSAGMRSKNVFGANRWDAMDEQEKIKLNEWFVELEDDQLKEKFRSEYSFDDKQANAVLKISLPQGYMSFSRKAIIKLLDFMEQGALTPEAIAVAYRDRKASRVENTGFDSLPLPEDLRNPIVNKALFEVRKVVNAIVREYGKPAKIKIEMARNVQGNSRQRKELHWKQRENEERNEKARKRLREDIGINNPTRDDIIKYKLWDECGKTCPYTGRHIAQTALFVKDNAEFQVEHILPYDRSLDDSYMNKTLCEVHENIHVKKGQTPYEAYSHEAGNYEQILERVNKSAMPYPKRRKFWQKEIDLDQHIQRELNDTRYICREALRYLKQLGVYVQGTRGKITAELRHQWGLDGIFDELGLRRDDDHRRHAVDAVVVGVTENEHLRNLAISKYSVTGIRFEAPWADFREEVREKVKQINVSHRVQRKVSGKLHEETNYGPTGKKDEKGQDIYVYRKPLDALTMPMVEKIVDGVVREIVKNRLTEKGIDLDSNDRKIPKEVWKEPLYMRTKKSDKKVPIKSVRIRDVKTNVIPFKDNTGKVYRVADPGSNHHIEIFEYKDKKGNIKRDSKVVTMFEAVQRSRKGESVVCKDHGDGKKFVCSLSINDMVKIKNKTGEMDLYRVQKMDANKMVRFRHHTASMIEQKETYIDKTAHLFEGHKVTVDPLGRVYPAND

SEQ ID NO: 3813 - protein, 1000 aa, unidentified
  REGION 1..1000: note = Description of Unknown: Cas Enzyme sequence
MGSYTLGLDIGSKSIGWALLGDGKKPSVVDIGVRVFPEGVDRDTKGLEKSKSATRREARGARRIHRRRNFRRNQLVKTLQSDGLLPKDKQQLKELFKKEPYKLRSIGLDEKLDLFDFGRVLFHLNQRRGFKSNRKTGKANENNKIAKAAGELQQKIDDAGCRTLGEYFAGLNPEENRIREQYTFRQMYEKEFDRLWEEHAEYYPNILTENLRNKIRNEVIFYQRPLKPTDDLIGDCDLEKGEKRCPRGDWYARRFRLLQDVNNLKLQNSDGSEGKLTEEQRKTIIEVLEKRKELKFNDMRKKLNLMETQEFNLEQGGKVKSLKGDVFSSAMRSKNLFGPKVWDTMDEAEKIKINEWLVDLDDDELIENMKSEYDLNDEQVDRVLKVSVPQRYMSFSRKAIRKLLPLMEEGKRTDEALAEVYPDRNKKGIEEKNKLALPEDLRNPIVNKALFEVRKIVNAIVREYGKPKKIKIEMARDIKGNRREREELHFKMRENERRNEETRKRLIEDIGIRNPSRDDVIKYNLWEECGHTCPYTGKHISQSALFSDNPEFQIEHILPYERSLDDSYMNKTLCDVYENIHVKGNKTPYEAYNSNSEKYEEIKQRIKVLPWPKRRKFLQKKIELDECISRELNDTRYICREVVKYLKLLGVNVTGTRGKITSELRHQWGLNNILDLSVSDMKNRDDHRHHTIDAAVVGVTRNEHLRRLAKSKYAETGTGFKFEHPWKDFREELGEKVKHINVSHRATRKVSGPLHEETSYGITGEKDEKGQNILVYRKKLEDMTGPMVKNIVDPVVKGIVKDRLAKNDIDPEKQKKIPKEVWAEPLYMKNTKSDKKVPIKKVRIYDVAKRIEIFNDNEGNSYRAVKPGSNHHIEIFEYTKGKKKGKRDGEVVTMFEAVRRKCSDEPVIKRNHGSDKKFVCSLSINEMFMLELDDGLMELHRVQKITQSGSNISIIFRPHTYAGKVSDYDKPPLIQRRSPNTLKGHKVTVDMLGRVHMAND

SEQ ID NO: 3814 - protein, 995 aa, unidentified
  REGION 1..995: note = Description of Unknown: Cas Enzyme sequence
MGSYTLGLDIGSKSIGWALLTDGKKPSIAAIGVRVFPEGVDRDTKGAEKSKNATRREARGTRRIHKRRNLRRDELAKRLREAGLLPNDEQELQELLKKDPYQLRARGLDEKLELCEFGRVLFHINQRRGFKSNRKTGRAKEDGKVAKAAGELQQKINEAACRTLGEYFASLNPEENRIREQYTFRQMYEKEFDRLWEKQAEFYPEIFTENLRNKIRNEIIFYQRPLKPTDDLIGDCDLEKGEKRCPRGDWYARRFRLLQDINNLKICSPEGNENALKDQQKATILGELLNKKEVSFSSLRKKLGLLETYEFNAEYEVNDKGKKNDKLKGDEFNASMRNKKVFGPKVWDAMKEAEKIKLNGWLVELDDDELIEKLVGEYGLTDEQREAVLKISLPQGYMRFSRKAIHKLFPLMESGKRTDEALDKIYPDRIKREEWGTKDKLDLPEDLRNPIVNKALFEVRKVVNAIVREYGKSKQIKIEMARDVQGSIKQRKQIHWKMFENKKENKRVRQRLIEDIKKNPTRDDIIRYNLWEECGHTCVYTGKHISQAALFGPNPEFQVEHILPYDRSLDDSYMNKTLCDVHENIHVKKGQTPYEAYSADAEKYEQILQRVNNSTMPYWKRRKFWQKEIETDKIIERELNDTRYICREAVRYLRQVCKNVTGTRGKITGELRYQWGLIKDRDDHRHHAIDAAVVAVTEQRHLRELGRTKYSVEGIKFSPPWQHFREEVEEKVRHINVSHRASRKVSGALHEETSYGITGEKDEKGQDIFVYRKKLEDLTGPMVAKIVDGIVKQIVRERLAEHNIDPNKTKKIPKEVWNEPLYTKTTKSDKKVPIKKVRIHSPFDNMILLNDKSGKPYRAVAPGSNHHIEIFEYTEGKKKGKRDGEVVTMFEAVRRKCSGESVIKKDHGSDKKFICSLSINEMFMLELDDGLMGLHRVQKITQSGNNISIIFRPHTYAGKVSDYDKPPLIQRRSPNTLKGHKVTVDMLGRIHMAND

SEQ ID NO: 3815 - protein, 1185 aa, unidentified
  REGION 1..1185: note = Description of Unknown: Cas Enzyme sequence
MKLLGLDIGSNSVGSAWIDTEAESIKMGVSVFPAGVEEQTDKRGAPKNQARRSQRQQRRSIERRAKLKRRLRQYLIKKSWIPTERNKLKVCQNLNPWILRKDALHRELNELEFGRILLHLAQRRGAWWFDEEPEEPEERKKKKKDPAETPGTVEYTKRIMEDKKAKTFGELIAIEYEKRKTATGNKDKKRNDRIRNRNDAFGDKVSEFVADRHMILVEFRKIWETQNSFGGQLAKQLTDDCKKEIYNPKKTETWRCQGVLFSQRKAYWNLGTLGRCDLEPTDMKCPKADMYAQEFLVLTSVNNIRITPPTEASRKLTEEEREKVVSAVRKQKTATESTIRKALGIDKGKNKTLYTLNTEGDKFTVNGDWFYSQIVCNVFGEDTWLSFDDGKKDSVNRAILKFDPKDEANENKLKTGCKEWWKLDDKQTESFLYAWKKRPMKESRVNLSRKAIKNLLPYLREGWSVTEARDMYAEDASNDANDLTRRRYSTREIVINKQIRHFQDKHPNLLPPVTEGISNPVVRKSIHEVKKHLMEYIRQFGNPPDRVVIELAREARQSEKVISKRIQKNKAINALKKEISETHNLNDPGTTSTQRERAIQRVRLCRQQRENCAYSDATITDVMAVDGSGLEVDHIVPRSKGGNNGMNNLVLCYATANQGKGNRTPIDWLSKEDFRQLELRFKHLEGSKKDKSTITKDNVDMLDNAKWKNLHRKTPKEGFTEEQLCSTAYAATQTTDWINKVLYGSRDRSKRYVFASSGAYTGILRRDWGLFFGEDGERSEKGRKIRGDHRHHAVDAAIIAMSTPQHLQEIKKSFIDFEKQNENKNVKPRWNTVEEPWEGFSEQIADEYKKLKVSHRAYNKQIAGYLHKDTIYGPAVVYEKDEKGDVKIDQDGNPKLKKGLYIKSISTIGIKQNHLRMPNGWDKLKEKYKNATTKSEKKTIRKRMLALEDVPPGKSGVIRDIELRDKIRDWLKEHNFSDMAEAKTYIKENSLIINGTPVRKVRVLWKLKEVKEIPRNKFNYETGKIVKDDNYKSLRVYQTQNNHHIEIREKTDKKGVVKWSGEVITNFDAARRVRAEKKAIVDRSENNNGKFIMSLARGEMVHMRHPVTKETNYFVVFKIDSSKSIHFTPHTDANPASSKKEGVKLREDIPLVPDMLRQNMIFYENGMPEKVKISPIGEVKVLERD

SEQ ID NO: 3816 - protein, 1184 aa, unidentified
  REGION 1..1184: note = Description of Unknown: Cas Enzyme sequence
MKLLGLDIGSNSVGSAWIDTEAKTIKMGVSVFPAGVEEQTDKRGAPKNQARRSQRQQRRSTERRAKLKRRLRQHLIKKSWIPTEKERLQKWENLNPWILRKDALHRKLNELEFGRILLHLAQRRGAWWFDEEPEETESGKKKKKDPAEIPGTVEYTKKMMKDKGAETFGELIAIEYENRKTITANNKIRNTRIRNRADALGEKESEFVADRHMILMEFFKIWEEQKSFGGQLAKQLTDDCKKEIYNPKKTETWRCQGVLFSQRKAYWNLGTLGRCDLEPTDMKCPKADMYAQEFLVLTSVNNIRITPPMEASRKLTEEEREKVVSAVRKQKTATESTIRKALGIDKGKNKTLYTLNTEGDKFTVNGDWFYSQIVCNTFDEDTWLSFDDGKKDSVNRAILKFDPKDEADENKLKTGCKEWWKLDDKQTESFLEAWKKRPKKESRVNLSRKAIKNLLPYLREGWSVTEARDMYAEDASNGADDITRRRYSTREIVINKRIRHFQDKHPNLLPPVTEGISNPVVRKSIHEVKKHLMEYIRQFGKPPDKVVIELAREARQSEKVISKRIQKNKAIDALKKEIIETHNLNAPGITSTQRERAIQRVRLCRQQREMCAYSGATITDKIAADGSGLEVDHIVPRSRNGNNGMNNLVLCYATANQGKGNRTPIDWLNKEHFGQLELRFKHLEGSKKDKSAITKDNVDMMDNAKWNNLHRKTPKEGFTEEQLRSTAYAATQTTDWINKVLYGSEDRGKRFVFASRGDYTGILRRDWGLFFDENGERSEKGRKMRGDHRHHAVDAAIIAMSTPQHLQEIKKSFIDFEKQKENKNVKPQWKTVEQPWEGFSEQIAEEYKKLKVSHRDYNKQIAGYLHKDTIYGPAIIYEKDPNGNVTICQDGKPKLKKGLYIKSIPAIGIKQNHLRMPIGWDKLKEEYKNATTKLQRKAIRQKMLALEDATPAKSGIIRDIELRDKIRDWLKEHNFEDMGKAKTYIKENGLIINGTPVRKVRVLWKLSEVIEIPRKSFNFETDKIVKNYKRKALRVYQTQNNHHIEIREKTNKKGIFKWSGEVITNFDATRRVRAEKKPIVDKNENKNGKFVMSLARGEMVRMRHPETKEANYFVVFKIDPSKSIHFTKHTDANPASSKQEGVKLREDISLVPDKLRQYIILNENCVPEKVKISPIGEVKVLERD

SEQ ID NO: 3817 - protein, 988 aa, unidentified
  REGION 1..988: note = Description of Unknown: Cas Enzyme sequence
MHSYTLGLDIGSKSIGWALIETCKKPSINDIGVRVFPEGVNRDTKGLEKSKNATRREARGARRNRYRRNQRRNQLLKTLKSAGLLPEEDIEIRNLFKKDPYELRARGLKEKLELYEFGRAIFHINQRRGFKSNRKTGKAKEDGQIAKSAGELQEQVEKEDCRTLGEYFDKVNPEEKRIRGHYTFRSMYEKELDKLWNKQAEFYPDILKEDLQKKIRDEIIFYQRPLKPTDELIGECELEPDEKRCARGDWYARRFRLLQDVNNLRICNPDGSVKSLTPEQRKDLLDELRKKKEVKFSSIRKKLGLLETQEFNAEYEINEKGKKNDKLKGDLFNAAMRSKKIFGPKVWDAMTEEEKIKINDWLVELEEEELREKLINEYKLNEEQIEELIKISLPQRYMSFSRTAIKKLLPFMKEGKRTDEALDAVYPDRNKNIDIEEVDKLPLPEDLRNPIVNRALFEVRKVLNAIVREYGKPGKIKIEMAREVRGSERERRKLHFKMLENEKRNEETIKRLREMGISAPKRDDVIKYNLWEECGHICPYTGKHISQVALFGDNPEFQIEHILPYDRSLDDSFMNKTLCHVHENIHVKGNQTPYETYGQDSEKFEELKQRINRTAMPYWKRQKFWQKEINTDKIIERELNDTRYICREVVKYIKHICKDVSGTRGKVTSELAYQWGFIKDRDDHRHHAIDAAVVAVTKPKHLNQLGESKYSKEGIAFAPPWPHFREELAEKIGHINVSHRACRKVSGALHEETAYGLTGQKDEKGQELFVYRKKLDDLTIPMVLKIVDPVVRNIVKKRLIKKGIDLGKDKNIPKEVWNEPLYMKQTKSDKKVKIKKVRIQDVFNNMIFLNNKSGEPYRAVATGNNHHIEIFEYTDKKGKVKRGGKVITMLEAVQRSQRGEPVVQRDHGQGKKFICSLAQNEMFMLEPENGLTDLYRVQKISQNGQVFLRKHIYSGDLTKQKAVSKLPNKLKGHKVTVDMIGRVHMAND

SEQ ID NO: 3818 - protein, 990 aa, unidentified
  REGION 1..990: note = Description of Unknown: Cas Enzyme sequence
MGSYTLGMDIGSRSIGWALVDTGEKSRIVDIGVRVFPEGVERDTKGMEKSKNAARREARGSRRVRYRRKKRRKDLVKELRGAGLLRAGEEELARVLESDPYMVRRRGVDERLEPYEIGRALYHINQRRGFKSNRKSEKREDGQIAKEAGELQRRIDDAHCRTLGEYLAMLDPEEERYRQRYTFRSMYEKEFDVLWESQRRHWPNMLTDELRQKVRNEIIFFQRPLKPTDELIGDCELEAGEKRCARGNWYARRFRLLQDVNNLKLCHPDGTVQSLSKEQRKFILDDLSEKKEVRFSAIRKKLGLLESEQFNAEYQVNEKGKKNEKLRGDEFNAGMRKVFGAKAWAEMAEEEKIRLNDWMVELDDDELVENLASEYSLNEEQIEKALKVSLAPRYMSFSRKAIEKLLPLMEKGKRTDEALEASYPDRRREGMVEEVEKLGVPADLRNPIVNRALVEVRKVVNALIREYGKPGRIKIEMARDVRGNSRERRQDHFKMLENKKRNEEVRKRLIEDDIVLKPSREDIIKYKLWEECGHICPYTGKHISLTALFGPNPTFQIEHILPYSRSLDDSFLNKTLCEVHENVHVKKDQSPYEAYGHDAEKMDELKQRVNKTAMPHWKKRKFWQKEIATDEIISRELNDTRYVCRETVRYLKGVCENVSGTRGKVTSELAYQWGFVKDRDDHRQHAVDAAVVAVTRNKHLRELGRTKYSKEGPRFAPPWPHFREELAEKVKHINVSHRANRKVSGALHEETNYGPTGRKDEKGQDIFVYRKRLEDLTIAMVGKIVDGVVREIVKGRLRDKGVDLSGRGKITKEVWQEPLYMRNTKSEKKVQIKKVRIEDVFNNMIPLEDDSGRVYRAVAPGSNHHIEIFEYKDDKGRVKRGFDVVSMYEAVRRSQRGDLVVSRRHGEQGRFLFSLGKNEMVMLELEGGDAEPHRVQKIIQDGRIILRPHTYAGKIRDSDQPPLIQRKNATTLQGHKVVVDVLGRIYAAND

SEQ ID NO: 3819 - protein, 1051 aa, unidentified
  REGION 1..1051: note = Description of Unknown: Cas Enzyme sequence
MGRYVLGLDLGPTSIGWAAIKLGEKGKAIGFADLCDGDSLFPAIGARIFPLVVENYGQGKKREAPKNKKRRESRSHRRMLRRRRARRRKLIKLLQANELAPIELAKLETLQKKNPYELRTKGLSEKLEPYELGRIFLHFAKRRGFKSNRKKPEKSDETGKIKDGIEKLKGEIGNKTLGEFWNNKLSKNPLAGIRNRNSYNWVAEREQYRDELARLWKTQQQFYPNVLTHQLHDEISKILFQQIPFELSNRKKRKVIGTCSLIKGKLRCPLSDRKAQEFRLLQKVNDLCITRKGREIESWKEKKPELIKKLSIARELKFEQVRKILELDETDRINFEYEANDKLIGNEIDNKLKILFGEKTWLKLTEERREAIWQEILKFFNDEKITVEQVEDKIKADFGLSVAKGKNIESIELPKGYIRYSKEALEKLLPFMCDGKDLYTAIQEAAFKQSWRSLKKLPLPDKAHGFNRNNPTVGAVMFQLRKVVNSLIRELGKPERIVIEFARELKSSKERRAEIIREQSGNQKEREKAEKTIREHYNWPEDADVSPFDVDKYRLWKEQNHYCPYRGCVIPITKLLSRDTEIDHILPRSLSLDNSLNNKVVCFAEENQAKGQRTPFDWLGENTDRWKRVEQVIDHWNPERKTRGKQKEPAQSSDKEEIYLKPNKQKWGRFFITADQIAEEYAPNHLLNDTSYIAREVREYLKRLYSPEKAESSVKTTKGGITAELRRWWDSNRILGSGNNKKSRLDLRHHTIDAAVIAVSDVNMIRKVTNCLKKAWPRRRPKEIYVDRPWEGFELNLASTIDSVNVSHCAQREVKGALHKETHYWKEENGLRAGKFITRKHLDGGFTTHFAEHICDEEIKKMVLDRLAEYGNDPKKAFKTDSILYLKNKKGESVPIKKVRVWKESSNMIPIRENIWVEPGSNHHIEIFEYTDGKERGKRNGQVVSMFEAVQRKKNKQPIVQRDHGAGKKFVCSLAQNEKFMLELDGEKVLHRVQKITQSGNSISIILRPHTYGGKLSDYDKPPVIQRRSPNTLKGRKVTVDSLGRVRRAND

SEQ ID NO: 3820 - protein, 990 aa, unidentified
  REGION 1..990: note = Description of Unknown: Cas Enzyme sequence
VKSYTLGLDIGSNSIGWALLQDGKKPSIVGIGVRVFPEGVDRDTKGLEKSKNATRRETRGTRRVHQRRNLRRDQLVKALQSVGLLPESKKELNNLLGKTNPYELRKRGLDGKLELYEFGRVLFHINQRRGFKSNRKSDKKKEDGLIAKGAGELQKRINDAKCRTLGEYFADLNPEKERIREQYTFRSMYEEEFDKLWDKQAEYYPDVLTEDLREKIRNEIIFFQRPLKPTEELIGPCGLESEEKRCPRGDWYARRFRLLQDVNNLKIHNSDGSVNELTEEQHQIILVHLSKSKEVKFSKLRKVLGLLETQEFNAEYETNEEGKKREKLKGDEFNASMRSKKIFGPKVWDAMEEVMKIKLNGWLVDLGDDELIEKLTAECGLNEGQIEAVLKITLPQRYMSFSRKAIQKLLPLMEAGKRTDEALDEVYPGRNKVEEINEEERLPLPEDLRNPIVNRALFEARKVVNAIIQEYGKPKKIAIEMARDVRGNARQRKELHFKMLENEKRNEQTRKRLVEDIGIANPSRDDVIKYNLWIECGTICPYTGREISQEALFGQNPEFQVEHILPYDRTLDDSFMNKTLCYVNENRLKGARTPYEFYNGDENKFEEIRQRVNKTKMPYWKKQKFWQKEINTEKIISRELNDTRYICKAVVRYLKQICPNVAGTRGKATAELRYQWGLIKDRDDHRHHSIDAVVVAVTEQKHLRELAKSKYSIDGIVFRQPWPHFREEVEEKAKHINVSHRVQRKVSGALHEETSYGPTRLKDDKGQDVFVYRKKLEDLTGAMVEKIVDPVVKEIVKERLSEKGYAPEKKSTKLPKDIWQEPLYMKTTNSDKKVPIKKVRIRDVFNNMIFLNDREGKPYRAVAPGNNHHIEIFEYTDKRGNIKREGKVITMFEAVQRSQQGEPIVKRDYSDGKKFVCSLAINEMFMLEMDNGLEELYRVQKISQNGQIYLRPHTYAGDLKKQKGISKLPNKLKGHKVTVDMLGRVHMAND

SEQ ID NO: 3821 - protein, 990 aa, unidentified
  REGION 1..990: note = Description of Unknown: Cas Enzyme sequence
MSSYTLGLDIGSNSIGWALLDRDKKPSIIDMGVRVFPEGVDRDTKGLEKSKNATRREARGVRRIHQRRNLRKELLLSTLQTAGLLPKNESDLRSLFHTGPYQLRKKGLDDKLESYEFGRVLYHLSQRRGFKSNRKSGKAKEDSVVIKGANTLQAEIDNKKYRTIGEYFAGLNPKEKRIRGRYTFRSMYEKEFDLLWAKQLEFYPQVLTEDLRKKVRDVIIFFQRPLKPTDELIGDCELEPGEKRCPRGDWHARQFRILQDVNNLIIQNPDGMEQKLTADQRKILLDELGQKEKLPFDKIREKLGLIETQKFNAEYRVSKKGKRVESLKGDNFSWAMRSKNIFGPKVWDEMDEAEKIKLNEWLVEFEDDQLKEKLQSEYGFDDKKIEAVLKISLPQGYMSFSRKAIQKLIPYMKQGMLTPEALDAAYPDRNKKEGVEEKEKLDLPEDLRNPIVNKALFEVRKIVNTIVREYGKPARIKIEMARDVQGSRRQREELHWKQRENEERNEDARKRLKEDIGISNPTRDDVIKYNLWVECGKRCPYTGKQISQETSFGQNPEFQVEHILPYDRSLDDSYMNKTLCEVHENIHVKKNQTPYEAYSHDPEKYEQIKQNTKVLPWPKRQKFLQKEIDLDQHIARELNDTRYICKEVVKYLKKLGVYVSGTRGKITGELRHQWGLDGIFEELGTRRDDDHRRHAVDAVVVGVTENEHLRKLARSKYSVTGERFDPPWSVFREEVREKVKHINVSHRVQRKVSGKLHEETNYGATDKKGLYVFRKELKELTLPMVDKIVDTVVREIVKGRLTEKSIDLTGSGKPPKEVWNEPLYMKCKREDKKVPIKKVRVYNLAKSVIAMKDRSGHIYRYVEPGSNHHIEIFEYIDKKGKAKRDGKVVTMFEAVQRSQKGESVVQKEHGPGNKFICSLAINEMLMLDLEDGSKQPYRVEKISQNKQIFFQPHTYGGELKDHPPISKMPNQLKGYKVTVDPLGRIRWAND

SEQ ID NO: 3822 - protein, 1202 aa, unidentified
  REGION 1..1202: note = Description of Unknown: Cas Enzyme sequence
MKSLGLDIGTNSVGSAWVDTDRKLIEMGVSVFPAGVEESETKRGAPKNQARRGYRGQRKNTKRRAERKQQMRLFLTQQGWIDPNEKKWMELNPWILRREGLKRELSPYEFGRVLLHLTQRRGAWWFDEVSEEDIQKDVEENVEETAQEEKDKEAKKIKGAINNTKKKKKKYNARTFGELMAMKFEEQRIGVGEKGKKIGMPIRNRTKASSEGTYEFCADREMIRDEFDKLWTTQKNFGGELAAQLTDDCLKKLDDQTEDATWRHRGILFGQRKTYWDIGTMGRCDLEPTDQKCPKADIYAQEFLVLETLNNITIIPPGEVKRHLNSDERKKVLMLLKTEESITENKVRKALGLHKGENKTLYTISLEKDPKRELNTWWFHRDIITGAIGESIWEGMSLNQKESINKAILKFDPANKKDIQTLLEGCQEWWNFDEEQAKRFIEAWKKRPKIDNRVNYSRKAIKNLLPYMREPYWLTVNEARQMFCEDASNGATKEQRERYSFNGSGANHRTRQYLEKHPDMLPPAPEEISNPVVRKAIHEVRQHIQDWIRKFGCKPDRVVVELARVGRQSAIVRNKQLIENRQREERKKEIIAQYKLEDLTEPQQYKAVKRVLLYIDEQKNCCAYCDNPLSKENDTASVARGIGVELDHITPQSRGGDNGLNNLVLCHTGCNRGKGNKTPKEWLTDEQFKNLERKLRHLKKENKTKWDNLHREAPDIDEFTKSQLNDTAYASTQVANWLNDALYGEDKEGRRIFTTKGRYTNWLRRDWQLFPDGTDEWTSKKDRGDHRHNALDAVVVAFTDVERLKKLAHAVEAWELAKAEGKEPPKRKRLDPPWGTVESFRKQVMDKYKDMIVSHCAARRGLTGKLHKDEHFGAIPGDDKHFTKRIFAGELTTNHLRVPEGWEELRQKLENAKSISEKRLIRSQMLAIEDVEPGKSGIVRDRWFREELRDCLRRATMADPATGKEFRFDPDNFDKDKESKKKFKEFVKTKGLFLKSGVPVRRITLLRTLGDPVKMRRKQYDPKTGKMIYIDPDKKPSSLRVYDSQNNHHIEIREDEEGKWLGEVITNFDAAKRVRVKQPRPKPKGWSPPPAVNRNNTEKGRFIMSLSIGEMVHMKHPKTGKPNYFVVFKIDKPQTIHFTPHYDAGRDRETEKCPKREDVKKPGSKTGGLRPSYIQNLGIEPNKYPQKVWVGPLGDVKVLVRD

SEQ ID NO: 3823 - protein, 1000 aa, unidentified
  REGION 1..1000: note = Description of Unknown: Cas Enzyme sequence
MTMITGENFMNDYTLGLDIGSNSIGWALLQTKEKPSVVDIGVRAFPEGVDRDTKGLEKSKNATRREARGARRQRYRRILRRNQILKTLQRAELLPKGEKELQELFKKDPYKLRAKGLDERLELYEFGRGLFHLNQRRGFKSNRKSGKAKEDSTVIKEANELQKGIDSNKCRTLGEYFASINPEQQRIRERYTFRSMYEKEFDLLWEKQAQFYPEILAEKLRDRVRNEIIFLQRPLKPSDELIGDCELEPEEKRCPRGDWYARRFRILQDVNNLIIQNPDASEDKLTAEQRKIILDELFQKKELKFDDIREKLNLLETQQFNLEQDGKVKTLKGDVFAAAMRGKNIFGAKIWGEMDEQKKIEINEAVLELDDDALAEKMKNEYNFNEKQVEAVLKVSLPDGYMSFSRKAILKLLPFMEEGCLTSEAIKKAGYDKDDNTDCETADKLPLPPDLRNPIVNRGLFEVRKVVNAIVREYGKPAKIVIEMARDVKGNKRQRDELHWKILENEKRNKEVRDRLREDIKITNPSRPDVIKYKLWEECGKRCPYTGKHISQTSLFGPNPEFQIEHILPYDRSLDDSFMNKTLCEVRENNHVKKNQTPFEAYNHTPEKYEEIKQNIKVLPWPKRQKFLQKEINLDTHISRELNDTRYICKEVVKYLKQLGIYVRGTRGKVTSELRHQWGLDGIFDELGVRRDDDHRRHAVDAVVVGVTENEHLRKLAKSKYSVSGETFDPPWPDFRKEIKEKVRHINVSHRVQRKVSGQLHEETSYGPTNRKDERGQDIFVYRKRLKDLTAPMVEKIVDSVVKEIVKGRLREKGINTKSGDRKIPKEVWTEPLYMKTTKSNKKVQIKKVRIQDPFNNMIPIQDETGKPYRYVSPGKNHHIEIFEYIDEKGNVKRDGKVVTIFEAVQRSQHGEPIVKKDYGDGGKFIWSLAINEMFMLELDNGNSELHRVQKISSNKQIFFRPHIFGGDLQESKGLSKYPNSLRGYKIAVDPIGRVWPAND

SEQ ID NO: 3824 - protein, 1171 aa, unidentified
  REGION 1..1171: note = Description of Unknown: Cas Enzyme sequence
MFLRGSSMKSLGLDIGTNSVGSAWVDTKERRIWMGDSVFPAGVEESDMKRGAPKNQARRGYRSQHRNTRRRSERKHQMRTFLLEKGWMPAESTRQNEWLKHKNPWILRSEGLERKLKPFEFGRVLLHMAQQRGAYGLIEDEDEKEDGKIKKAVSHVRREMNQCKARTFGELMALKFCERRKKVGKKNKEIHMPIRNRTNAAKEGVYEFCADRRLIREEFDNLWKRQKSFGGELGLELTDECRRELDDPSGDETWRYRGILFGQRRTYWDIGTMARCDLEPTDLRCSKGDMYAQEFLVLQTVNNIRIMQRGEQKRPLSEEERRAVIDVLEQQKKANEGTIRKALGIHRGERKTQFTLSLEKDPERGLNTSWFRRDIVIGAIGKDLWEGMSIEKKDSVNKAILKFDPNDEKDVKRLREGCSKWWGFDKKRSERFVEAWKGRPRIDDRINYSRRAVKNLLPYMREGFPVNEARKLFVEDATHGASDEQRRRYSFGAQPGNRALRRYMEKHPDLLPPVPEDINNPVVRKAIHEVRHHIQAYIRRFVCRPDRVVVELVREARQSAFVRNRQLAENRAREKERKKIIEEFNLTGETKTQQRKTVDRVLLSREQRFWCAYCSDTISERDAARGNDVEVDHIIPQSRGGNSFLSNLILCHTRCNRGKGNKTPMEWLTKEEFGLIERRLKHLEKENKVKWENLHSEAPDLDKFVESQLTDTAYAARQVVAWLEKTLYGDKNDGSRHVFTTKGRYTAILRRDWRLFPDKNAGEKNRADHRHHAVDAVLIALSGPERLSQLACSAEKWELAKGEGKAPPEREPLGAPWGDRDSFRAEVMKEWQRLVVAHRPEKRKITGPLHNDTQFGPVLDEKGHLTGEFTIRKFAAELTPNHLRVPEGWEQLRTKLENCNSKAEKRGIRAKMLAIADVKCGKSGIVRDRWFREELRDCLRRNGLNVDVCKEKDKNLREKKMMEFTKKLKEIVKGEGLFLESGVPLRRITLVRNPTVVEIRRKRWNSDTEKMEYDPNRRSWRYYEPQNNHHIEIRESGKGRWVGEVISNFDAVKRVRPSKESGFQPQPAVNRNDTKKGRFVMSLSIGEMIYMKHPETGEPEYFVVFKLDGKGYIHFTPHWDAGKDKATEKHPAREDIRLSARKLQGLGVGPDKCPTKQWVGPLGDSKPLYCD

SEQ ID NO: 3825 - protein, 1030 aa, unidentified
  REGION 1..1030: note = Description of Unknown: Cas Enzyme sequence
MKSYTLGLDIGSKSIGWVLLENSGKPSISAIGVRVFPESIGRDKGTEVSKYKSRREARGARRLIQRRRFRKDRLVKILWEAGFLPRDKKELHDLLLDAHTRNGQEPNMYPYKLRAKGISERLERFEFGRVLYHLAQRRGFKSNSKSGQREEKNKISEGANELKKKITDAGCKTLGQYFASLDPHSDRVRGWYTFRDMYQQEFEEIWKKQAEYHSELTEELRKKVQNETIFYQRPLRSSEHLIGKCELEPEEPRCPRGDWYARRFRFLQDVNNLKIRNRDGSERKLTDKQREIVLDELEKKSEVAFSSLRKKLQKLSGCDARDATEIFNLEEDGRKEKLRGDEFAAAMIKIMGIKTWESTTPQKKVAINDALLELDDDSFTKKMAEEHELNQEQIEAILDIELPSKYVHFSRKAIQKLLPFMERGFLTSEAVNEVYKNRDKGVGEKPKEQERLGIPPNLRNPLVQTALQEVRKFINSLIAEYGKPSHIVIEMARDLKGSKNERLELQKKMWENEKVNKTAIVKLKELGYRITSDNILKYKLWEECGYKCLYTGRSISDTALFGQHPEFQVEHILPYSRSLDDSYMNKTLCEVHENIHVKKNKTPYEAYHNKPEKYDQIKQMIAVLPYPKRRKFQQEGINLDECIKRELEDTRYICKEAMKYLKQLSGIKVSGTKGRVTSELRHSWGLNTILDTTGSGIKNRADHRHHTIDAAVVAVTKNGHLRKLAESKYSEIDSEFPQPWPHFREELAEKVKHINVSHRPTKKTSGKLHEATSYGLTTEVKRHFDDGKIMRLSDNAWLCRETFDYVYSRTPAELFKAVADLDIIPGDANNVWEAVEKRLVKSGINIKDKNAEIPEKVFAETVFIETQNGKKIPIKKIRVKVPMSNMIILTDQDGIPYRACPAGVKNGNHHVEIFEQTDGNGQTKRIAKIVSRIEATRRHSEHKAVVQQDHGPDAKFVCALAINDMVMMPTKNGDIDLYRVQKMEINGQVCYRHHTAATLDDNSQRILQKAHLFTGQKVNVDMLGRIKPVE

SEQ ID NO: 3826 - protein, 1165 aa, unidentified
  REGION 1..1165: note = Description of Unknown: Cas Enzyme sequence
MYSKTLGLDIGTNSVGSAWIDLKQHKIRMGASVFPAGIEESDTKRGAPKNQARRGARGQRRSIERRAKRKHQMRSFLVQKGWIDMDEKKWLGMNPWILRREGLKRELSPYEFGRVLLHLTQRRGAFGFDSDSDEDKEQGKIKEAISHTREQIAKYNAETFGEFMATQFQERKIPIEKVDKEGKRVEISSPIRNRTKGSGEGTYEFCADRDLIWDEFDKLWNKQKSFGGELAAQLTDECRKELDNPKGDAAWRYKGILLGQRKTYWDMGTMARCDLEPTDMRCPKGDMYAQEFLVLETVNNIRITARGESNRPLTREEREKVINALEKQKTASEATVRKALGIDKGEKKTQYTLSLEKDPERGLNTNWFRREIVLGAIGPEKWAKMGDRDRESINRAILTFDPQDKNDAEQLTTGCRKWWGFDEGQTTQFIEAWKNWKKRPKVDDRVNYSRKAIRNLLPYMRDGSTVNKARELFAEDAENGATAEQRTRYCFGAKTASRRTRQYGEKHPDLLPPAPDDLSNPVVRKAIHEVRRHIQAYIREFGCKPDRVVVELAREARQSAKVRNKQLADNRQREKERKKIIQEFNLEGSTKNQQEKAIKRVLLCREQRQRCAYCEEEKDTISEKAAAEGTEVELDHIIPESRGGDSGMNNLVLCHTRCNRGKGNKTPREWLTQEQFGRLEKRLQHLKKTTKWDNLHTDAPDIDGFVESQLTDTAYASRQVVGWLRDVLYEGERDGVRRVFTTKGRYTSILRRDWGLFPDKKEANSEGEQGKKNRADHRHHALDAVVIALSGPERLSQLAQAAEKQELAKSEGYEYPKRDPVRPAWGDFDSFRADVMKEWNNIVVAHRPERRKITGAFHRDTHFGPLLDKKGQLTGHCTVRKFAVELTPKHLRVPNGWEELRKKMEGSASKTEQKHIREEMLSLEDKKPEMSGIVRDKWFREELRDCLRRNNLDPDNFTGKEIKELAKNKGIVLRSGVPVRRFTLMRAPTVVAIPRKRWNADTRKMEYETNRQSVRLYEPQNNHHIEIRQNKRTQWFGEVITNYDAAKRLRPPKNSGQDSQTAVNRNDTEEGRFVMSLSIGEMVYMRHPETREPGYFVIFKIDGTGSIHFTPHWDAGRAKETEKFPARDDIALAAKRLQELGVEPGLPPQKVWVGPLGDVKTLVRD

SEQ ID NO: 3827 - protein, 1158 aa, unidentified
  REGION 1..1158: note = Description of Unknown: Cas Enzyme sequence
MKSLGLDIGTNSVGSAWVDTDRRVVRMGVSVFPAGVEESDTKRGAPRNQARRGHRLQRRTTKRRAVRKHQMRRFLLEMGWMPKEPDAEKRWLDESNPWILRKEGLERELSAHEFGRVLLHMAQRRGAYGVDVGEEEDKDVGKVKEGISETRKAMSQYKARTFGELMAKKYEERRKKIGRRGKTVRGAIRNRTKASGEGTYEFCADRAMMLDEFAKLWDHQKSFGGPLARELTDRCRKELNNPDGYAAWRYKGILFDQRKTYWDVGTMARCDLEPTDMKCPKADMYAQEFLILETVNNIRITPRGALKRPLKDEERAKVIAALMRQKTASEATVRKALEISRGERKAAYTLSLEKDPERGLNTNWFHREVVEAIGQQTWEEMEDKQRDSINRAILKFDPQEERDQERLRNGCRSWWNFTEEQTSQLIEAWKRRGKVDKRVNYSRRAIKNLLPYMRKGATVNEARKLFAKKASGEQRRRYSFGAKAGNKRLRRYMEKHADLLPPAPEDISNPVVRKAIHEVRRHVQAYMREFGCKPDRVVVELAREARQSAVVRNRQLAQNRAREQERKKTIEEIRKYVGEWDRLSRTQQWKAVKRVLLSKEQKYRCAYCGDEQDTITEEAAARGCGVEEDHIIPESRGGNSYLSNLVVCHTRCNRGKGNKTPREWLTDEQFARLEQRLKHLEKENKVKWDNLHKEVPDLDGFIESQLSDAAYAARQVAGWLEKTLYGDKKDGRRHVFTSKGRYTAILRRDWRLLPGGRDGGDKDEKNRADHRHHAIDGVVIALSGPERLSELAHAAERWELARAEGKAAPEREPLDAPWGDRELFRAEVMREWRNLVVAHRPEKRKITGALHNDTQFGPVLDEKGSLTGEFVIRKCAVELAPNHLRVPEGGEQLRAELEQCRTKAERRKIRANMLALPDVRAGKSGVVRDRWFREELRQALRSEGMDPDDFTSKQIKELIKRKGLTLESGVPVRRVVLLRKPSVIGMKRKRWNAVSGHMEYDENPSSVRYYEPQNNHHIEIRQNKKGRWAGEVVTNFNAAKRVRPSKNSGQVPQAAVDREDTEDGEFVMSLSIGEMVYMKHPEKKQADYFVVFKIDGNGYMHFTPHWDAGRAKETERCTAREDIGLPAGKLQKLGAEQGNGPEKVWVGPLGNKRTLYRD

SEQ ID NO: 3828 - protein, 1000 aa, unidentified
  REGION 1..1000: note = Description of Unknown: Cas Enzyme sequence
MNSYTLGLDIGSNSIGWALLKTQGKPTIIDIGVRVFPKGVGREKENEKTKCAERREARGARRVHRRRKLRRDELVKILRENKLLPKDKESLQELLKSDPYQLRAKGLGERLELFEFGRALFHINQRRGFKSNRKTGEANEKSKIAKGDKEHKGANEIAKVIDERKFRTIGEYFGSIDTTKKRIRGQYTFRSMYEREFGLLWEEQSKYYRDILTKELRKKIKDEVIFYQRPVRWDPETIGYCELEDGEKRCPRGNWYARRFRILQDVNNMKIRNADGSEIEITDKQRSIVLKELGKKKKVNFERLRKELSKQDSGLIEKQRFNFEEDGDNNWMNGDGFSEQMRSKKLLGPKGWENLEKKTRIAVNQAVLDLCDKDLKEKAINEFGFNKEQSAAFLEVTLERNYMRYSKKAILKLLPYMEKGLKTHQAKEEAGYKEGSEKIEQSSGGLPRPDDLRNPIVTAALNEVRRLVNRMVGEYDKPKNIVIEMARELKNTKLARKRTLEKNRKNQKLNEEAKSWIKEHTSIKSPRYEDILKYKLWIECNKSCLYTGKSISPTDLFESPVFQIEHILPHERSGDDSYMNKTLCYVDENVHVKGGKTPFEAYHGKPEKYEEIRQRITCLPQPKKERFLQEEIQEGHIERELNDTRYITKETIKYLKKLGVLVRGTRGTATGLLRHNWGLDNIFEELATRRDDDHRRHAVDAVIVGVTTSKHLHDLARTRYSKVDRTFPPPENWPDFREELEEKVRHINVSHRANRKVSGALHEEMNYGPTGCKDVKGQDVFVYRKKLEDLTGPMVAKIADPVVREIVTERLAEHGIDAEKDKKIPNEVWVEPVYMKTKKSDRKVPIKKVRIRGVVSNAEPIQDRDGKAYRYVKPGSNHHVEIWEYTGGEKQGTRDAEVVSMFEAVRRSRAGEHVVKREHGANATFICSLAINDMVMLPVGDEQMDLFRVQRMSVIGQIYFRGHTAARIDDDSTLIRRQAHLFDGYKVVVDCLGRVHRAND

SEQ ID NO: 3829 - protein, 989 aa, unidentified
  REGION 1..989: note = Description of Unknown: Cas Enzyme sequence
MNRYTLGLDIGSNSIGWALLDTGKKPRIVDIGVRVFPEGVDRDTKGMEKSKNAARREARGSRRIHSRRNQRRDQLVKELRYVGLLPKSEQELADLLNMEPYSLRAKGLDEKLKLYEFGRVLFHLNQRRGFKSNSKSNKKTEDGQIAKQAGELQQHIDDARCRTLGEYLALIDPEDERYRERYTFRSMYETEFDLLWEKQAEYYEDVLDDELREEIRDKIIFYQRPLKPTYDLIGDCELEEGEKRCPRGGWHARRYRLLQDVNNLRICNPDGSVEQLTSDERKIVLDELSTKKEVRFSTIRKKLGLLETQQFNAEYEVNEKGKKNEKLMGDVFNAGMRSKKVFGPKVWDNMDEAEKIKLNDWMVELEDDELVEKLAAEYSLDGEQIENVLKISLPQRYMNYSGVAIRKLLPLMERGKRQDEAADDVYPNRRKGNVVEEVEKLGLPADLRNPIVNRALFEVRKVVNAIIRVHGKPERIKIEMARDVRGNARQRKERHFKMLENERRNEEARSKLKEDLNVSSPSRDDIIKYKLWEECGHVCPYTGKQISQTALFGSNPAFQIEHILPYSRSLDDSFMNKTLCEVHENIHVKKGQTPYETYSHDAERFEDLKQRVNRTAMPYWKKRKFWQKEVDTDEIISRELNDTRYICREAVTYLKGICKNVSGTRGKTTAELRYQWGLIKDRDYHRHHAIDAAVVAVTENRHLRELGQTKYSSDGGKFRAPWPDFREELLERVKLINVSHRGRRKVSGALHKETGYGITGRKDNKGQDVFVYRKKLEDLTVAMVDKIVDPVVKDIVRGRVAGRGVNPDGKVKIPKDVWNEPLYMRNRKSSKKVPIKKVRIADVFNNMISLNDKSGRPYRAVESGSNHHIEICEYADEKGKRRRDGEVVSMFEAVRRSRNGKDVVKRDHGEGKTFVCSLGINDMAMVAGKDGETDLYRVQKISMDKVICFRHHTAARIDDASTRIFKTARTFDGQKVVVDALGCIHVAND

SEQ ID NO: 3830 - protein, 987 aa, unidentified
  REGION 1..987: note = Description of Unknown: Cas Enzyme sequence
MISYTLGLDIGSNSIGWALLDINKKSSIIDMGVRIFPEGVDRDTKGLEKSKNATRREARGARRIHQRRTRRKEQLLKTLQEIGFLPTDHSGLRSLFQKNPYQLRKKGLEEKLEKDEFGRILYHINQRRGFKSNRKSGDPKKEGVVKKEAGLLQKQIEDAGCRTIGEYFSGLNPEEQRIRGKYTFRTMYENEFDLLWAKHSEFYPKELTETIRQKIRDEIIFYQRPLKPTDKLIGECELEPGEKRCPRGDWHARKFRLLQDVNNLLIRNADGTERKLTNDERTTLLDELSKKKEIEYSKIRKMLGLLETQKFNLEQDGKVSKLKGDSFSYEMRNKKILGSKKWDEMPENEKIKINEFISELEDEEIIEKFKNEYSFNESQIEAVLKVSLPQRYMSYSRKAICKLLPFMESGSLTNEAKEKAGYKSSEENTNKSFDRLPLPPDLRNPIVQKALFEIRKVINAIIREYGKPSKIKLEMARDVYGNKRQREELHWKILENEKRNKEIRERLMQDINIINPRRDDIIKYKLWEECGKVCPYTGKPISQQALFGQNPEFQIEHILPYERSLDDSFMNKTLCEVHENIHVKKGQTPYEAYSSNLEKYEQILERINKSQMPYAKRRKFWQAEIDLDQHISRELNDTRYICREVVKYLKQLGVYVQGTRGKITSELRHQWGLDGIFDTLGTERNDDHRRHAVDAVVVAVTENEHLRKLARSKYTVNGPSFEQPWPDFREEVCEKTKHINVSHRVQRKVSGKLHEETNYGPTKEENKYVFRKKLEDLTLPMVDKIIDPVVREIVERRLKEKNIDLTGSGKPPKEVWSEPLYMKTTKSDKQVQIKKVRIFNVAKNAIPIKDLSGQPYRYVESGKNHHVEIFEITNSDNTTKRESKVVSIFEAVKRNMDGEPIVTKKHSEGTRFICSLAINDLVMMKNKNGEMDLYRVQKMDANKMVRFRHHTASTIERKDTYIDKTAHLFEGYKASVDPLGRICKAND

SEQ ID NO: 3831 - protein, 999 aa, unidentified
  REGION 1..999: note = Description of Unknown: Cas Enzyme sequence
MPATTLGLDIGSNSIGWALLDDEEGCLVDCGVRVFPEGVDRDNKGTEVPKNARRREARAARRNRRRRAYRKDKLVRLLRRHGLLPMAPEEFERVLSLDPYALRAKGLDDRLDLFEFGRVLYHLNQRRGFLSNRRSGKPKEDGVVIKGASELQRQIKEAGCRTLGEYFHQQQTRDDVRIRGRYTFRAMYQHEFDLLWERQAKYYPDILTEDLRREVGDRTILFQRPLQPQTERIGRCDLEPDQPRCPRADFYARRFRILQDVNNLVIHHADGTEAKLEPDQRAAVLAELLGHKQVKFDRLRAILGLMETSTFNLEEGKSGKIRAALKGDEFASQVAKIVGKKRFASMSETELVQINEIIIDGGLSDQEAIDRLMGAGFSGEEAERLGNISLPQGYMRLSRAAIEKLLPHMERGLKTHEAIHEAYGRDQGRVAPAVRGRLEPAADLRNPLVNKALAEVRKVVNAIIREYGKPARIAVEMARDVRGSRSEREELQRRMRENQRRNEEARRALIEEHNVPNPSRDDVIKYKLWKECGHVCPYTGRSISPGALFGPNPEFQVEHIIPYSRCLDDSYMNKTLCEVHENVRKGQRTPYEAYHGSEQYEAIKQRIRVLPWPKRRRFLQETVELDAFIQRQLNDTRYITREVVGWLKTLGVHVYGTRGQVTAELRHQWGLDTVLDGSLPGLKNRDDHRHHAIDAIVTALTRNEHLRALAVSKYDPASAEFRAPWPGFREEVERCVNSINVSHRVTRKVSGALHEETFYGPTGRKDDKGQDIYVYRKPLEELTGAMVAKIVDSVVQGAVRQRFLEHGIDPDRERGKPPKAIWSEPLFMPNPKGGKKTVIKRVRIADVFNNMVEFADESGRTYTAAKPGNNHHIEIFEYEDGNGRVRREGYVVTLFEAVRRSRAGESVVRRTHESGGRFIYSLAVNEMFMLETPDGPRLHRIQYISQLPSGPRIQLRPHHYGGKLSESDRPPLVQRKTPNTLRGQKVSVDPLGRIHPAND

SEQ ID NO: 3832 - protein, 1011 aa, unidentified
  REGION 1..1011: note = Description of Unknown: Cas Enzyme sequence
LSSVKRKLFIFLKGQIVSKYTLGLDIGSNSIGWALLDTGKAPKIIDLGVRVFPEGVDRDTNGAELSKNATRREARGARRNRWRRAYRKDKLVRMLRRAGLLPGEPNSLEKLMESNPYPLRAKGLDERLTMHEFGRVLFHINQRRGFKSNRKTGEAKEDGIVKKSASSLQKAIDEAGFRTLGEYFAKIDPEEERIRRHYTFRSMYEHEIDLLWQKQSEFYPDILTDQLREKIKDKAIFYQRPLKPTDELIGECSLEAGEKRCPRSDWYSRRFRIFQDVNNLKIYNPDGKSEKLNPEQQQLVLKEMLNKKDVFFDSLRKKLGLIETQTFNVEEGQVDKKKAKLKGDEFAAQMRSKKILGAKKWNSLDIKEQVEINEALIADEIDDVTFVKMLIEQHALTEEQATATLDVRLPRRYMNFSQLAIQKLLPHMENGLLTPEAIKKVYGEKAIEEENLSLDKLLMPEDLRNPVVNQALFEIRKVVNAIIKEYGKPAKIAIEMARDVHGGKKQREETHLKMWKNQQRNEQARKELIENTDIKNPTRDDIIKYKLWEECGKVCPYTGRSIPQYALFGDNPEFQVEHIIPYSRCLDDSFMNKTLCEVHENIHVKKNQTPYEAYGSDPKKFEAILQRIKVLLYPKRKKFWQEKTELDDFIKRQLNDTRYITRETIKYLKRLGVHVYGTKGKITGELRHSWGLNNILDFTGSGLKNRDDHRHHAIDAAVVAVTRNKHLRELARTKYVVDDNSFEQPWPNFRQEVQKKINKINVSHRATKKISGQLHEETSYGPTGLKDDKGQDIFVYRKKLEDLTMPMVGKIVDPIVKQIIIKRLKEHGLNPDNRKSIPKEVWSKPVYMKSKKGQGPKIKKVRIRDVFNNMIFLKDEGRPYRAVKPGSNHHIEIFEYTDKKGNVKRDSKVVSMFEAVQRNRKGEPVIQRDHGEGKKFICSLSINEMVMMKNKHGKMSLYRVQKMDQNKIIRFRHHTAATIDKNETYIDKTAHLFEGYKVTVDPLGGIHKAND

SEQ ID NO: 3833 - protein, 988 aa, unidentified
  REGION 1..988: note = Description of Unknown: Cas Enzyme sequence
AKQLTDDCKKELYNQRKTDTWRCQGVLFSQRKAYWNLGTLGRCDLEPTDMKCPKADMYAQEFLVLTSINNIRITRRTENSRKLEPEERRKVISAVRRQKTASEGTIRKALCIHRGEEKTNCSLNTDGDKFTVNGDWFYSQIVCDVFGEDTWQEFDTNKKEVINRAILKFDPGDDSHVAKLTSGCRKWWKLDDEQTEKVIEVWRKRPKIDTRVNLSRKAIKNLLPHLREGWSVTEARDMYAEDALHEADDLTRSRYSTTKVVVNKRIRHFQHKHPDILPPVSEGISNPVVRKSIHEVRRHLMEYVKRYGSNPDRVGIELARKARQSERVIARRIQRNKAIDELKKEIIGKHNLDAPNITTTQRERAIERVRLCRQQRYICAYSGLNEETEKYACAYSGRAITEAQAVNGEGLEVDHIVPRSKGGDNGMSNLVLCYSSANQGKGSRTPIDWLSKEDFGQLELRFKHLQVSKTEKGKRAITKDTVDSVDNTKWENLHRRTPPEGFTEEQLRSSAYAATQTSDWINKVLYGHEDRKKRYVFASGGQYTGILRRDWGLFFDENGQRSEKGIKNRGDHRHHAVDAAIIAVTSQCLAKIKQSFIDFENQKENKRIRPVWKTIDEPWDGFIEQLAEEYKKLKVSHRAYNRQIAGRLHKDTLYGPAVIYEIHRRNDNKKGIKKGDIAQDEKGNPVFQQGLYIKSIAASELRGAHLKMPRDWSDWKKQLQEAENKDERKRIWQKMYALDAVAPGKSGIVRDVSFRNEIRDWLTDNGIKNIENIKKVNGSKTNELRTFETLVKEKGIVINGTPVRKVRLLWKLKEVKEIRRNGFDYENSTAEKQRKSLRVYQTQNNHHIEIREKVNKKGVVRWSGDVITNFEAATRARTNGVPIVDKSEKKKGKFVMSLSKGEVVYMKLPEAQGPDYFVVFKIDSSKTIHFTPHTDANPATSNKKHVTLRKDIRLVPNDLRQNIVLSDNGVPKKVKISPLGEEKLLMKD

SEQ ID NO: 3834 - protein, 996 aa, unidentified
  REGION 1..996: note = Description of Unknown: Cas Enzyme sequence
VSKYTLGLDIGSNSIGWALLDTGKAPTIIDLGVRVFPEGVDRDTKGAELSKNANRREARGARRNRWRRAYRKDKLVRMLQREGLLPTKADALEELMETNPYALRAKGIDERLELYEFGRVLFHINQRRGFKSNRKTGKEKDDGVVKKAASTLQEHIDKAGCRTLGEYFAKINPHEDRIRHHYTFRSMYEHEFDLLWKKQSEYYQDVLMEQLREKIKDKTIFYQRPLKPTDELIGECSLEPGQKRCPRADWYARRFRILQDVNNLKIYNPEGSEQELGDAQRQIVLKEMLTKKDVSFDTLRKKLGLIETQTFNLEEGHADKKKAKLKGDEFAAQMRSPKILGAKKWNNLDIKEQVEINEALIADEIDDIAFVKMLTEQHGFTEEQATATLDVTLPQRYMSSSKLAIQKLLPHMEKGLLTPEAIKKVYGEKAIEEENLSLDKLLMPEDLRNPVVNQALFEIRKVVNAIIKKYGKPAKIAIEMARDVHGGKKQREETHLKMWKNEQRNEQARKELIENTNIKNPTRDDIIKYKLWEECGKVCPYTGKPIPQYALFGDNPEFQVEHIIPYSRCLDDSFMNKTLCEVHENIHVKKNQTPYEAYGNDPKKFEAILQRIKVLLYPKRKKFWQVKTELDDFIERQLNDTRYITRETIKYLKRLGVHVYGTKGKVTGELRHSWGLNNILDFTGSGLKNRDDHRHHAIDAAVVAVTRNKHLRELARTKYAVDDNSFEQPWPNFRQEVQDRINTINVSYRITRKVSGQLHEETAYGPTGLKDDKGQDIFVYRKKLEDLTMPMVGKIVDPVVKEIVIGRLKKHGLNPEKKQTISKDVWSEPVYMKSKKGQGPRIKKVRIRDVFNNMIFLKDKNGKPYRAVAPGNNHHIEIFEYTDKKGNTKRDGKVITMFEAVHRSQAGSPVVQRDHGHGVKFICSLAINEMFMLELDEGSHILHRVQKISQNKQVFFRPHTFAGDLQKHKGISKYPNSLKGYKVTIDPLGRIHRAND

SEQ ID NO: 3835 - protein, 997 aa, unidentified
  REGION 1..997: note = Description of Unknown: Cas Enzyme sequence
MSQITLGLDIGSTSIGWGLLKLNDQPSILGAGVRVFQEGVNRDTEGAEVSKNETRRLARGARRNRFRRNYRKDKLLRLMKRNGLFPDGQSVNGDLFLTDPYKLRAKGLDEKLSLYEFGRVLYHLNQRRGFLSNRKTNKGKDDGIVIKSAAELQQRMEAQGARTLGEYFAGLDTSQERIRDNYTFRSMYQKEFDLLWQKQASFYPELLTEQLRQQIADATIFYQRPLKPTAELIGDCSLEPGQKRCPKGDWYARRFRILQDINNMLVCQPDGTERKLTDAEREIALKNLTSSKEVSFDSLRKKIGLLETQTFNLQEGALDKKNAKLQGDFFAATMAKILTKKVWEAMDTATQIEINDLLMSDEFTDEQVVQMLKQQHHFSEEQAQAAIEIGFPRGYMSYSRLAIQKLLPHMERGLRTDEAVKAAYQRIHSIQDNGQTVDILPLPKDLRNPIVNKALIEARKVVNAIVRTYGKPDKIVVEMARDVKGSAKERQELRFKMDENERENKQAEHELIYNIGIARPTRDDIIKYKLWQECGRECPYTGRPISQQALFGQHPEFQVEHIIPYSRCLDDSYMNKTLCHVDENRRKGDKTPYEFYYGAEQYEHILQRIRRLPYPKRQKFSQKEVSLDECIQRQLNDTRYITREILAYLKQLGCTVTGSRGKVTAELRHQWGLDSILNSDLPGLKNREDHRHHAIDAIVTAVTTPKHLRDLAATKYAVHRDGFPAPWEGFRDAVAQAVNRINVSHRVTRKVSGPLHEKTSYGPTGLKDDKGQDIFVYRKPLEALTCPMVEKIVDPVVRELVKARLLDFGIDPEKNATISKEVWKEPLYMKSNSGVKVPIKKVRIRDVFNNMIPIKDASGKPYRYVASGNNHHIEIFEYADAKGNTKRDGKVISMFEAVRRSRQGLPVVCRDYGDGKKFVCSLAKNEMFMLEVEQGCHTLHRIQKLDVNGGIVLRPATFAGQLDNKDKPPYIQRKTPNSLRGYKVTVDPLGRIFPAKD

SEQ ID NO: 3836 - protein, 1212 aa, unidentified
  REGION 1..1212: note = Description of Unknown: Cas Enzyme sequence
MGNDTKQRILGIDTGTNSLGWAVVDRLPEGYELVDKGVHIFQEGVNIEKGTIEKSRAAERTAHRSLRKQYWRRKVRKIRVLAVLSNAGLCPSLTSEELHAWRAEGKYPLENEAFMRWQRTDENKGVNPYAARCKCVEQTLDLEERRNRYLVGRALYHIAQRRGFLSNRKDQTDEKETGAVKEGIQELTQKIQDAGCEYLCQYFYQLYQNGERIRNCYTDRKEHYEKEFEAICEKQHLDDGLVKELRKVIFEQRPLKSQRQGIAKCPFEPSKHCAPVSHPLFEEFRMWSFIRSIKVQTPEDKELRALNHEEVQKILPLWFRKSKANFNFEDIAKTLAGKGKYCYYKSVESKPFRFNYYLDSNVAGNPISAQLKDIFGEEILKDRTALDKIWQALDFYTDDLKLREWGIKHYNLSDEQADALVKIRLPQGYASLSLKAMENIVPLMRDHSLIYSSATLIAKLRDLLKGYDFDEEVDAYLINDIEDYLTIPTDKDGKPLMSREERRNRLHEQWKQHYHLSDKDLQKLYHPSMIEEYRKVENKTDGVFQLGSPRISAFKNPMAMRSLFRMKAVVNQLLKDGTIDENTIVHIEFSRSLNDANHRAALRQYQNALRKEREEAIEAIKDIVPNPSNDDILKYLLWKEQDKKSIYTGEDIPLSALYQGTEFDIEHTIPRSMGGSTIRENLTICEARFNRDTKRTLLPSQLSEQYQAIILAHIQPWKDKYEDLEKQIRRLQKQSSGAATKEAKDRIITRMRLLQLQCKFWRDKYEAFTISEDEVKGFTRRQGTDISVINRYGRLYLLSLFSRVDVVKGTMTAAFREAWDIQEPYEKKDRTNHVHHCIDAITIACMGKREYDTLSAYCHEEEENRRSLRKIRIPKPWLTFTEDIKNIEKEILVAHYTPDSMGKQTKKKLRDSSGHILRDEQGKPLYTTGDTARVQLHDDMIYGKITNSHAIDPKHPVGRLCAVKRIPLQDVKVDEVVDPVVKQVIANAIAKYGDIKKAIEAEQENGDGAIWFNKDKGVKLKTVRCFQDHALNAEPIRSLRDGSPQEYKRFHYHRTNGNYVSAIYEGINAKGKREREFTIITNYEASKRLNNHQPVVPERSPKGYPLLFTIKKGDLVLLYENTPDELRNASKEELFKRLYRIIKMDDGGITIKHHQEAREAGVLKEIYGFPQTGAFIQTQGIYPQRRISHGQFNALVNGIDFDMSDTGKIIFK

SEQ ID NO: 3837 - protein, 1012 aa, unidentified
  REGION 1..1012: note = Description of Unknown: Cas Enzyme sequence
MAKILGLDLGSNSIGWALLESKTESGNDFSRIIDAGVRIFQEGVDRSTTGAELSKNAQRRAARGARKLHKRRNQRRESLQALLIDRDLLPDSQEDFDTLMQVNPYQLRAKGLNEQLSFYELGRVLYHINQRRGFKSNRKAGKSDGKVATALSVLQQQIDEQKYRSLGEYLASIEPREQRIRCRYTKRSMYEDEFELIWNKQSTFYSDSLNSELKREVQNIIFYQRPLKVQKFLIGLCEFEKKEIINQKGEKQWSGKRRSPKGTWYAQQFRMLSEINNLIVIDGNDEWQLSDDLDLRDKLVHALQQKKTMNFSAIRKLLFSKGDQAWDHIRFNLEEGGRDKLQGNAAEYSLRSVLKKKYDALSVEQRDALIHDLLFLEDEKILRHHCELLGFSDEVIAKLMKMKFEDSYFHLSQKAIKKLLPHLEQGLKYSDAVEAAGYKRRDQADNTVIAQLAEPPQLKNPIVQKALYEVRKVVNAIVREYGKPAKIRIEMARNLKASAKQRKEASFHNAKNRRRNEEIRTRLGKEYGISNPSRDDVIKYRLWEECNHTCPYTNQTISAAMLFSPEVEIEHILPYSRSLDDSYINKTLCLSSENKIKGNQTPYEAYHTDDDRFHTMLARVRKFSGAFGYKKFNKFRQKEIRLDSFIERQLNDTRYISREVSSYLEQLVGNNHVQSGRGQMTATLRRLWGLNGILHDSGEKTREDHRHHAIDAVVTALSTPKALKEVSAASKYGRLDKLSIERFPMPWDGFRHDIGAQVKSITISHRVMRKIRGALHEETAYGSLKLTNEKNTEMYAVRKSVSELSHKEVTQIGDERIRSSICSYIIAKGFDPKDSTDVKKALKDAETNPPVMASGQPIKRVRLHKPFSNIRMLKNKKNKEYRGVLEGSNHHIVIYEYEDKRDITKRGGIVVSMFDAAERARHGKAVIQRNLEDGKRFVMSLSINELVEVPIGEDESEVYRVQKMNAATQICLRKHTAANINDHSSRMLVMPNTFNGKKVVVDPLGKIYPAND

SEQ ID NO: 3838 - protein, 1225 aa, unidentified
  REGION 1..1225: note = Description of Unknown: Cas Enzyme sequence
MENVIKQRILGLDTGTNSLGWAVVDRLPLGGYELVDKGVQIFQEGVNIEKGTQEKSRAAERTSHRSLRKLYWRRKVRKIRLLTVLSNAGLCPSLTSQELRAWRMNGKYPLNNIAFMRWQLTDEQKGINPYAARCRCVEEELDMSSPDNRYLVGRAMYHIAQRRGFLSNRKDQTDDKDKESGAVKAGIKELTQKIHDAGCEYLCQYFYQLYQKGERIRSCYTDRKEHYEHEFDAICAKQHLDESLVQQLRKAIFEQRPLKSQRRGVAKCPFEPSKHCAPVSHPLFEEFRMWSFIRNIKMQTPEDAELRMLTNEEIDKVKHLWFRKSKANFPFEDIAKTLAGKGKYCYYKSAEDKPYRFNYYMDTSVAGCPVSAQLRDVFGEDLLKDRAQVDSIWLALDFFDDDLKLREWAIKHYNLADEQADAFVKIRLPQGYASLSLKAMENIVPLMRDHGMNYPNATLLAKLRDLTKDYPFEKDFDEDVEAYLKADIEEYLTIPTDKNGKPLMSREERKEALDVKWMQHYNLSAKEIKKLYHPSMIEEYRHVEHTTNGVYQLGSPRISALKNPMAMRSLFRMKAVVNQLLKDGTIDENTIIHIEFARELNDANRRAALRRYQAALRKEREDAVEAIKEFIPNPSDDDVLKYLLWKDQEGKCVYTGKSISLSALYNGTEFDIEHTVPRSMGGDTTRENLTICDAKFNREIKKNRLPSQLSEQAQELLQANIQTWKENCEALDKQLRKMKNATSGLSTKEAKDSVIAKRHLLEMQRDFWRNKYKAFTIEEKDVQGFTRRQGTDISVISRYGRLYLLSLFNRVDVVKGSMTAAFRKIWGIQTAYEKKNRENHVHHCIDAITIACMGKREYDELSAYYHADEENKYHSSDILMPKPWKTFTEDIKDIEQEILVAHYTSNPMGKQTKKKLRDSRGHIIRDANKQPRFAQGDTARGALHNDMIYGMIVNSQNVDDKHKVGNLCAVKRIILSSVASKDEEKMAASIVDPIIKKTVNDARAKYGSLSAAIEAEQENGDGSIWLNKEKNVKIKKVRCFQDFAINASPIRSLRDQSKKEYKRSHYSMTNGNFMSAIYEGTDAKGKKKRSFVIISLYEAAQAYGKHEPLVPTVSEEGYALIKTIRLGDLVLLYENSPEEIYTASQEELVKRMYEIIGMSDSKGLQIRLKHQQEARPNGELQQINGAFKNGDSAPIRMLLHTQFNALVQGQDFNISDTGKITFKSC

SEQ ID NO: 3839 - protein, 1222 aa, unidentified
  REGION 1..1222: note = Description of Unknown: Cas Enzyme sequence
MENVNKQRILGLDTGTNSLGWAVVDRLPLGGYELVDKGVQIFQEGVNIEKGTQEKSRAAERTSHRSLRKIYWRRKVRKIQLLKLLSEKGLCPELSKEELRAWRMEGKYPLNNIAFMRWQQTDEQKGINPYAARCKCVEEELDMSNPDDRYLVGRALYHIAQRRGFLSNRKDQTDEKDKESGAVKAGIKELTQKIHAAGCEYLCQYFYQLYQKGERIRSCYTDRKEHYEHEFDAICAKQHLDEALVQQLRKAIFEQRPLKSQRRGVAKCPFEPSKRCAPISHPLFEEFRMWSFIRNIKIQTPEDADLRMLTDDEIDKVKHLWFRKSKPNFPFEDIAKTLAGKGKGQYNYYKLAKDEPYRFNYYMDTSVAGCPVSAQLREVFGEELLKDRAQVDAIWLAVDFFDDDLKLREWAIKHYNLTGEQADAFVKIRLPQGFASLSLKAMENIVPLMRDHGMIYPNATLVAKLRDLTKDYAFEKNFDEDVEAYLKADIEEYLTIPTDKNGKPLMTREERKEALDVKWMQHYNLSVKDIKKLYHPSMIEEYRHVELTTNGVYQLGSPRISALKNPMAMRSLFRMKAVVNQLLKDGTIDENTIIHIEFARELNDANRRAALRRYQAALRKEREDATAAIKEFILNPSDDDILKYLLWKDQEGKCVYTGKSISLSALYNGTEFDIEHTVPRSMGGDTTRENLTICDAKFNREVKKNRLPSQLSEQAQELLQNNIKTWKENYEALDKQLRKMKNATSGLSTKEAKDSVIAKRHLLEMQRDFWRNKYKAFTIEEKDVQGFTRRQGTDISVISRYGRLYLLSLFNRVDVVKGSMTAAFRKIWGIQTAYEKKNRENHVHHCIDAITIACMGKREYDELSAYYHADEENKYHSSDILMPKPWKTFTEDIKDIEQEILVAHYTSNPMGKQTKKRLRDSRGRIIRDANKQPLFAKGDTARGALHNDMIYGMIVNSQNVDDKHPEGKMCAVKRVALKDVDVKQVVDPIVRKVIMDAIAKYGNISAAIDAEQESGDGAIWLNKEKGVKIKKVRCFQDFAINASPIRSLRDQSKKEYKRSHYSMTNGNFMSAIYEGLDAKGKKKRSFVIISLFEAAQAYGKREPLVPKVSKDGYALIKTIRLGDLVLLYENSPKEIYNASQEELVKRMYEIVGMSDSGGGLQITLKYQQEAKPNGELKQVNGAFAADAPIANFRMLRHTQFNALVQGQDFDISDTGKITFRSC

SEQ ID NO: 3840 - protein, 993 aa, unidentified
  REGION 1..993: note = Description of Unknown: Cas Enzyme sequence
MTYTLGLDIGTSSIGWAVVPDEPVEGAANIVAGVRVFPEGVEREKSGTEKSKSMARREARGMRRQHERKARRKRKLGSVLRRAALLPETREEVTASSSTSVYMLRKRGLDQDLSLHEFGRVLLHLGQRRGFKSNRKEDGKEDGVVYAGISEVRSGMEESGARTLGEYLAGLDEQERIRGRYTSRDLYLSEFELLWERQHRAHPETLTPALKARIQDSIFFQRPLKSSEEKIGDCDLEKGEKRCPKASWFAQEFRLLKEVNDLKISDLAGDERQLTVEQRRKLLEALHSEKNIPIDSLRKTLGLLEEEHLNFQLGKQPKMLGNTAEAALRKALKKRFESDPTLFREQVFESLIKDDQDVFAQRADTEWGMSDEEIAALFKEASPVPKGYLRYSRKVIQKMLPFLQEGFGEYEAKGMAGYLESKEAVQAVSSLPLPDSLLPNLTNPIVKKALFEVRKVVNAIVREYGKPSKILVELARDTKGSAEERNNQLKENRDREKERDRIRALLRDQGVSDPKGADILKYRLAEECNWKCPYTDRSISFHQLFGPTPEVQIEHILPFSRCLDDSQANKTLCFVDENIRKGNRTPQEAYSADPAAWEALLVRIKDLPYRKQRKFQQKEIDLDKCISRQLNDTRYINTQVREYLAVLGVPVNVTRGQVTAELRWQWGLDSILNPNRDYKNRDDHRHHAIDAVVIALTTQGHLQSLARKEEYKREEKKFEPWEGFRNQVAAAVEGIHVSYRPTRKISGALHEDTNYGPTEKPGVFVYRKPLEALTPAMVEKIRDAKVRKLVSQRLEEYQGDTKKAFHRDNKLFMPNKNGVPIPIRKVRILSEASGMVPMKGGDGKPYRYVAPGSNHHISIFEYEVKGKKKREGVVTTMFEAAKIAMENGKRRRMNLPDLPIIRQVHPTKPDAKFVMALAKNDMVTLSVDGGPEELCRLQKFSVGAAPDLNFRLHTASKIDEPGTLRRITSLNPGKVQIQKVTVDPLGRISLAHD

SEQ ID NO: 3841 - protein, 988 aa, unidentified
  REGION 1..988: note = Description of Unknown: Cas Enzyme sequence
VGYTLGLDLGTNSIGWALINHDEDGRPIQLETCGTRIFQEAVDAKTRTPKNQARRAARMARRLISRRRRRRERLLGLLVSKGLLPSDWLNRTSAESHYNALGNPYELRRKGLDQPLTPHEFGRVLVHLCQRRGFESNRKSKPKDEGEIKQAISQLQVEIQTAGCRTLGEFLAGQKEKKRERHTGREMYRQEFELLWESQSRFHPATLTMDFKVIVHNVIFHQRPLKVKSGSVGRCTFEPRRFRASRAWPDAQRFRLLQDLNHLQIKSPTTREYRNLDSEEREKLLDLLEQQKTVSWKKARRTLGLHEGELFNLEEGKKKELLGDQTSYALRKVLGGKWDELSKERRDALVCDLLTIENNAGVLNRLQTHWGFNNEMAESVAKLELEDGYFRLSLKAIRKILPYLEQGMIYDKACAAAGYSHTGNGSGHGVAKLGNPPQLRNPVVQKALYEARKVVNAVIRRYGKPLVIRVEMARDMKLTKKQKDNLAKQNKQNETLNSQAEEALRARDIQQPSRDDKVKYRLWKEAGGVCPYTGQQISEAMLFSQDVDIEHILPYSRTLDDSYMNKTLCLAQENRTVKHNRSPYEAYSPTPEKYEAILQRIRSLPWPKRRRFEQKEIDTDGFIARQLNDTRYICREVKDYLATLGVNVEVSKGEATAWLRHTWGLNRILAGDGPPEKNREDHRHHAVDAVVIALTSRRLFQHLSKLSAQQRGPVSLRRLSINEPWMDFYRTVDDKIQGVVVSHAPVHKIRDAFHEDTAYGYSEATRSFVYRVPLDGSFKETAIKEIRDAAVRELVKTRLDETGGDIKRAFGDPNNPLRHVDGVTPIRSVRIKARVSRETVAPVRDRNGAEYKFFKYGNNHHVEIIEHNETGRRQGIFVTTMEAARRARIAKLPIVQRQPPWTDGGKTYGDGWSFVMSLCINDLVGIEDSGKNRVMRVQKLAASNGNVILRDHIDAKTKQDSQYSKSAATLRCKKAQIDPLGNISFAHD

SEQ ID NO: 3842 - protein, 1077 aa, unidentified
  REGION 1..1077: note = Description of Unknown: Cas Enzyme sequence
MKRRPYVLGLDLGPNSIGWAMLDQDPESGEPVGFYDTSVIDSPHPPMGVRVFEAGLENFETAKEKSRSQQRRMMRSLRRNHARRNARRAKVKRLLTGAGLLPDDEMELAALFRTDPYEIRARALSEDLTVHEVGRALFHLAQRRGFKSNRKSGDDKEEGKVLEEIGKLEHEMREAGSKTLGQHFAALRAGKKEMARPRVRAQHTRRDMYEVEFSGIVERQKQAHPGKLTDDFVGDLHEAVFFQRPFAISEERRKNAPSRANLHRAPSVRPCPFEEGEKCCNKGHWKAQRFRILKEVANLTISEHHHEERELTTEERDFLIDELSVAREIKFDQIRKKLHKVFGTDPDARFNLERGGRKKLLGNTVENKLANAFSKKKWATMPEDTKVRLRELLLDVEDPAALEEALRSHGLDENKVSKLMEFSPPDGYLGYSLKAIDKLLVHMEHGKDEHDAIQAVYGGREEVHGFDKLPALVSDELPAEIHEITNPVVRRALVEVRKVVNALTREHGRPARIVVELAREMKDGQEGRKEYSRRIRGRQEEREEAKKRVLEHGGNQASRSDVNRWLYWKEQGGACLYTGQSIPASEIFNGGAWDVDHILPRWRSLDDSMMNKALVSREANARKANRTPAEWLGTESQEFKQLVKRASELEKSGTLPTPKLMRLKAAKLDTDDFAKRQLNDTRYITRAVVKYLELLYPAELRHGEKAVMSSRGGLTSELRHHLGLNRDVFYPLLDSKGNDVKPDEEARGAKSRIDHRHHAVDAVVVALSSRAFLKRYQDYWKRRADPHVKEPEFPPPWESLRNEVRRHADEIQVSHRVQRKLSSALHEETFYGPLYDDKGDLIPHKYSTRKPIERFDKGKHILEIRDEHVRKLVADKARASGWDGSPKAKLPKGWFKAGVFMDSGVEIKKARVTVSINNPARISHRYAVLGNNHHIEVFEDSSIQPGKKGRIKTRVVSTMEAARRARREKDAQQREIVSRNPGEPYRFLMSLARKDSVVATNPSTGERTLCVVQKFSGSEELSTSELDFVIRDVRDSRPAKTGNKSPFRRVTSCQDFKRLEIGKVQVDPLGRVYPAND

SEQ ID NO: 3843 - protein, 1506 aa, unidentified
  REGION 1..1506: note = Description of Unknown: Cas Enzyme sequence
MGKTILGLDLGTNSIGWALVEQDFEKKEGQILGLGSRIIPMSQDILGEFERGNSISQTAERTRLRGMRRLRERHLLRRERLHRILNVLGFLPQHYVNKIDFDVRLGKFLPETETKLVYDDNGNFIFKDSFEEMLADFRKCQPQLLNRKNKKGEDAKVPYDWTIYHLRKKALTKRIENEELAWLLLHFNQKRGYYQSRGEEAEDKPNKLEEFYSLKVVDVTADEPQKGKNEIWYNIILENGWVYRRASKLPLFDWKDKFRDFIVTTDLNEDSSIKKDKEGKEKRSFRSPKEDDWQLLKKKTENDIEKSDKTVGEYIYDALLQKPNQKIKGKLIRTIERKFYKNELEQILKKQIELHGSLQDRNLYQQCVEELYPHNLHHQSTLLNKDFLHLFVEDILYYQRPLRSQKSSISNCPLESRTFILEGVKKIEPLKCISKSHPLYQEFRLWQWIMNLRIANKRNETNETEKYLHTIDDFTTLFDFLNERKEIDQKSLLKQFKLKESNYRWNYVEDKKYPCNETRSMIVSRLEKANDVPQGFLTKKTEEELWHIIYSVTDKIEYEKALNSFAHKNALDSESFYDAFKKFPPFPSNYGSYSAKAIKKLLPLMRMGKYWNEENIDEKTKDRITKIINAEVDETIEERVREKVKNLTQTEHFQGLPEWLAKYVVYNRHSERSDTGKWKTVQDLEEYLKSFRQHSLKNPIVEQVMTETLRTVKDIWQHYGNGAEGFFDEIHIELGRDMKNPAVERKRITEQVTKNENTNLRIKALLAEMLNDNSVENVRPYSPTQQDILKIYEDFVLNAAIEIPEDIEKISKQAQPTSSELQRYKLWLEQKYRSPYTGEIIPLNKLFTPAYEIEHIIPQQRYYDDSFSNKVICESAVNKLKDNQTGLQFIQNHHGEIVQLGMGKTTKIFTEEAYTDFVKQHYEKSRGKKNKLLALDIPEKMIERQMNDTRYISKFIMQVLSNIVRADKDDDGANSKNILASNGQITTKLKQDWGMDAIWNELVLPRFERLNQITNTTHFTVYNEKYQKYLPVVPLELQRGFQKKRIDHRHHAMDALVIACATRSHINFLNNQNALDKNKSIEQKQHGRYDLRKTLCDKKYNDGSSEKYQWIFKQPWAYFVPEVKSKLEQVVISIKQNLRIINKTVNQHDIIKDGKKDKLKQQKGQSWAIRKPLHKDTVSGLVSLRKTKTVSLSAAFESPENIIDKPLRKYIQKLIAKGFDKKKLAKHFKDNNNQLNEQDVSKVGIYYLENDNVASRVSLDITFNKARIESITDTGIQKILLKQLEKNKDNPEIAFSPEGIEEMNKNIVVLNNGKSHQPILKVRTYETKGNKFAVGQSGNKKTKFVEAAKGTNLFFAVYQDEKGKRSFETVPLNIVLERQKQGLLSAPEQNEKGHKLLFHLSPNDLVYVPYEDELENPQNLNLQKSEQLGRLYRFVSCTGSEGHFVLNNYSVGIINNEHGTNNKSERMLDFKNMPAFFDEKGKPQMIKILCWKIVVDRIGNIKSILR

SEQ ID NO: 3844 - protein, 1296 aa, unidentified
  REGION 1..1296: note = Description of Unknown: Cas Enzyme sequence
MKKILGLDLGTNSIGWALIGIDENGLPMRIIAMGSRIIPLSSDDRDQFQKGQAISKNQDRTTARTQRKGYNRKQLRKTDLKTILKELNIFLSKELLQLPSLDLWKLRNDAVSANESISAEQLGRIFYMLNQKRGYKSARSEANQDKKDTDYVAEVKGRYAQLKERSQTLGQYFYDKLLNADQTNSYFRVKEKVYPREAYIEEFDSIINIQKGKHDFLTDEVIEKLKNEIIYYQRPLKSQKGLVSVCEFAGFYKTYIDKETKKEKTTFTGPRVAPKTSPLFQLCKIWEVVNNISLKTKNPEGSKYRWSDTKPTLAEKQEIVNHLSVNANLSYADLLKILDLKKEDVYANKQISKGVQGNITHSEIYKIIGDNQYLQFNVNIVPSKHNAILVDKKTGEILAEEEALQLNAYLEQEPFYQLWHTIYSIKDSTECRIALMNRFGFEAGIADKLSRIDFNKQAFGNKSNKAMRKILPYLMQGYDYSQACSFAGYNHSNSLTKQEQEEQKVDERLELLPKNSLRQPVVEKILNQMINVVNSILDKYGKPEEIRIELARELKQSKDERNDADIYNANNKKLNDEIAHRLTDLGIPNTKRYIQKYKFIFPTRDKKLKESQVTNQCIYCGNTFSLSEALSGDNFDVDHIVPKALLFDDSQTNKVLVHRSCNAAKTNHTAYDYISNKGEEELCTYLNRVDEWFKRGILSYGKMQRLKVSFKEYTERKKLKKETEADKKLWESFIDRQLRETQYIVRKSKEILQKICKNVTTTEGTVTAKLRELWGWDDVLMNLQLPKYKEIPGQTIIKEWTSAHGKLKHQKEEIDNWGKRDDHRHHAIDALVIACTKQGFIQRINTLSSSETKDEMIKEIDKAKMKFGEKYDEKILNATNPLVKNHREKNSTLDAYLISQRPDNFTTKYVEQETDKILISFKAGKKVATNGVRKIKVNGKKKIVQSDIIVPRGALHEQFVYGKIKTITKDFKTNTYIKFPVKYLFENYNLIVNKKIKTVITERLIEYNNNVFDAIKSLKLSPLYIDKDKTQLLDSAYCYKDEFVIKYKIIDFKKDDVKYIVDEKVKQLVKSRLEEHDNKEKEAFKDVLWFNEAKQIPILTIRCFTGLTAVEAIKKDENGKEIGFAKTGNNHHIAIYQDTEGKFIQHLCTFWHAVERKKHKIPYIINNTNSLWSNLLNNDLPQVFLDKLPPDNLKLQFSLQQNETFILGLSNEAVEEAIEQNNKQLLSKHLYLVWSVSDTDYWFRHHLETKNSELKSIMSAKESNRYYRFKSIGALNKINPVKVRLNHLGEITKVGE

SEQ ID NO: 3845 - protein, 1293 aa, unidentified
  REGION 1..1293: note = Description of Unknown: Cas Enzyme sequence
MILGLDLGTNSIGWALIEIDENGLPLRIIAMGSRIIPLSSDDRDQFQKGQAISKNQDRTKTRTQRKGYDRKQLKKNDLKKILKELNIFPSEELLRLPSLDLWRLRNDAVSDEKNISAEQLGRIFYMLNQKRGYRSARSEANQDKKDTDYVAEVKGRYAQLKEKNQTLGQYFYDELFISDQNNSYFRIKEKVYPREAYIEEFDSIINTQKSKHDFLTDEVIEKLKNEIIYYQRQLKSQKGLVSVCEFEGFEKAYIDKETQKEKTTFTGPRVAPKTSPLFQFCKIWEVVNNISLKTKNPEGSKYKWADRIPTPIEKQEIVEYLTANANLSYADLLKILNLKKDNVYANKQILKGIQGNITYTEIHKILGDSPYLQFNLSVIPSKHNAILVDKKTGEILEEREALQLNADLEQEPFYQLWHTIYSIKDLDECKNALIKRFGFEADIADKLSRLDFNKQAFGNKSNKAMRKILPYLMQGFDYSQACSFAGYNHSNSLTKEERENQIVDDKLELLQKNSLRQPVVEKILNQMINVVNAILEKYGKPEEIRIELARELKQSKDERNDADVYNTNNKKLNDEIGFRLTGLGLPATKRYIQKYKFIFPTSDKKLKDAQVTNQCIYCGNAFSLSEALSGDNFDVDHIVPKALLFDDSQTNKVLVHRSCNATKTNQTAYDYISNKGEEELRLYLKRVDEWFKRGILSYGKMQRLKVSFKEYTERKKLKKETEADKKLWESFIDRQLRETQYITRKSKEILQQVCNNVTATEGTVTAKLRELWGWDDILMNLQISKYKELGQTVIKEWTSEHGKKIHQKEEIENWGKRDDHRHHAIDALVIACTKQGFIQRINTLSSSETKDEMIKEIDKAKIKFGKNYDEKILNEKNLLVKNHREKNNILNSYLISQRPDNFTTNYVEQETDKILISFKAGKKVATNGVRKVKINGKKKIVQSDIIVPRGALHEQFVYGKIKTIAKDFKTNSYVKFPVKYLFENLDLIVNKKIKALITERLIEHNNNVIDAIKSLKLSPIYIDKNNTQVLDAAYCYKDEFVIKYKISDLKKDDLKYIVDEKVKQLVKARLEDHNYKEKEAFKDVLWFNEAKQIPILTVRCFTGLSAVEAIKKDENEKEIGFAKTGNNHHIAIYQDAERKFIQHICTFWHAVERKKYKIPYIINNTNVLWSELLNKDLPQNFLDKLPADNLELQYSLQQNEMFILGLSDETFKEALEKNDRSLLSKHLYLVWSISDTDYWFRHHLETKNSELKNIMSAKESNRYYRFKSIGALNKINPVKVRLNHLGEITKVGE

SEQ ID NO: 3846 - protein, 1012 aa, unidentified
  REGION 1..1012: note = Description of Unknown: Cas Enzyme sequence
MSRILGLDIGANSIGWALIDDEGKKIIGAGVRVFKEGVNIDKGTREESKNATRREARGMRRRNKRKRQRLDNLTSILKLLKMYPQTDKELKEFFYQGRNESINPYELRKKGLNEQLSLMEFGRVLYHICRRRGFKSNRKTDAPDAGSKIEKGYEGIIGISTTREEIIKGGFKTVGEYLSSLNPHNIRRRNRFIERKMYEEEFEKIWEKQSAFYSNVLTNELKTKIANAIFLQRPLKSQKWTVKNCELEPDKKVTPKSSPIFQYFRILQQVNTIRVSIFGFSNTRHNEPLTAEERTILINELMKKDKYTFEQIRKLLRLPRESEFNYKDDEKLIGNRTYSPLIPIFGKNRWTDMTEDEKEAVWYTVYIANTSEWLADYARKKLNLDDESIKKLLKVHLEKEYAQFSRRALKNLIPFLEEGLSVTEAKEKAGYTESDTEKQWNLLPMLPVPLNIRNPIVQQALYELKRVINTIINLYKKPDLVRIELTRELKNPKTRRIEIRFDNLKREKEYKEYEEFLKKEFGFTIVMPDDILKYRLWKELYDERSPYSGEKIPINRLFSAEVEIDHILPYSKSLNDSYMNKTLCYRNENQEKVDQTPYEAFSSEQQRYDEIIFRIKKSTMDYKKKKLFWLKEIPEDFINRQLNDTAYITKETKKYLTQVFPKVEAVSGGTTALLRRYWGLNSILGGRDKKSRDDHRHHTIDALVVANTTAGFVHRLSRYHEYRSEEYLKSEKAKEKFEKPWITFWQDAEIAVKNIFVSHRCDKKVSGKLHEETYYGKIKAHDGSEQYVVRKKLETLDKKKQVEAIVDPVVRQQVINRLVEKGINMDSDYTFKKDVFKEPLFMPDGIMIKKVRIYVPSTEMIQLYKGRKTFVEPGGNHHIAIFENEQGKREGDVITLFDATQRVCRGEPVIQKTYKPGWKFVMSLSIDEMVIMDVNENEIDWNDTNLAFIYFDKLYRVQKMDINKIITFRKHTTARLQNDNKVEIGRLFKNPNTLKAIKVKIDPIGRIRPAYD

SEQ ID NO: 3847 - protein, 1038 aa, unidentified
  REGION 1..1038: note = Description of Unknown: Cas Enzyme sequence
LKYRLALDVGTNSIGYCLLELDNKLKPYRIIRLGSRIYSDGRNPKDGSSLAAMRREPRQQRRRRDRFLRRQKSLLKALVKYGLMPEGKKERKALEVLDPYRLRAKGLDEALSPFELGRAIFHLNQRRGFASNRKTDAGDDKEAGKIKTAVTRLREQMHDHDARTIGEFFYQRQLSHLSIRSRLHGQGARAYYDFYPHRDLIAEEFDSLWEAQADHYPEVMTEDAYHEIRDILLYQRPLRPVDPGRCTFEPDEPRAPSAHPLAQKFRLLQEVNHLRVVMPDQCQRLLTLDERNKLYEALSVKKKMAYSSMRKAIKLPRGSYFTHESEYRKDLAGHETNAILGSKKAIGVAWFDLAEDKQIQIVQRLLDEPDEDRLRDFLTEVLSGLDDERLAYVMKASLPDGYMRLSLKAVERITPMLEADVITYDEAVRKAGYPNHSQLHTGEIFDNLPYYGQILERHVAFGSNNPEDDDEVRYGRIANPTVHVGLNQIRKMLNALIRRYGRPEQISVELARDLKASQRQRDRYRQEQNRNKDRNEKFVRELEELGHPNNGENRLRLRLWEELNPGDPLDRRCVFTGKAISPSRLFSSEVEIEHLLPFSRSLDDSIANKTVCLRTANRDKAGKTPFEAFGHSPGRYRWDEILKRVEGMPANKRWRFAEQAMTVFDEEGDFLARQLNETRYLSRLVKGYLGYVCPPNEIRVLPGRLTALLRGKWGLSKSRDDHRHHALDAAVIGTTDMGMLKRVATAAARAEEKGIERVLQDMPLPWDGFREEVQRHLSRMVVSHKPDHGPQAALHNDTAYGIVDGPDPRGVYEVVHRIPVNAIAKLADVEKIRDILIRQNLAEILRHASDKKSFSAALEQFSAQSGVRHIRILEKLSVIPIADKAGRPYKAYKGDSNYCYEIYQDEKGRWKGELVTSFEANQKPYRDFMLDKNRYRTQTFRGHPMVMRVCQNDMIAIELDGKVSIMRVMQLTKGKVVMAEHYQGGDLRARNKNHDDGFKNLIKSPDKLRQIKARRVFVDILGRVKDPGYRSCQEELSK

SEQ ID NO: 3848 - protein, 1221 aa, unidentified
  REGION 1..1221: note = Description of Unknown: Cas Enzyme sequence
MTEKVLGIDLGTNSIGWAIVEKEDASCSLLDKGVVIFQKGVAEEKGNEKPMVQTRTLARATRRHYFRRKLRKIELLKVLTAGGFCPTLTAEQLQAWKTRRTYPLDPEFIEWQRTNEDADKNPYHDRYVALTRQLDLSERSQRYILGRALYHLCQRRGFLSNRKESTKELDGTVKQAIGDLSEKMEQAGCKYLGEYFYMCHKSHEKIRGLYTARNQHIRAEFDAICERQNLPDDLRKQLARAIFYQRPLKSQKGAVGRCTFEPTKSRCPISHPAYEEFRMLSFVNNIKVKTDTLYDGLDYRQLTPEERHKIYPLFLRKSNKASFNFEEIAKAIAGKPIYYGYMEEKPNALYKFNFAMSTSVSNCPVTAYLADIFGEDWRNELRARYKKAGNKTRGEVINDVWHALFSFDDDERLHHWAMANLSLTPEQADAFVKCPIHQGYASLSLNAINKMLPYLRQGFRYDTAVFLANIEAVLPIDVKEDAELLTKIKQQVITLINDYEADQQQKTYTKVELINDFLLSIPGVECSDLRKLYHPSQLQVYPAAQPNSRGEVLLGSPRVSAIRNPMAMRALFQLRHLINTLLLERKIDRTTKINIEFSRELNDANMRKAIQRYQRENEATRKKYRERLIKEYRDKTGREIIPSDTDILKYQLWEEQQHLCLYTNQQIDISEFLGDNPKYDIEHTVPRSRGGDDSMMNKTLCDCRYNRSVKRAKLPSELADHARILAQVEELGWLKEIDRLRGKINQIKGRYFATKEQKDQNIQRRHYLELQLKYWRGKYERFVMTEVPQGFSNRQGVDIGIIGRYARMYLASVFHAQDRNLIYTVKGATTSDFRKMWGLQEEYTAKERVNHCHHCIDAIVIACIGKAQYDAWAQYCERRELAAWDCAEKPSFPKPWETFTQDVKGVVDELLVVHHTPDNTLKQSKKALRVRGKIQKTADGRPIYQQGDTARAQLHLQTFYGAIERDGEIRYVIRKQVDSLEQKDVKNIVDDAVRAKVEEQIAAKGFAMAIAEPIWMNEAKRIPIKKVRLYANNITKPIHLKPQRDLSRKEYKRDYHVANDGNYCLAIYEGCNDKGKVKRSYKLINNLTAVRSRTDDRLVPLSDDNEYPLKWILKVGMMVLLYEKSPEEVYNASQEELVKRLYKVTGLSLNPTPPGYGCVVLRYHQEARPAGEYKSKNGVWSVGEEIRPSISVLHTQFKGLVEGQDFEISDSGEIKFFRMNI

SEQ ID NO: 3849 - protein, 1098 aa, unidentified
  REGION 1..1098: note = Description of Unknown: Cas Enzyme sequence
MKHIRYTLGIDIGIASVGWAVLQNDVYGEPVKIDRLGVRIFERAENPKDGSSLAAPRRQARGSRRVIRRRKHRKDRIKKLIASSGMMEQEQIDTLFTAGRFEKSVYELRVDALERKLSVEETIRLLIHFAQRRGYQSNSKSEEAKDAKENGKVKQAISDNRQRMLEHGYRTVGEMFWKDDLFKRTNPDGSVVLVVHNQPDDYKVTVERQMLREELQLMFAQQRAFGNEWASEAFESAYLEIWGSQRSFDEGPGGNSPYGGGQIERMLGTCTFEEDEPRAPKASYTAEYFRLLQTVNHLKTVGRGLPPEFLDEEQRKLVVEFALASPNGTYGQLRKKLSLPDDVYFNNLYYGNKSAVEVEKKKLGLMPFYHKVRIALDHVKKGAIQEFSAEQLDKIARILTLYKSDDNRTQYLRKAQIPEQYIPELLALSASKAAHLSIKAMQKMIPYLEDGCTYDKACTAVYGRHDGKKPGEKRSQKLDIGMAGEITNPVVRRAVSQTIKVINAVVREYGPPEVVRVELARELGKPYEIRTKLEKRQSANFEQNAAIRSQIEEYKKDTPTGLDIVKFKLYQEQNGVCLYSGENLDISRLFEAGYVDIDHIIPYSISFDDSYHNKVLVRSRENRQKGNRIPYAYFGQDEVRWNRFETLVNTQIRSFKKRKNLLCHTLSPEQIDGFKQRNLVDTQYLSRVIFRLIDEHLEFAETGNVKRKTQTVNGAITAQVRKRLGIDKVRANGDLHHAKDAAVIACISPGMIQKITRYSQRCECAWTRAGYVDYETGEVMTKEAYDEKYAPRFPAPWPQFRAELEARLSVDPRGEIDQLKLATYDSDEALFPVFVSRMPNHKVSGPAHQETIRSGKQAGGTVSKVALSTLKLDKTGEIPGYYRPEDDPLLYEALKERLRAYDGKGDKAFAEPFYKPKHNGEPGPVVKKVKVFDKATLTVPINHGLAANGNMVRVDVFRVEDEGYYFVPIYVADTVKGELPCRAVVAHKAVEQWKGMDEKDFVFSLYAGDLVHIVNHKAIKLNLAKGAEGNEVALTNDALLYYTGLNIATGALGLTTHDRRYCQSGLGGKTLDLIEKYQVDVLGNYTPVRLPEKRMRFQ

SEQ ID NO: 3850 - protein, 1005 aa, unidentified
  REGION 1..1005: note = Description of Unknown: Cas Enzyme sequence
MSKILGLDLGSNSIGWALIDDMKQSVVASGVRIFQEGVNRNTSGSEVSKNVVRRMARNIRRQNFRFRMRRDTLRHALQKLEMFPRHPEEENSFFKIDPYEIRKNGLSQKLTLFEIGRVLYHLNQHRGFLSNRKTASNEDGKLFQGGDNTLGIDYSREKLQTGAYQTLGEYLASINPHEERRRNRYTLRKWYLEEFEKLWQTQERYYPEKMNAREREFVKDVIFFQRRLRSQKGLVGYCTFEPKKRCSPKSSPVFQYFRILEQVNRLRVTVDERINDPLTADERIALINELNQTSILDIKKIRKVLGLPPETWINLDTEKILGNHTYSEIRRIWGADRFKTMTEEEKYQIWFTIHFAYDDEWLKKYAEKNWGLDEKQIDKLIKNNMESKPNDGYAHLSHKAMKKIMPFLEHGVRYDEAAANAGYHQSQMENIENFAEYLPDPDNIRNPIVQQALFQLKKVVNTLIQNYGKPDIIRVELARELKLPKQKREQMRFENLERQQEHEKIRTRLENEHGFNAPGRDDIIKYRLFEECGGIDPYSGDHIPISDLFSGRYEIEHIIPYSRSLDDSFANKTLCRSDYNRKKSNQTPYEAFGHLDEYEFMLNRVRKFKSKNAHGKLQKFAAIDVDKQLSDEFFHRQLNDSAYIARQSRQYLGQICKKVNVVNGRTTSKLRYLWGLNSILSDNELVKSNDDHRHHAVDAFVVALTTSRMLHSMSSYHKYNANYLVKEARFPLPWNGFRQQVEESIERIFISHHFRNRVRGQLHEETNYGRIVDPESGEQIFVVRKQLTSLSGKNVTNIVNPETRALVFERLRAFGITPGQKKIQIPKDAFAEPLVHAGTGHPIKSVRVKIPASNMIQLYSDRKLFVEPGNNHHIEIFASKDGQKRTGYVVSLFEAMKRKKMGEPVIDKNPRESKFPTFVMSLAINELFLFGKDSLDSWNELDPKEISANLYRVQKIDVNNNIVLRHHTISLSGQDDPGVLRKIPNTLQGIKVTISHIGLLEIADD

SEQ ID NO: 3851 - protein, 1006 aa, unidentified
  REGION 1..1006: note = Description of Unknown: Cas Enzyme sequence
MPQVLGIDLGPNSIGWALINEEKNQIIDTGVRIFQEGVNRPQGKEESKNKARRDARGARRRNFRYKMRRNTLIKALKKLGMFPDDPYAVQDYFKMDPYLLRKRGLDEKLTLVELGRALYHLDQRRGFLSNRKAGGNEDSAIFKGDQVKAGINEVKIILEENKYRTFGEYLASLDPHDKRRRNRYTLRLWYKEEFEKLWTKQQEFYPEQLNDQEKAFIYKLIFMQRPLRSQKHLVGFCTFEKDKRCAPKSSPVFQYFRVLEQVNRLRIGTTERKNEPLNDEERKTLIDYLNVNSKLEFKKMLKLLHLPEDTIINLDTEKLLGNHTYSELVKIFGIDRFTQMTDEKRYEIWHTIHFATHNEWLEKYGREQWGLDDEGIKSLLGNTIENKPNDGYARLSRKAIMKIIPNLEKGARYDEAALAAGYHHSIVDEVKPVEFLPDPNNIRNPIVQQALYQLKKLINAILLNYERPDIIRVELARELKASKDQRTEIRIQNIQRQKEAENIRARLIRDNYVQDPKRDDVIKYLLWQECGETDPYSGKKISLTDLYKDPKFEIEHILPYSRSLDDSFANKTLCSIEYNRQKGNRTPWEAFGHSNDYELMLERVRKFKSEKAFSKLRKFQVKDLAAELEDEFINRQLNDTAYISREARKYLQQITPRVDIVKGGATAKLRTLWGMNSILSGDENVKTRADHRHHAVDALVVAQTTLGMLHKLSSYHKYNNPNYAKKDLFAKPWDSFREEAETAVNSILVSYHFRNRARGKLHEETNYGQITDPESGEKVYVVRKSIESITAKMIGNIVNPETRKLVYQRLRQCGVNTQQKKWDIPKQAFAEPLLHPKTGHPIKSVRVKIPAGNMIPLYGEKRKLFVEPGGNHHIEIFANSDYSKKTGYVISLYEAVKRKKAGLPVIDKRPRDTEYPNFVMSLAINEMFLVDVKEEDIDWNNPDQKMLAQNLYRVQKLEIQKHITLRHHTVSLSGSTDPGVISKMPNTINGIKVVINYLGKLGKADA

SEQ ID NO: 3852 - protein, 1441 aa, unidentified
  REGION 1..1441: note = Description of Unknown: Cas Enzyme sequence
MGKILGLDLGTNSIGWAVIDNDRINDKETFKLKDKGVVIFSEGVKLEKGNEISRAAERTTFRGTRRLKFRRKLRKYETLLVLSKNGMCPLTKEEVIAWKKSSFKQYPTNENFLNWLKTDDDNQKHPYYFRDKASREKINKLELGRAFYHIAQRRGFLSNRLDQSDKGVIERHQPDISEIIESSNTKTELIIAIDEYFKEQNIIDFKLKGIKDLDAGGTELLKLYRAFKSKIKENDVLKSLKISINERLYKKGTLGKVKQGIENLDDKIKEGKFETLGQYFNSIYGKSNQRIRNQYTAREEHYLEEFKQICKVQELGEINTTENEPNKKYKGLTLDLYKAIFYQRPLKSQKGLVGKCTLEPTKYRCPVSRPEFEEYRMYQYLNNFKIKTPENEKLRELTEDEKEKIKPLFYRKSKAHFDFIEVVKKIIPKNENAVYFKSKEASTSKYVVNYKLNISLSNCPTIAHFRVIFGEDWKTLKYTYKTINKNGEKKVRTINYQDIWHVWTTFTTNEKLFDFATTKLGLSEKQANQFKKVTLKKDYASLSLKAINAILPYLKEGLTYDKAVFMANMKNVVKKQNWNNKNDRKLIQSEIEKIIDQHQIENKLQFVINGYIKKNIKSSYSKEADDIYRKELEQSFENEFGKKKWSKINTNDLFKNNYTFFVEKFSSSKDRFLKIRRIDEKIISFLNENNLLSSENKLYHPSDIEKFKLENVKNKDGVEFTVLGSPLSNSIKNPMAMKSLHKVRKLINTLILEGKIDKNTKIHIELARELNDANKRKAIQKWQKDREEERKIYRKKIKELYMPDFEPTLNDLEKFKMVLEQREDKKIVSKDDVSKYKLWKEQRHICLYTGNTISLTNFLSKNPNFDIEHTIPRSVSIDDSQMNKTLCENKFNREVKKNQIPFQLINHSEIMNRISHWKNRFEKLETEINGLLRASKTAIDKEAKDRIIQKRHYLKMEYNYWKGKYSRFEQEEIKAGFKNSQIADIGIITKYAQQYLKSYFNRVYSVKGTMVDQFKKAWGIKKTITDEDGIEKKDRSNHIHHCEDAITIACMTKNKYDVLARAWGLEEKESFNKAKNELESSKPWKTFSEDVKNIFNEVLIVHSHKDKVPIQSKKKLRKRGKIQYNKNGDVIYLQGDTVRGSLHKDTFYGAILEQNFENNKTYAQDKEGNGIVKYVVRKPLDGIKKTDIDKIVDEAVKGIVIKAVKDKILVPKKDVYKIEIDKTVWMNEEKQIPINKVRVYTPSVKNPLKDFKKHIERDKSKHPHKREYHVQNDENYCMAIYEGINKAGKIKRSSELINMLDAGKLLKLKRISKDDREIVSEIDKKTNSPLKYVLTKGKMVLLYENSPKEIWNLSNNEKLERLFEITQLDVAASGIKLLFHQEAREKKKITTFMGLKVGMKGGKNIGKHKQYPWLKIGHNAFDALVEGYDFKITTTGNIIKL

SEQ ID NO: 3853 - protein, 1556 aa, unidentified
  REGION 1..1556: note = Description of Unknown: Cas Enzyme sequence
MKFLALCNDVGLKKTNFSDYFREIVFQNLQTKEKRVMKKILGLDLGTNSIGWAIVQREDATQGAEPSQSIVAAGSRIIPMDAELLGNFDSGNSVSQTADRTRARGVRRLYERQHLRRERLLRVLRLMGFLPDHYEAALNRYGKFRDHQECLLPWCPLPEGGSEFLFQSSFREMLAEFAALHPEVSDSGAKIPYDWTLYYLRQKALTHPISKQELAWVLLNFNQKRGYNQLRSEMEDEPESAEGKQPKNRKYFDKQVIVDITDSGELYKGLKVLVVTLADGSRGKIFSKEIPTTLIGQEKSLIVTVDLDKEGHDRREADGSLSCRFKIPSEEEWDKEWALIKLKTEEDLKNTRQTVGAYIYDSLLHHPQQKIIGKLVRVIDRYHYRDELRAILTAQKAFHPELSDRTLYAQCLEELYGSNDAFRADIASRDFVYLLVDNILFYQRPLKSKKSLIADCPYEHTEGVDRETGEVKIYPIKCIARSHPLFQEFRLWQWVGNLRILQREYRNPVNGRIEMDVDVTDRFLPTEEARVALFEWLNDRAKISQKEFLKYPAFQLKKEAVRYRWNYMDDDKKSYPCNETRGAFIAAFDRAHLPAERLTPECVEALWHLLYSVDDPVQLESGLNKFATRWGFPSTLVDAFKKFKPFEKDYGAYSAKAIKRLLSLMRMGKYWSADAIDPLTRQRIEALISDREEAGIDPRVREHTSGMSSVEQCRGLPLWKACYVVYNRHSEASETERWSSPNDIDRYLRAFKHHSLRNPIVEQVVLETLRTVRDLWQQEGHIDEIHIELGRELKKTAEERQRASERNSENENTNLRIKRLLMEFFNPQFEIEGVRPYSPQQQELLRIYEEGVLNDPAYTMPDEVQKIFDKFKQREAAKQPTPAEVLRYKLWLEQKYRSPYTGEAIPLARLFTDDYQIEHVIPQARYFDDSLNNKVICEAAVNQQKGAMLGLEYIKSDKPKVVKCAGNRDVRIFSPTEYEQFVQEHYANNKKKMRNLLLEDIPEDFNARQLNDSRYISRLMMMLLSKIVREEGESEATSKNVIACNGNITDRLKKDWGVNDQWNKLILPRFVRMNDLTATHDFTTTNTQGHRIPCMPLELQRGFNKKRIDHRHHAMDAIVIACTTRDIVNYLNNEAAKSEVTRYDLKQKLCAGGKVIRLPWATFPTDLYTSLSAIVVSIKKKLRVLTRTQNHYQHINAESGKKEFVLQCNGDMRAVRKPLHKETVFGIVNLRKVKEVPLKTALQAPQRIVERDLKHTVVKLLASGMNEKQIAQYFAEHQDTWYETDFKKVKVYYFTEEVPNQAGYYATRKALDSSFTKDKILDSVTDTGVQKILLRHLERCNNQADVAFSAEGIEQMNASIQALNDGVPHQPIYKVRFCEQANKYAVGAVGNKGTKYVEAAKGTNLYFAVYEQECIDKQSGEIRRERSYATIPLRIVVDRLSHGLSPIPESEEGIAPKFWLSPNDLVYVPTTEEIENKKLNFPLDTERIYKMVSANQKNCFFVKISVASTIVDKKEFGPLNKMERTITGEMIKNICIPLRVDRLGKVTLWDEHPFGL

SEQ ID NO: 3854 - protein, 1537 aa, unidentified
  REGION 1..1537: note = Description of Unknown: Cas Enzyme sequence
MKRILGLDLGTNSIGWALIATYENGNPSKIEGMGSRIIPMSQDIIGAFDKGNSVSQTAERRRYRSARRLRERYLLRRERLHRVLNIMGFLPKHYSDQIDFNVHLGKFLNDKEPKLAYKDNRFAFNNSFEEMLNDFIEHQPQLLANGKKIPYDWTIYYLRKKALTEKIEKEELAWILLNFNQKRGYYQRDDQEDNEIINQEYVIDQKIVAIEKDEEDKKNKKKRCYKITLENGWVVNYATFGTEPAWLNTSREFLVTEELDENGNVKLTKERKTDQGGTPKRKITPLPSFEEIDLMTKKDQDRIYKKIKVKTESVINQSGKTVGTYIYETLLQKPNQKIKGKLIRTIDRHFYKEELQAILIAQKQFHPELQNIDLLNDSIRELYRNNEAHQLILCKRDFVYLFLDDIIFYQRPLKSKKSSVGKCSLEYRTFKDENGNRKIEYLRTIPKSHPLYQEFRIWQWLSNLKILDKENEQDETSRFINSIDEKEMLFKFMNDRKDIDQKSLFRFLLGLKGFKGKSLSTEVEKYRWNYVEDKIYPCNVTGSLIKTRLEKVGNVPFDFLTPEKEQSLWHIIYSVNDKCEFEKALKTFANKHNLDEDAFVANFKNFPLFKSEYGAFSEKAIKRLLPLLRIGKYWKWDSIDERTKGRITKILSGEYDEKIKTRVREKAIHLTKEFDFQGLQLWLAQYIVYDRHSEAASTGKWSAISDLEKYLVQFKQHSLRNPIVEQVISETLRVVRDIWVKFGNEENDFFSEIHVELGRQMKNTAEERERLTNQISENENTNLRIKALIAELKENSDGSLFVEDVRPYSPVQQEALKIYENGVLSSNIEIPEDILKISKSAQPSKSELQRYKLWLEQKYRSPYTGQMIPLNKLFTKEYEIEHIIPQSRYFDDSFSNKVICEASVNLKKENQLGLEFIKNHHGEKIDTGFGNTVEILSVEAFQDFVKGHYKNNRSKKGKLLLEEIPDKMIERQLNDTRYISAFIMNILSNIVRSAENDDGVNSKNLVPGNGTITSVLRQDWGLNDVWNEMILPRFERMNQLTNSTNFTSRNTSNKVIPTVPLEISKGFQKKRIDHRHHALDALVIACTTRDHVNLLNNRYAKSKERFDLNRKLRRFEKVAYQDFKTGSRIEREVPKEFLKPWVNFTKEAKTELEKVVVSFKQNLRVINKATNKYEKILEKEGFKIKEMVPQKSGNSWSIRKPLHTSMPYGKRIYEFDVLKICESVGKRKLILDRDIRNKVENLLKDCNGKVLEAQNRLKETPIKDNFGNPIIMTAFKVRSEKFRKRQDISRLSVRGKGGIKSYDDAVKFLNKIVDYKIREQLFKHLHENGNDIDLAFSAEGLERFNNQRKIPVNKLPIAESGSGRFKVGDNIGTRHKWVEAAEGNNLFFAIYQDKNSKRSFETIPLNIVIERQKQDLAAVPEVNDQGDVLLFYLSPNDLVYVPTKEERENINRIDLNALTKEQINRIFVVNDFSSTCYFTPNHFARCIASKEVDLNFDVKKKRITGSFDNKTASFEGVQIKEICLKLKIDRLGKISWG

SEQ ID NO: 3855 - protein, 1541 aa, unidentified
  REGION 1..1541: note = Description of Unknown: Cas Enzyme sequence
MTKILGLDLGTNSIGWALIDQDFINKQGTIIGLGSRIIPMDQGTLGDFEKGNSVSQTKDRTEARSMRRLRERHLLRRDRLHRALNILGFLPEHYSHNIDFEIHFGQFIKETETKLAYRFNSETGENEFIFKKSFYEMLDDFSKFQPEVIINKKKVPYDWTLYYLRKKALSVKIEKEELAWLILNFNQKRGYYQLRGEEEEENSNKVVEFKSLLVVDVIDSGDKKGTEERWYHVLLENGWIYKRPGKIIPEWKGKTKDFIVTTEYNEDGTVKIDKFGSEKRTFRAPNDDDWTLVKKKTEFEIEGSGKTVGCYIYDSLLLNPKQKIKGKLVRTVERKFYKEELKRILEKQKTFHKELQDKALYNLCVEDLYKHNITHRAELSGKDFIHLFLNDIIFFQRPLKSKKSLIGNCQYEIRYFKDKAGILSKEPVKCIARSNPLFQEFRLWQFIHNLRIYEREKYVNEKMITDADVTSDFLKSEEDWSELFAWLNDRKEIDQKAFLKYPPFKLKKDFVRYRWNYVEEKFYPANETRSQIQTNLMKVPDIPSDFLTREVETGLWHILYSVEDKQEIEKALATFAAKHGLGVQFVESFRKFPPFKKEYGSYSAKAIKKMLPLMRLGKYWHLEDIPQKTKTRIQSIVYRLDSIDYDQKRIGEIVDDDIPKQVIKSFIGCQHPLKGLNTYQACYAVYGRHSEEGEIIKWNSPADIDHFLRYTFKQHSLRNPIVEQVITEALRVVNDIWREYGKGLENFFSEIHIELGREMKNPADKRKRISEIVTENENTNLRLKALLAEMSFDPDFENIRPYSPNQLEILKLYEEGVLNSAIEIPAEIIKIARNSQPSKAELIRYKLWLEQKYRSPYTGETIPLSKLFTSAYEIEHIIPQSIYFDDSLSNKVICESEVNKDKGQYTAYSYIKDHSGKIIDLGFGKQVKILSMDAFEDYVKTQYSKNKGKLKRLLMDDIPDSFINRQMNDTRYISKLVKNLLSNILREENELEVTSKNVLASNGTITNVLKQDWGLNDVWNSIIYQRFERLNELKKTIQFGSWMNKSGSRSFQIQMPLELQKGFNKKRIDHRHHAMDALIIACASRNHINFLNNDFAKSEKRYDLRSTLCEKQKTDKYGNSRWIFVKPWETFTSDAKEKLQTTVVSFKQNLRVINKTTNWYQKWQEDEYGNLKKVRIKQVKGDHWSIRKPIHKDTIAGIVSLRFKKTVQLSVGIDNWKVLVDKSLKSCLKNLIEKEKYEKKMILKYFKEKKNLWGDKDISKVEIYYFENQMTATRYANDLNESFTSERVSSITDTGIQKILLKHLAKFSETLDEKTIEHPELAFSQDGLDDLNKNITVLNGGKFHHPIYKVRCYEPKGNKFNIGVTGNKKDKFVEAAKGTNLFFAIYQDKEGKRKYESIPFNIVMERQKQGLTSVPDINEQRDKLLFHLSPNDLVYIPNKDECENPNNIDFANLSRQQLDGIYKMVSSTGGACFFLRNDIASPIWNKTEFSALNKMERSIEGVMVKDVCWKLTVNRLGKVIEVRGINGFQTLTLTPLSALIE

SEQ ID NO: 3856 - protein, 1517 aa, unidentified
  REGION 1..1517: note = Description of Unknown: Cas Enzyme sequence
MKKILGLDLGTNSVGWALIEQNFAERQGEILGLGSRIIPMDQGTLGEFERGNSVSQTKERTDFRGVRRLRERHLLRRARLHSVLNILGFLPEHYARQIDFETHFGQFITDSEPNLVYKPNIQNGKPEFIFTHSFSEMFAEFNTKYPDFKENNKKIPYDWTIYYLRKKALTHRIEKQELAWLLLHFNQKRGYFQLRGEDEEDTINRSIEFHALKVIDVIDDGDQKGTADIWYSIILENGWIYRRKSKLLLDWIGKTKEFVVTTEFNEDGSIKKDKDGNEKRSIRAPQPDDWTLAKKKTEFEIEQSKQTVGCFIYEKLLKQPTQKIRGKLVRTIERKFYKTELKLILEKQIEFHPELQDRQIYSKCIQELYKSNESHRKSLEGKDFAHLFMNDIIFYQRPLKSKKSLIADCRYEVRFYKNKDGSLGSEPVKCIAKSHPLYQEFRLWQFLQNLKIYRINAEVDGMIIPELDVTSGFLKTEDDWVALFDWLNEKKEVKQDSFLKYPPFKIKKDIGNYRWNYVEDKIYPANETRALMLSRLYKCIDFSSESFTRDMEEHLWHILYSVEDTVEIKQALKTYAVKNGLREDFVESFMNFPRLKKDYGAYSAKAIKKLIPLMRRGKYWNEKEVSEVVRKRINDITARLDSIGNDRTRISNITDDDIPKQVLKSFVDCKNPLQALNTYQACYAVYGRHSEEGEIVRWKNPAEVDHYLKTVFRQHSLRNPIVEQVIAETLRVVRDIWNHFGNGRENFFDEIHVEMGREMKNPADKRKQMTEQISANENTNLRIKALLSEMLLDPDIENVRPYSPAQQEILKIYEDGVLKSGLEMPEDIIKISKNAMPSRAELNRYKLWLEQKYRSPYTGEVIPLGKLFTPAYEIEHIIPQSRFFDDSLNNKVICEAEVNKDKDNSTGFEYVRDNSGKMLQLSMGKTVKIFTLEAYQDYVKFHFSSNRGKMKRLLMDDIPEGFIARQLNDTRYISKVVKNLLSNIVRGDNELETTSKNVAASNGSITSELKKEWGMNDVWNEIISPRFIRLNQLTNSNQFGEWINRDGKNFFQNRVPFELQIGFNKKRIDHRHHAMDALVIACATRNHINYLNNESAGTPKRYDLRSALCFKNKAEGNGNYKWTFYKPWDSFTVDAKNKLESVIVSFKQNNRVINKTVNRYQKWEKDEEGKFCKVFVTQEKGDHWAIRKPMHKDTVAGAVTLRFKKQVQLTTAIDQAEMVVDIPLKRQIKDLLQQGYDKKAILKFFKATMNKFHDSDISRVEIYFFDHENVASRVSIDESFNSSAIGNITDTGIQKILLNHLYKYNENTGDSSIEHPELAFSPDGLDDLNKSLSFLNDGQEHKPIFKVRCFEPRGNKFSVGGTGNKKSKFVEAAKGTNLFFAIYQNIEGKRSYSSVPLNIVIERLKQGLSAVPDVNEDGTSLLFCLTPNDLVYIQTKEEKLSNSSITLDNLNNEQRTRIFKIISFTGSRLYAIPYYVSISIYDKVEFSQLNKLEFVFDKQSIKEFCIKLKTDRIGRFK

SEQ ID NO: 3857 - protein, 1455 aa, unidentified
  REGION 1..1455: note = Description of Unknown: Cas Enzyme sequence
MAKILGLDLGTNSIGWAVVEDQNNKTTLIDKGVRIFSEGVKIEKGIEKSKAAERTDFRSARKIKFRRRLRKQETLKVLIENNMCPLTIEEWTKWKKDKKEYPKNPDFINWLKTDELKNINPYFFRDKASRTELPLMQTGRALYHLAQRRGFLSNRLDQGSDGFTEQIRLDLIKKIECETDKTELLTSVQSIIDTYSEEEDKDAKKLLKGVEKLCKINNELPITEFKEKLINYLNKADNLGAVKKGIADVSKKITETGCETLGQYFYKLYQNQSKIRKVYTARTEHYYHEFLKICETQNICDQLKHKLDKAIFYQRPLKSQKGLIGKCVFEKNKTRCAVSHPAYEEYRALQFINSIKVSETKDGKKDFLSFDERKKIWPKFIRKSKPNFDFKEIAETLDKKGLSRYYNYTGHTSVSGCPTIAQLTNIFGENWQETLFEKYTNKQNTKGLKTIDEVVTDIWHVLFTFDKDEKIIEFGKQKLGLNEVLAKKFGAINLKKDYASLSLKAINKILPYLREGLIYSYAVFLANIENVVGEEIWKNDENKNLIKKELHLLIDNFNEIKGLEAVVNDFIADFKKEYNNAHKDYVLDEQDKKILLEKIESNYGKNKFESLEPDKKTEIINSTEKMVAEQLRKQRGEFIKPKRLDEKISEFLINNFNVTKKSIARLYHPSDVEIFKTASRNSEGLLLLGSPIVSSIKNPMAMRAMHQLRKLVNTLIKENIIDEETKINIELARELNDANKRAAIKKWQDERQKAREEYKKSIKELFKAECGKDIEPSDSEILKYELWEEQQHICIYTGKTINICDFIGANPNFDIEHTIPKSLCFDNSNENLTLCDIQYNRDVKRNKIPTELSDYNSIKPRLDKWLVFIDDYEKLYNTRKKAKGIETKEQKDKRIKEKHYYKLHLDYWKGKYKRFIMVDVPSGFKNSQIVDTGIITKYAISYMKSIFPKVYSVKGNIVAEFRKIWGLQNDYEKKERVNHVHHCIDAITIACMSKQKYDTLAKIYHEDEAGFHKIKKETQLVSKPWTSFTMDVLNIEKEIFVSHHTPDNMKKQSKKVVRERGIIAPKVIYETDANNNTLRDKYGKKIVKEYILLKDVNGNLIPIKGKRLTPSDIINKVDGIDYFSLIINDKIQYYEFAKSKKTGKIIYKKEPIYLQGDTVRGSLHLDTFYGAIAKDINGNIITNTNGKIAPNYVIRKELSKLKETDIENIVDPVVRGKIIEAKKNKLITFNKSGAVIKTTIWMKENQIPINKVRVYSSLKNPLPDFKKHRDLSHLTYKQQYNVSNEENYCLAIYEGKNKKGNVCRTCELVNMIDAGNYYRLSNKNWKQQYPIVPEKDSVTNYSLKTIITKGLMVLLYEKSPEEIWELTYNQQMERLYEITQLDTEKSAEIKLLFHQEAREKKVITEYMGLKTGMKGGKNIGKHKEFPWIKVGPNSFDALIEGIDFKLTPTGKIIKL

SEQ ID NO: 3858 - protein, 905 aa, unidentified
  REGION 1..905: note = Description of Unknown: Cas Enzyme sequence
LGTGDFIKSKRTDEKVIDLLLGKSETGEIFCSDESRIKKLYHPSDIDKFKSIIIKDKNDKEFIGLGSPATPSVRNPMAMRSLFQLRKLINTLILEDKIDADTKINIELARNLNDANKRAAIKKYQEERKKIREFYKERIQEMYLEKTKQQIEPTDDDILKFQFWLEQDTIHLPPVTEQDVLKYQLWDEQHHRCIYTGKTIGITDFIGSNPIFDIEHTIPRSVSYDNSQINKTLCYNKYNRDEKVNKLPIDCVNYESGKNITFKDGETVNCPAIAYGIVERWERKFKELDDKIAQLVKNTKHASTKEKKDKIIQNRHYLKMHRDYWKGKYERFTMKDVLQGFKNSQKVDIGIISKYAREYLSSVFKNKNDRSNVYSVKGEMVAEFRKAWGLQESFINEFGKKDYKPKDRSNHIHHCIDAITIACMDKNKYDNLAHAWSLEEKGDYKKAREELENSKPWNTFTEEVTKVGNEVLIVHHTPDNVKKQSKKKLRKRGQIVPNVIYKKDNTGKNILDKDGKKIIDRYIYEKDEQGNKIPVFGKQLIKQDLNNKIEGKDYFHKQTKEGAKYYEFVKNKKSEIVYKKSAIIQQGDTVRGSLHQDTFYGAIKQTVKDKNEKIKRDENNRMQFINDGDGNPILAYVVRKDLSVIKKSEVEKIVDPIVKQKIKDAISSKIFTITSNDNQKNKIDGTIWMNENKKIPIRKVRIKTNIKSPLIIKEHRDLSKESHKYKEYIYAANEENYCMAIYEGKDEKGKLKRTFKPVNMIDAGKYYRLSNKKYRKEKPIAPINEKKIPYKFILTKGTNVILYKKNSNEVWKLSEIDLRKRLYKVIAFESDGRIQFRHHQIAMKQSSKNKEEMTIVKYMKENNLKNSEVNFEKSIPWLRLTSGNWNFIVQDIDFKISPTGKITKI

SEQ ID NO: 3859 - protein, 1546 aa, unidentified
  REGION 1..1546: note = Description of Unknown: Cas Enzyme sequence
MAKILGLDLGTNSIGWAVVDDEKKQILGTGIRIFPEGVVAKTIGTGDREVSKNAARRESRQSRRGFYRHRLRRIKLLETLIEFKMCPLTGKELKQWKQYDKKKGQAGKTFPSSEEFNKWLKLNPYKLRAKALNNDISLFELGRIFYHLIQRRGFLSNRKGNEEGKIFSGKDNMTGIDETNKQIKDKTLGTYLNSVIPKEYEPYKNIIDKNGKELRARGRYTLRDMYVDEFEKIWQRQSKQLGLNSIQKEVKKESIISGSIYNKRNKHRIKNLQKSKGKENVEIKGNILTIKEHIHLKEYLAGKIYYDDEGNLKHKSQDSVLFYQRPLRSQKGLLAKCSLEGRKFYDKKDKRWRTAGPTPCPLSHPEFEEFRALQFINNIEYGIKKRLDENQRLILLNLFNRKDTNFDFKLIPKELKLTYETFNYADDLKAPGNYTNAKLSKLFNPDIWEKHKENIWHCFYFYSDNDKLINKLKTDFGLEEKNEEKAAKIKLKDDYANVSLKAIRNITPFLKKGYKLSDAVLLGGVRNAFKTTDTENKPYDRWENFNNEHEKIEKDIIRINKDKKNKEGDAVKKIKEYLHNNCGFEKDDKNFKKLYHHSQEIEQKKIQDKLDKIENLRNPIVQQGLNELRRLVNTLIDEHGKFDKIKVELGRNLKMGKKQRQETEFKIRDNNKKNEEAREKLSEYGLAHSRENIQKYLLWKEIEDRSGTAKCPYTGKTINISDLLGKENKFQIEHIFPRSTSLDDSFANKTFCDAKFNGLKGNKTPYNFYKKNNDAKLWGGAKSWDEIKQRAFKLLPYKKAKRFTAEKVDEKAGGFIERQLNDTRYMSKKAKEILSQICPKDNIRVMPGSVTSELRHLWGLNNILQPVEILDFKEAKINIDKLEKHWVVFDEKGEVLSFYPIHNEKPNLKPNEITISGYLNNKGEFSSKYIALKSVYEELKGDNFKGEYWKKLKLSNKPLQTVKIFTDKPAVDDDEIVLRGKVAKKYFENDTIGKKIKTNFEDGYYWAKFKVNNVKFEKPIPKKQPKKKSGQILLYGTVEDAIFKSYIFECQTGEADGNYWAIIDLDFDTVDFSNTMNPKPETDDNKILIQGSINETGLFSSDIDNKHNFETTLPQGKYWTIFEIEGEDAKLYPQINLEPKLQDKQKVVEGTVWIDKYTGEIKFDPKKNRDDHRHHAIDAITIALTEQSYLQKLSTYNAQLDEKRRGKAKKPTFEMPWDNFYNDAKKAASEMLISHKANNKVLTKINKVIHKNGRTYTSKGYAAGGQLHKENVYGKRQTPGSKKPYYHIRKSVESLTTDKQIDKIVDGKIRAIILHGKAQEKRIKKEIDELNKQFKKAKTDFEKAEIQKQIKQKQQDIKMLFSLPNKNGERVPIKKVRVKENLGNMMQLKDKKVFAEKKGKEVELNQYVNPRNNHHVAIYKNTEGELFEKVVTFWEAVERKKEGLSVIDKNPTEGSVFVTSLEINDMFLLGINEDNINWENPNYSDLTKYIYRVQKVSSSYYTFRHHLASKLDNSKQEISLQSFKAWQEVNPIKVNIDILGRISKVD

SEQ ID NO: 3860 - protein, 1610 aa, unidentified
  REGION 1..1610: note = Description of Unknown: Cas Enzyme sequence
LFKCGCFFIKKASTKAEAKFFQTTAYSLIVIRYKRKFVSSYVCKIKEILLNFKTIFEKHIIMAKILGLDLGTNSIGWAVVDDEKNKIEEAGVRIFPEGVIAKTIGTGDKEVSKNASRRESRQTRRGFYRHRLRRIKLLEALIEFEMCPLTYDELKQWKQYDKRKGQAGKTFPNSLKFVNWLKLNPYTLRAKAINEDITLFEFGRIMYHIIQRRGFLSNRKGKEEGKIFLGKDNIIGIDDTKKQIQDTTLGSYLNSILPKENEPYKTIKDLNGKELRARARYTLRDMYIAEFNKIWERQAEQLNLKSIKKEVKHKSLISGSIFSKRNKQRIENLQNSKGKENVVIKGNVLITKEQVPLKEYLSGEIYFDDDNNLKHKSQNSVLFYQRPLRSQKGLLAKCSLESKKFYDKKNKRWRIVGQTPCPLSHPEFEEFRALQYINNIEYGAKKRLDKNQRLILLDLFNKKDANFDFKIIPKELKLTYETFNYTNDLKASGNYTNSKLSKLFKPDIWEKYKEEIWHCFYFYSDNDKLIEKLTKDYELNIKDVNKIEKVKLKDGYANVSLKAIRNITPFLKKGYKYSDAVLLGGVRNAFKTTDTNNQFYDRWDNFKDEQSKIEKDIISINKEKSNKEGEAIEKVKEYLHKNCGFDKNDKNFKKLYHHSQEIEQKKIKDKLDKIENLRNPIVQQGLNELRRLVNTLLEEHVKFDKIKVELGRNLKMGKKQRQETTYRIKENNNKNDEAREKLSEFGLAHSRANIQKYLLWKEIESKSGIAKCPYTGKAVSLSDLLGNENKFQIEHIFPRSTSLDDSFGNKTLCDAKFNGLKGNKTPYQFYKINADANLWGGAKSWDEIKQRAFNLLPYRKAKRFTAENVDENADGFIERQLNDTRYMSKKAKEILSQICPKDNIKVMPGSVTSELRHLWGLNNILNPVEILDFKSAKINIEKPEKHWVVFDKNNEILNLYPVRNNKPDLRNNEILISGNLDKKGVFSSKYISRNSFYEELQGDIFIGEYWKKIKLSNKPLQIVKIFTNKPETNENEIVLRGKVTKGNFENDTIGRKIKTKLEDGYYWAKFEVKNVKFEKPQTKKQPTKKAGQILLYGNIKDAVFKSYIYECQTSEADGKFWAIIDLDITTPIFFNTKKTKPETDDNTILIEGTINQNNVFSADFDNDFKFKTDLSQGKYWTLFEIIDEDRKLYPQENKKPELEENQIITEGTIWVDKYTGEIKFDPKKNRDDHRHHAIDAITIAFTEQYYLQKLSTYNAQLDEKRRGKADKPTFKTPWDNFYNDVKKASSEILISHKANNKVLTKINKVIYKNGKKFISKGYAAGGQLHMKNVYGKRTAPTSEKPYYHIRKSVDGLKDNQLKKIVDKRIRDIITKAKAQEKLIKKEIETLNKQLKKVKTDFEVSDLKLQILQKQEDIKLLYTLPNKNGEPVPIKKVRIKENFGNMEQLKDKKVYAEKKDEYIELNQYVNPRNNHHVAIYKNENGELFERIGTFWETVERKKACLPVIDKKPTDGCEFITSLETNDMFLLGLNEKDIDWDNPNVSFLTNYIFRVQKYSKKPKSFEFNFRHHLASTINNPKQEVSIQSFKKWKEVNPIKIKIDMLGKISKID

SEQ ID NO: 3861 - protein, 984 aa, unidentified
  REGION 1..984: note = Description of Unknown: Cas Enzyme sequence
YGNLSKSAIKKILPFLEKGELYSHAVFLANISGVLGRKISDDEKEKIAINIKNALQKHKSDKKIQGIVNNYISSFKENKESLGDNNNSIEVHQNGINKEIENWIGKSEYEQLNEEEQNSIKTKCWNKFKEEAKDKHFKDIKYLSIETVPEYIQSELEEAFPDDKENISENINKLYHPSAMEAYKKADKELGNPEISAIKNPVFNRAMHQIKRLTNELIKQGLVDKDTEVNVEVAGEINSASYRRALTMWQKDQEMIRKWAKEKIINTYPKECRAEINPSDTDIVKYILWNEQNRKCIYTLDEIGICDFLGEKITCDIEHTIPRSKLNDNSLRNKTLANADFNRNYKKDKLPALLEENFNGKTINAKTILQNRDNYLKSYSFSGKKPNVNIQWNETLKMLKDEYKKYKNAAKVITDASAHDDIMTRVHYTNFKLEYLRDKYKQFETEEITSKFTNANLVDTRIIAKYARAYLNSYFNKVNVVNGKITDTLRKIWGLQRENETKDRSNHIHHCIDAITVACTEKGTANRISEAYHNYERDYFKGNNAAKIRLSEPMKDFVKTMNNLQNEVFIFHRQKDRIKPLLENFKKENSKKLNLRGTLNAPNPYGHIMKDGKEMFVQRKPISAITGSDIENIIDEGIKKRLLSLADSKGWEKITYKPKENENNEIKEKEHKQTIAFSIYSKLIKAKANKSLMKQDIITDNMNSNFVDKQSLVKTFFPTIIKPELLMEKQEVFKTKLTKAVDDLVRTKGLELLLSGEEKTSEGKNIVLPEYINPDTNKKAGQMVIKRLRLKAYNQNQYPLKEYREIDKSKYEYKHDFYFDKEKGSNYEARIYGDLFPDDNGKLKNRKYLLINSYNIVKNIYEKEPSILLLYAIHRGDMFLVFDKHTDEIDWKDDNNLQNRLFSVVKFDEKGIIVLERHNYADGNVDNVPREKCIESGAEGTQLSDLSRVVLRRSPSTLRAIPTKVDVLGNIDIEYSKEFITKHS

SEQ ID NO: 3862 - protein, 1527 aa, unidentified
  REGION 1..1527: note = Description of Unknown: Cas Enzyme sequence
MNKIKLGLDLGTNSIGWAVVEKQDGKYNFLEKFDKNGDLIPSKGSYIFPKGVNADENSKAAERTGFRGARRRLERLILRKIATLKVLDEFGLCPKFEENELGNWKNKKIYPCENEKFIEWQRTGKKNGNIESEKLKQPYYLRHLAATKDGLMNSEQGKLQLGRAFYHLAQKRGYLSNGEEEQSEDKLELFKSEVVKLLDEHIRIDDFKEPFQVIFESRKGDEKVKKLGKKINKKIEKEKEFDKLKAFIIEELNKPENLGKVMTEIGELSKAIEKAVENGECAPTMGSYFNSIYAKADKKTGLITKLRGRCTHREDHYEKEFNFICKKQNIDGELKEQLHHAIFYQRPLKSQKGLVAMCTLEPKRKRIAVSHPLFEEFRMWESINRIKIGKEKTKLDFLTKEEKELIKPLFLQKTDFDFIKIANKLSGEEMYCYIKKPQEVFYKGNIKGGVANIFFNFPLDKKFSACPTISALSKLLGKDKFNEIPFLNSGYKDEKNKTQISVEDIWHCLFGDDIVKPNKEIIKKATIRKEFAEKHLKLDEKGIEDFQKIKLVKGYGNLSKAALKKIVPFLKKGEIYSNAVFLANISEVLNRKLSQNEQKIISEKINEAINIHNLEKQNIGIVNNYISKLKSIKDEILGNNAFSINSHKKSLTSEIVNWVGEIQYNKISLSEKEDLINNCWQKFSDVALEKTSKEITYISTKTIPEFIFDKLTETFPNDKIDVSKLYHPSAMETYKQADKKLGNPEISSIKNPVFNRSMHQIKRLCNELIKKGIVDKDTEVNVEVAGEINSASYRKAIAKWQKEQEIIRDWAKKEIVNTYPQECQHEINPSDIDITKYILWKEQNHQCLYTEEQISICKFLGGDTTFDIEHTIPRSKYHDNSLSNKTLANAKFNRDIKKDKLPGLLNENFNGKTINLERIINNRNKNLNSYSILWQLQQVNIQWNVSLWSLKKEYKKFKNAAKAITDPISHDEVMTKAHYTKIKLDYLSKKYKNFECEEITNQFTNANLVDTRIIAKYARAYLNSYFKKVNVVNGKITETLRKMWGLEKEYEIKNRDNHIHHCIDAVTVACVEKGTANLISETFHNYESDYFKGNNNPKYKIKQPMEDFANRMHNLHNEVLIFHKQIDRIKPLLDAVENGNNVKQNLRGKLNSQNPYAHIKKNDKLIFAQRKPITKISGGDIENIIDDGIKIRLLNLADTKGWEKLMEFIVKENEVVVEKEIEHKKGIAFKIYEKIKKDDTKKEIMKDNITKQNFSTEFSSVKDLIEMLFKEIIRCDIDENKRENYKAKITKEVTNLTRTKGLEILLKESDGVIILPEFYDEKKNKQIGRMVIKNIRLKSGKTDTNIKPYKEYRKIDKSKDDWQQNYYFAKEAGSNYEARIFGDLIPDENGKLKNRKYQLINHYNIVKTIFEKETEKPILKLHQGDMFLVFDKNPNDEIKWNDVNDLQNRLFKIVKFTETENIVLQRHNYAKGNVDTANAINSEKNLSNLSEIVLRRSPSTLRVIPAKIDTLGKIDVNFSKAFIELNS

SEQ ID NO: 3863 - protein, 1208 aa, unidentified
  REGION 1..1208: note = Description of Unknown: Cas Enzyme sequence
MERILGIDTGTNSLGWAIIEKDGDTRRLLYKGTNIFSEGVKIEKGIESSKAADRTDHRSVRKHYWRRKVRKVRLLTILSENRLCPPLDKEELRQWKLKRIYPKSDEFMEWQRTEDKDDINPYRYRYLCLTEKLDLTDIRQRYILGRALYHLNQRRGFLSNRKETTKESDGKVITGIGDLTKEIEKSGCKYLGEYFYKLYQRGEKIRSSHYTSRKEHYLNEFRAICEKQDLDKELAKKLEKAIFYQRPLKSQKGTIGKCTFEKGKSRCPVSHPLYEEFRMYQFINNIKIKTPGDVELRELTFEEKEIIRPLFNKKSSFDFKVIAKALAGGRNNYCFYKDAEDKPYKFNFAMDTSVSPSPVCGGLSKIFGANWKDALCEVYTLSEGKTQMQVINDVWHALFSFDDEDKLKEFAENRLQLNEEQAEEFSKIPIANEYASLSLKAIRKILPYMKDYGMKYTHAVFFGNLKEVLPSHIWGIKETREAAIGNIIGAIQEVAETSDSQTIEKCLKDYLKERYQVSDEKLKKLYHPSMIELYPKVRPNSDGIYQLGSPRISSVKNPMAMHSLFRMRKVINLLLKKGYIDEETKVHIEFSRDLNDANMRKAIQQLNKENEDDRKKCRDKIKELYKEQCGKEIEPTDRDILKYQLWEEQNHICLYTGDGIGICDFLGDEPKYDIEHTIPRSVGGDTTKENLTLCSSKFNRETKKTKLPSELHNHEEILQRIAKWKEEYETLEEKIRSRRKRHPAEKGQRDKNIQERHYPELKCKYWKRKYERFTMTEVPEGFSRRQGTDISVISRYARMYLQSVFKRVYIVKGIATSDFRKLWGLQDVYEKKSRVNHVHHCIDAITIACIDKGEYDKLAKYYHDEENHEWYGHDKPDFKKPWDTFVADIKNVENELLIAHYSKDNMSKQAKRNIRGRDGRILKNERGEKLQMRGDVAHTSLHQATYYSAIMKDGNIKYVGRVELPKMKDKDVDKIVDEVVKDKVKAAISEYGSLKAAIEAKIWMNKEKGIEIKKVRCFVKQTTPLQIRPLRDVSRKEYKRNLLAWNDGNYKVAIYIGKNEKGKEEREFEEVNMLDAARYFRKSSSLEQTGDPLIPIKSEKGYPLVYTLSIGSMVILYDKTPEEIWDMDMKNLQKRLYKITAMSLTDGRMVVVHHQEARQATELKQEAIAYNYDGNLKPMLRIGFNKFKALVQGVDFDINDLGEITRLI

SEQ ID NO: 3864 - protein, 1531 aa, unidentified
  REGION 1..1531: note = Description of Unknown: Cas Enzyme sequence
MTKILGLDLGTNSIGWAVIDKEKKEIVNCGVRIFQEGVVKETIGQGDKEISKNAERREHRQARRLHYRKKLRKIQLLNALIRYAMCPLTTEELKEWKNWDKAKKAAGKKFPASPEFVEWLRLNPYLLRTKAINEPISRFELGRILYHFIQRRGFLSSRKGSDEGAIFKGKDNMEGIDDTRKMIKDETLGKKLFDYLPIEGTPYKRIIDEEGKEVRVRSRYTLREMYIAEFEKIWQRQANHLALDTITVPLKKVIILKGDLTGVRNAKRIENLKHRFGEQSVSITADRIEVRAEMPLKVFLAGDITSDEEGIRFSSNNSVLFWQRPLRSQKGLLGKCTFESKKFFDKKFQKWITIGSSPCPLSHPDFELFRAYQFINNIRYGRSGLVLNDSFRQQVLDLINSEDKNFDFEKIPKKLKMTYEQFNYDNKLKVAGNTTHKKLLALFDETLWNTNKEVIWHYFHFYSDPELLSKKLVERFGFDEEKAKKASAIKLKDGYGSVSLKAIRNILPFLKMGYQYPTAVVLGGVKNAFGSRWEYFKESHNEIIKKIVNIINNEKHKEYGLIAKIKELLADPVEGYGFSQEDRAFQKLYHHSQEIERKEVRKRLSEIPNLRNPIVQKGLFEMRRLVNTLLDTMDQNLKHGPAFRFDRIHVELSRELRNSKTQRQEMSFKIRDNEAANDEARIRLQEYGLKPSRENITKYKLFREIEEKHGSVVCPYTNRPISITDLLGQLNLFQIEHIIPYSISLDDSFANKTLCESNFNRDKGEKTPFEYYQKNSSASTWGANSWDEIEQRTFRILPYQKARKFIARKSFQTEGFIERQLNDGRYIAKKSAELLTEICDDVRVMPGQLTSELRRLWGLNNIIQPVMPLNLKGIKISDEDSIPHYIILDKDSSPIDAIPIPNERPTTQPNQILIPGIVDTKGVFTSDKEYRSLKFSLKVDGMREGRHWIRINVSKPIGFTKVFVEKPVSASNEIVYKGRVEKGYFSHDSINKKIKTTEADGLYWVKFNVEKTSFIEPDKDRPPTTKSNQVLLYGNVNENNQFVSYIYQCESNVNPGRYWALLEIDFDSADFTRAIVQPPMEDNKLIVHGSIGGDSVFSADCDPTYQQQTTLTPGKYFTILEVEAIGELFPIENKQPLLQKGESLIEGSVWVNRQTGEIMFDPKKNRDDHRHHAVDAITIAFMELGYLQKLSHYYGAMKARGRGMGDRPIFSPPWEGFDRDAKTAVEGILVSYSPSSKVLSKISKVVSKNGQKFQSVGYAARGRLHREFYFGRHPRLISNRSVGADFEKDNQGDVVNYYHIRKSITAIDTNKHIEKIVDQGIKKLIIARLQEQGIDVTNAYKIPPNFFFDKEGNPLLYLPNKRGEPVPVKKVRLRETIGNAVQLKDNLNQWVNPYNNHHMIIYIDTQGELKESIVSFWEVIERIQQNQEVYQLPCDGKEILTTMQVNDMFLLNLPRDFAENIELQTIRNSMISHHLYRVQKLSSMYYTFRHHLASTITNAEEEIRIQSMPAWINANPIKVKMDCLGNYELIK

SEQ ID NO: 3865 - protein, 1414 aa, unidentified
  REGION 1..1414: note = Description of Unknown: Cas Enzyme sequence
MLTRILSLDLGTASIGWAIRDLTIEKSREAIIHSGVVIFPEGFGTNKSGQFSLAAERRKARLIRRQLYRRRLRKYATLKRLIKADMVPLSLEEAQKWAKPAKGNRSEYPLSQRFHQWLRLIPANGPLRASAFANIYELRAAAEKGELGQFASFGFSTEELLGRIFYNYAQRRGFKTNAKDGRGGETGTVKDGIKKLLEELDGKTMAEYFAGINPFKARIRKRYLAREMFEEEFDRITNSYGDALNGISDDLKRIIFYVRPLKSQKEKVGSCSLEAGKRRLPLSHPDFEMFRLRQFVQNLRVEHPNGVKTGLNLSETNKLIDWILEQPQARQTKKDLKNWLTELYQAEIRLTVHEGTTSPPCPCCKMLKDVLGPSWQTRSLKRAYQNGPKKGYCAKVGYTDLWHFLREVQERPEKFKTEDPISDYATALGLGSSAANRMNKYVDEEMPSGYSSLSLFAIRRILEMMDNGHPYHTAVLLAGMKRVLGEELWNHVGEDIINDLSNHVADLPFEATKTKTYNDLLNRLLEAGEVASDKDIEDRIKFHYGTQKWNQLKKNEAARATEILESVASWLKEAEINPGKAKFKASPSLLEFVNERIKDELRGVGQFDEYKLERKIGKLYHHSAISKWKEPEFIIPADKDADDGFWQLPSPYTGAIQNPAAMRVLHQCRKLINFLLAEGHLDRNCKVVVEMARELNDSNQRAAIEEWQRRQERERQNIRQFIVEHLGRTNPDEDLLERYRLWLEQIPLAAGPDTRSFLDKALMGSELGKRKSDDLVQKMQLWREQNGICLYSGKPISPSDVLDGTSTQIEHTIPRSISNDTTMENLTLATSIANARKGKKIPFEIGPGDSTLSDYSTILQRIKPWEERADDLEKQIKKKSRAVRAAKGSGNLDGYNKAVKERWLLKFERNYWRAKIRRFKMEEVEEGFSRRQLTDTQVITKYAAGWLKTCFNHVKGTKGTLTAQLRKSWGLQSMYEKKDRTNHTHHLVDALVNVMIEPGLYNQLSAAYRKTEELRHKEIRLPMPWDTFVTDIENLCDNTLVYHVHRDNTLRPSKFAIRNRSGKIIGYKQGKGIKAPLHMETALANVRTWEEKSDGSLKWKRGEEGSFITTFATRKEMVPGTKTIFPKLKQYADERKSEFEKEGKREILPVLRLRMKDGKRIELKRMTEADLPNLKPNDLNAHFLDAVAKEGLAALKNDGFFLPVYKARIPKRVQTPPKIRNVPVAFQHPERSHKHSVHYENDSNYAMAIYRSHQGKKEKRTFLVQPYLGLNPENAKHPFPLTLHEKGIDYDLAGPTGGMQVFRMGQRVLLYENTPEEIWNDTSPGNLGKRLYKTVGIFNKSESFPYGRQTFQKHDETGFEKLASGEINRIDAKSAAFRSDDSNIPVRVLLHTQINALVEGIDFRMNHLGEIEKC

SEQ ID NO: 3866 - protein, 1221 aa, unidentified
  REGION 1..1221: note = Description of Unknown: Cas Enzyme sequence
MKKRILGLDTGTNSLGWAVVDQEENGQYTLVDKGVLIFQEGVKIEKGIESSKAAERTGHRALRRQYFRRRLRKIEILKVLMNYNLCPALTEEDMKLWKLRKIYPRKDEFMAWQRTNDNEDVNPYHCRYICLNEELDLGKQQDRYTLGRAFYHMAQRRGFLSNRLEQTDEKEMGAVKSGIESLSKEIEESGCKYLGEYFYKIYKEKGNTVRIRTRYTDREQHYKKEFLAICEKQKLPKKMVDELTRALYFQRPLKSQRQRVGSCTFEKGKPRCSDSHPLYEEFRMLSFLNSVKIQGPWDVNGYRPLNKEELMKIEPLFYRKSKPNFDFEEIAKKIAGKNQYQWKGDTKVNMPYKFNFRMSQGVSGCPTITLLKEVFGENWKEGIAETYTLNIKKDGTQKSIEEIVNDVWNVLFSFDSKDKVKEFGIQHLQLDEESAEKFSGIRLSRGYASLSLKAIRNILPFLEMGMLYSHAVFMANIPKIVGPVVWNDDEQRNHIIDEIRRMADAPEEKEKSMRQTLDICIKDLLAKEYGIDEKRLEAMYHPSMIETYPDAKPNKDGVVLLGSPRTNAVKNPMAMRSLHQVRKVVNSLIREGKIGPDTEVHIEYSRNLNNANMRWTINERQREQEKKHKQYAEEISKLYKEATGKDIVPTETDILKYQLWEEQGHICLYTGKEIGIADFIGAGPKFDIEHTIPQSVGGDSTQMNMTLCDSNYNRYVKKAQLPTELPEYDSILTRIEPWEEHIEELTKQIDRISTKGIWDKPSKDRKIRDKNRLKIERDYWKGKYERFTMTEVPEGFARRQGAGIGLISKYAALYLKSYFHDSLHPERRQVYSIKSPLTKEFRTMWGLQEEYEKKSRDNHTHHCIDAIVIACIGKNEFNLMGKYHHDMFDYNEGNGEKPVFKKPWPTFTQDLKQITEELLVVHDTPDNMPKKASRQIEVSGGRRVVAKGDCARGSLHQDTYYGAIERDGEIKYVVRKPLSSFTSIKDLENIVDDAVRQTILDAVEGKDFKKAIAEPIFMNKAKGILIKKVRCYTPTVTQPLDIRRQRDVSRKEYKQQFHVMNDENYMMAIYQGIVKGKRKTKFALVNALDAVKFFKRSTDRSDYPSLVPEEKDGLPLKWCVRKGTLLIMLEEGEESVSLTNEEEMSNRMFTITKMDKVGRLTCRNSKEARTAGDLKSFVNATPFKLQDGYRPILCMSPINFHFLVEGYDFTISPLGEIKLKH

SEQ ID NO: 3867 - protein, 1219 aa, unidentified
  REGION 1..1219: note = Description of Unknown: Cas Enzyme sequence
MKQRILGLDTGTNSLGWAVVDRYDDNHYELVKKGVLIFQEGVKVEKGIESSKAADRTSHRALRRQYFRRRLRKIEVLKVLVRHNLCPALSDEDLKLWHTRKIYPAKPEFMEWQRTSDEEDKNPYHCRYICTSQSLDLNKQEDRYILGRAMYHLAQRRGFLSNRLDNSEDNSEKSTVKKGIKELSEKVSEAGCSYLGEYFYKIYKEEGNTAKIRSTYTDRENHYLMEFEAICQKQNLSDELRQELRRALYFQRPLKSQRQSVGKCTFEKGKARVSTSHYAFEEFRMLSFINNIRICTPYDIDGPRPLNADEIKKIESCFYRKSKANFDFEDIAKAIAGKGKYMTSGENTGKPYVFNYRMTQGVSGCPTIAQLRSIFGENWMEGIAETYTQNTRKDGTPKTLEEMADDIWNVLFFFDSESKLKEFATDKLQLDDKRATEFSKIHLNRDYASLSLKAVRNILPFLRMGMLYSHAVFMGNIPQIVGKDIWNDNTHRQHILDEVARLTNIPADKEQGQRQTTEFCIKDFLMQEYGVTKEKLENLYHPSMIETYPDPRPNKDGVILLGSPRTNAVRNPMAMRSLHQLRKIINSLILEGLIDHSTIVHIEYARELNNANQRAAINQWQRDLEKKHKQYTEEIRKLGIEPTKTDILKYQLWEEQKHICLYTGNEIGVMDFLGASPAYDIEHTIPQSAGGDSTQENMTLCDSKFNRDVKKAQIPSQLTNHEDILERIKEWKEKADDLSKQIDKLSHGRSSDKVSNDKRIQKKNRLKIERDYWRGKYHRFVMTEVPEGFARRQGAGIGLVSKYAGLYLKSYFKSIDNPERRQIYSIKGATTAEFRKMWGIQDMYEKKSRDSHTHHCIDAIVIACIGKREYDAMGQYYHQQEDFRYGRADKPHFPKPWASFTEDLKAISEEQIVVHDTPDNMPKKASRKVEVKGHGKVVAKGDSARSSLHNDTYYGAIERDGEVRYVVRRALASFEKMSEIENIVDEAVREKVREAVDGKDFKKAIAEPIYMNKEKGILINKVRCFVPSVKSPLNIRYQRDQSTKEYKQQFHVANDSNYCMAIYEGEVKGKKKRGFKIVNMLEASAHFKWSNENRHTNIVEAENSANLPWKQTIKIGTNVLLYESSITELYEANSKELSRRLYKVIGLSSMLVTGCMYGRIFLRHSAESRAAKDVKVQNGTFHQNEELRSAIMLLHTQFNALIEGQDFELTPLGEIKFKK

SEQ ID NO: 3868 - protein, 1237 aa, unidentified
  REGION 1..1237: note = Description of Unknown: Cas Enzyme sequence
LSDCRFEDSLPVIKENGDLLRKQNGEIQTRSKKPCPLSHPEFELFRAYQFINNITYGKNNKLSREQRAIVLDLINKNDKNFDFSKIPDVLKLNYEKFNFDDKQKVAGNPTIKALKPLFENEIWEEHFEEIWHCFYFYDDDIKLYEKLKKDFKFKKDIEAVKKVRLKEGYGNVSLKAIRNILPFLQKGYQYDRAVILGGVKNAFGKRWEHFSEFHDNIEKEIVDILKEDNKDGEAIEKIKEHLASPVFDYGFEKDDAHFFHLYHHSQEVEKRENLLPEIPEVENLRNPIVQQGLNETRRLVNFLLRKYRKIYGSDFHFDRINVEMGRDLRNNKDGRKEMSFRISENEKKNDEARDRLAEYGLQPSRDNVQKYLMYKEIEDRVSGPVLCPYTGKVISLTDLLGRDNAIQIEHIIPFSISLDDSFGNKTLCEANFNREKGEKTPHQFYLSNPDYRLWGIRQYKNPEDGWNDIVERAFRILPYRKAKKFTAKREFEKSDFIQRQLNDSRYIAKKSVELLSNICHDVRVMPGQLTAELRHLWGLNNILQPVQNLDSHSFDVDGENSILHYVVTNESGEVVSIHRKQNERPDTVSNEILVTGNINKKKFSSKYFKIDMETPELPDGKYWAKLNVSEPLQMVPKFIEKPQADEKSIVIKGSVEKGYFKNDTYGRMKADVDDGSYWAKFEVLKVKFESPQKDKQPKTNRNQVLLFGTVNNGEFKCFIYQCETNLRDGKYWIILDLNPDNVEFIRSVNPRPEINDNELLLTATVDETGILTTDLDKEFQVQTSKVSGKYYVVLEILSEKPELYRVENEPPVLEKGQQLVEGNIWVDKYTGEIKFDPKKNRDDHRHHAIDAITIALTEQGYLQRLSTYNAQRKEKQRQKLDSTEKFPEPWEGFQADAKKAVAQILVSHKKNSKTLTKNKKGFSVRGQLHDQTLYGKKEYCNEEEYTARVPIKKLKFKRTKGQATYIDDIIDAGIKNAIYNTIKEKLQNDIDKKIIGEIIARNSRIESISTKKEQEKEAKEINKLREKIDVKVEAILQDENFYLKNEGKRYQRLKKESSESRTPVPIKKVKVLKVLGHGSHLKELKSYSPKKNKVISGNQYVNPGSNHHILIYYDEKGKLSQRAVQFWTVVERKRQGEKIYQLPEDGESIVTTIEINDMFLLGLSDEMYESIKYDKVLLSQYLYRVQKISDMYYNFRFHLASTLDKKEEEIYVQSMSAWEKLNPIKVKIDPLGNLEKN

SEQ ID NO: 3869 - protein, 1503 aa, unidentified
  REGION 1..1503: note = Description of Unknown: Cas Enzyme sequence
MANILGLDLGSASIGWAIINADIDSNNIVSSYDSIVDAGVRIFPEGLEPGTKGTGDGEQSLNAARREFRQTRRGYYRKRIRKYHLLKLLIKHNMCPLSEKELNKWYYWDRNKKTEGQIFPCADEFIKWLQKNPYELRARALEGNVNKMELGRILYHLIHRRGFLSSRKAADEGALYKGGKGILGINSTKDAMGDKALGKYLYELLPAEGKPFRNIRDEKGNPVKARGRYTLREMYIAEFNEIWEKNASKFGLSKEKVTKQSIKILKGDSDSKRNNQYINKLIEKYGNENVKIDNHKVIIQQQMPLKKSLGGDIWIEGDTLRYKSKNSILFWQRPLRSQKHTLSKCRFEKNKHTCPLSHPDYEEFRALQFINNIKYGKGKILNHEQRSIVLNLINKKDRSFDFAEIPKKLQLTYETFNYNDKTKVQGNITTKYLNILFDKSIMEENKQDIWHCFHFYHDNELLFNKLKKDYNIKLNTPDELSKYILKDGYSAVSYKAMHNILPFLRKGYRYDIAVILGGIKNSFGDRWDYFNNFHEDIEQYVLNLLKKTNTEGEVIKQISEYLTKPEYSFGFNKNSKELQKLYHHSQEVILKKTSSKLSPVEDLRNPLVQQGINELRRLVNSLIDKYGKFHIVKVELGRDLKSSKDQRYEQTFRVRDNESKNEEARKLLTEYGLSHSRENIRKVLLYNELNEKSGKATCPYTNKTINISSVLGGQNAFQIEHIIPYSVSLDDSFANITLCDSTFNRLKGEKTPYQFYLQESNPELWGGANSWDEVEFRAFRLLPYQKARRYTSRKKEYLTQDFIQRQLNDSRYFSKKAKEILSEITDEIIVMPGNLTSELRHLWGLNNILQPVNLINIENIEADPDRRIPYYVVMDKSLNPVRVEKVKCNKPSIDENQTTIAGYIDKTGNFISSVIKIDNYVSDYKEGRYWIVLDLVDNPLILPVFDEQPESDENHIVIKSNFVKGNFRSETIKGLSRDVPDGRCWAKFPIDQVKFIPAGEGNKPSEKAGRIILFGNISNGIFNSFIFKYRINEADGQYWCIIETDPVKAELTRVKLPKPEPGNNQIVVEGIINESGIFESEIDCEHRFDTNKKAGRYYAVFDIRNIAGIPFPQFNEVPETNKGEKLIEGNIWVDKFSGEIKFDPKKNRDDNRHHAIDAVAIAVTERRFLNEMSRYHANLKKKDRGLDYDQQFRFDLPWNTFTDDVVGIAENILVSHKKRNSTAVHVSKIIGKNGKNYRSEGWSSRGLLHKQFVYGRRTHPDDNEIHFHIRKGLEEIRNNKHVEKIADRAIRNLIKKHLRDEYNIDSGKSYNVPADAFFRDGKPRIFLPNKRGEPVPVRKVRIMEEIGNAVQLKQNLNKYVNPRNNHHVMIYEDNNGNLREEVVTLWEAVNRKVNAMPVYKLPQDGKKIVTTLEINDMFLIGMDESSVAKIDWNDNKTGSLISPFLYRVQKVSSMYYTFRHHLASTINNPDEEVRIVSFKAWERLNPMKLKVDITGKPYLFQDA

SEQ ID NO: 3870 - protein, 1219 aa, unidentified
  REGION 1..1219: note = Description of Unknown: Cas Enzyme sequence
MKERILGLDTGTNSVGWAVVDYNPEVPTDKYTLVDAGVNIFQEGVKIEKGTIEYSRAAERTGYRRQRIGYWRRKVRKIKLLKILIKHGLCPFVSDDALKNWRTKKEYPLSDEFVDWQRTDEAMNKNPYYYRNLCLSEKLDMDDVGNRYIVGRAIYHINQRRGFLSNRKEEAKESDGKVAKSISDINDEMETGGYEYLGQYFYSLYQRGERIRAKYTDRLEHYEKELLAICEKQGLGEELAKVLRKTIITQRPLKSQKHTVGRCVFEPNKTRCPISHPMYEQYRMYAFVNNIKIQTPIDSGSRHLTREEKDLIIPLFLRKSKKDFGFDEIAKKLSGTKNNFCYYKDKSEQPYRFNYHMDTRVSGCPVIAQLSDVFECKASDDSWLEAACEVYVMGGGKTRFQIMNDIWHALFFFEDKEHLFSFAKEKLQLDDEHAKMFSNIKVPSDYASLSLAAIRKILPYMKHYGLIYSHAVFLANMYKVVPCAIDKEALLPMLPKEDAEDIVEAFDEYDSQKSEIRTREEYVKRYVACKYQLDEEQERRLKVLYHPSQIDLFPKVRKPTEDGYFQLGSPRTSSVRNPMAMHSLFRMRHVINTLLKEGKINEFTSVRIELARELNDSNRRAAIRQWQNDNEKKNVENAKHIKEHFGESYVPTSVDLLKYKLWEEQNHLCLYTGEEICLEDLFDKNKYDIEHTIPRSVGGDSTAMNLTVCQSRFNREVKKTCLPSELENYEAILERVEHWKKKYEQVDKQLRKLNTRGVADKELKDRIIQKRHKLALERDYLQGKYSRFIMKEVPEGFSRRQSADAGLISKYARLYLKSLFRNVSIVKGLATSDFRKIWELQDKDEQKRRENHCHHAIDAVTIACIGRAEYDQLAQYYHDEERHRWGMNSCKGMFPKPWQTFTEDVKSLADRILVSHYTADNMSKKTKKHIRKNGKIMPQFMQGDTARGPLHLDTFYGAIERDGEIKYVVRKSLDKVLPKDEEKFINKIVDEKVKEKVKSAKDEYGSLKKAVAAGIWMNRDKGIKINKVRIYCEDVKHTIEIRTHRDISHKKYKQHVNVKNEVNYMMAIYVGKDKRGEEKSSFELVNNYDAVTYHNSGLKAQGIRLFQESKNGYPLKWRLKKGTMVLLYEETPEEIYELDKAALTKRLYKVTKIGKDGKITLVHHQEARPAKDVKPKNGDYKCNEEYRARIVLLHTQFKALVQNQDFTINEIGEIKFLHR

SEQ ID NO: 3871 - protein, 1548 aa, unidentified
  REGION 1..1548: note = Description of Unknown: Cas Enzyme sequence
MGVNRLNLKYLAMGKILGLDLGTNSIGWAIVDTEDNKIENCGVRIFPEGVVKETIGTGDREQTKNATRREKRQSRRQYFRKRLRKAKLLKILIEQKMCPLTYEEVKKWERTEIFPSSNDFTEWLKLNPYELRAKALKEDVSLMELGRIFYHFIQRRGFLSSRKNKEEGKIFEGKENMVGIDDTKQQIKGTTLGNYLHSILPEQNTTYYPIKDANGNEMRARARYTLREMYVGEFEMIWANQAERLGLDLLRVENKRVRFLKGDLDNIRNAKRINYLTQKYGKNNVVIEKINREDADLYRVVTKELVPLKEAIAGDIVIDDDNQINFKSNESILFWQRPLRSQKSLLSKCTFEGKKFFDKKTGKWIEVGPTPVPVSHPDFELFRAYQFVNTIEYGTKQKLTDEQREQVVAYMKTMKDSFNFSKIREILSLTYEQFNYQDDAKVVGCPTIAQISKLFKADVWHSNYVDIWHSFLFYEDSDKLLSHLIQKYGLKEVDYEKIAGKTNEETGKRTPGIRLKEDYASVSLKAIRNILPFLKKGRVYSDAVILGGVRNAFGVIDCGNGKMCSRYEEYFKEYHEEIERNIIHIVRDKTNKEGDAIDKIKLYLSNPDNNLGFSENDKAFRKLYHHSQEIEKKKIVNQISPVENLRNPIVQQGVNETRRLVNRLIKTYGKFDQIKVELARDLKHGKKVRQEVGRKISDNLKSNQAARQVLTEYGLAHSRDNIQKYLLWMELQSKNGKPLCPYTGKIISVDDVLGGENRIQIEHIIPKSVSLDDSFANKTLCDSTFNREKGELTPRQFYVKNSDSKLWGTNSWEEVEQRAFKLLPYAKAKRFTTKKEDWDSGEFIERQLNDTRYISKKTAEILSEVCDSVRVMPGSLTSELRHLWGLNNILEPVRNLGKKEYDVDENRSIPYYAVANESNEIEALYKKFNDKPITNDDETTVAGFISKEGVFASKYLKLKVDNLDLPNGKYWAVMKLSKNPVFTKIFIEKPETEETELVLRGKIDKNRFLNDTIKKRLPVNLDNGSYWAKFNVLNINFEEPEKGKQPQNKKGIVLFGEVKSGVFKSYIYECKTNMVDGKYWALIDLDIEKVEYFSAIGQPVEPSGQQISIEGTIDQDGVFVSELDPDFSIQTNKTEGKYWALFDIQGEPNEFTIVENPAPELEQGQQLIEGSVWVDKLTGEIKFDPKKNREDHRHHAIDAIAIALTEQPYLQQLSKYNADREDRKRGIESQKPQFDEPWSNFYHDAKEAVSKILISHKQNTKSVTNISKTILKNGETIRSKGQAVRGQLHLDTVYGKRKAPNNDKYYYHIRKPLSTLTEAMIPKIVDPNIRRIVCDRLLQLGLEIDSKKEQPITNTKEKKNIFTKAFSEPLFLNNSNGAPVPIKKVRIKYSFGGAQSLKSKLNINQHVDLQNNHHVLIYKDEEGNLNEQVVSLWEVVERRKQGQNVFQLPPVERGKPAPVEIVETLQINDMFILGLTDEEFGDNLNNLTFLSKHLYRVQKLSSSFYTFRYHLASTVNNNEEEFRIQSFGAWSRANPIKVKVNMLGQIKE

SEQ ID NO: 3872 - protein, 1318 aa, unidentified
  REGION 1..1318: note = Description of Unknown: Cas Enzyme sequence
MMIKLNNMKKILGLDLGTNSIGWAVVETEDNKKFELLDKGVRIFQEGVKIEKGIESSKAAERTGYRSARRIKFRRRLRKIETLKVLIENNMCPLSMDELIVWKENKNNYPKNKIFYNWLKTKDPKEGTNGTYINPYYFRTEAIKRKLENTNDVGRALYHLAQRRGFKSNRLESTDEKSRGIVKTEINKLSSELNGRYLGEYFYELYLKGEKIRKRHISREEHYLNEFKKICEVQNFNKELAEKLERAIFYQRPLKSQKGLVGKCTLQNNKHRCPISRPEFEEFRMWQFINSIKYKNSDGKFDFLNKEQRENIIPAFVSNKNATFEFSKIEKILNKGVHIYQFNYKSNHTIGSNQTMINFMDVFDIDRKLTNAWLLCVNKIYELYTAKTKKDGSLKSKSEVITDVWHVLFTFDNEENLKEFARNKLLLDESSAQKFSKINLKQDYSQLSLKAINKILPYLQEGLIYSYAVFIANIENVIGKSIWNIKENQQIIRTSIKKIIDNHKTELDINTITNSLINDFKVNYNNAHKEYKVDDIDLKNIREKIIKYYGNKTWNCLPEDEKLYVKEKVEKLYEKQLKSGKRGIFIEKIRLDDRIENFLKDNFDSSELNLKKLYHPSDVSVYKSVKITDLGLRLLGSPMIPSIKNPMAMRAMHQLRKLINHLIIEGVIDDSTIINVEMSRELNDANMRKAIERYQRQRATENEEFKTKIKELYKKECGTDFEPNNDDIMKYRLWEEQNHKCLYTGKSIGICDFIGSNPAFEIEHTIPRSLSYDNSLENKTLCEKEFNQQVKKNRIPFELSNYKEIISRINNWEIKAEELFKQIQKVKIQSRMAATKEIKDNAIQRKHLLQMEFNYWNGKLSRFTREDVPEGFKNSQLVDIGIITKYARAYLKTVFNNVNTVKGSTVAEFRNIWGLQEYFEKKDRSNHIHHCIDAITIACLTKDKYDFLAHLYHLDEQNNRDAVHRAMIKSKPWENFVQDVKEIENQILVSHYTPDNLPKQSKKILRKRGKIQKNENGDLIYEKGDAVRGSLHKESFYGAIKREIINKKGETEEKVLYVKRKPLEFSDLGFKTISELENIVDDAVRDKVLNAVKDKGLKQALNEPIWMNEEKQIPIKKVRCYTPSVTNPINLKKHRDKSKHEYKQSYHVTNDGNYLMVIYEGKDSQEKVKRDYEIVSNLQAGEYFKQSVHGVLKAQGINNLEGLIPKFKESGKNILPLKYILKTGTMVIFWENYPEEIWDIDKNQLYKRLFKVTQFESDGRIQARFHQIAKPDNELTKVSELDFSNIAEKIRLSKGNLNMLVNGYDFKINVLGHIEKLS

SEQ ID NO: 3873 - protein, 1527 aa, unidentified
  REGION 1..1527: note = Description of Unknown: Cas Enzyme sequence
MKILGLDLGTNSIGWAVVDTFNKEILDTGVRIFPAGIEPDTIGQGDKEKSRNATRREKRQIRRQYFRKRLRKIKLLELLIDQGMCPLSREELNKWKNWDRTKKNEGRLFPQTEEFLKWIMMNPYILRERAINEQISLLELGRIFYHFIHRRGFLSSRKSKEESTIFTKGKPEENILPINETKERTKGTTLGAYLNSISYKVKEPYKTITDESGREIRVRGRYTLRDMYIAEFELIWNKQSEYYDLNDRFVISKKTRVLHGSLSNKRNQHKINYLRENFGHDNIEIIEGDTVYQKKVISYSTNSLKEKLGGEIKLSNDDDGNIVVDHKSKESVLFWQRPLRSQKQLIANCRFEDNLPVISSNGGFLLDNDGKAVRRSKKPCPVSHPEFELFRAYQFINNIKYGKNIRLSEIQRQKVLDQVNSQDGGFEFKKIAQGLNLSYEKFNYDDDFKVVGNATIKKLKGLFSEEVWKYKYDEIWHCFYFFDDDEKLFLKLKQDYGYAGDIEKIKKIKLKDGYASVSLKAIRNIMPFLMKGYQYDRAVILGGIRNAFGKRWEYFKDQHNDIEKDVVNILSEDNKEGEAIEKIKDKLAAPIFGYGFSQDDPRFSQLYHHSQEIEKTDDLLFQIPEIENLRNPIVQQALNETRRLVNLLLEKYREKYGSDFHFDRINVEMGRELRNNKSARQEMSIKIRENENKNEEARQRLAEFGLQPSRDNVHKYLMYKEIESRASGPVVCPYTGKVINTSNLLGSENAIQIEHIIPYSISLDDSFGNKTLCEANFNRMKGEKTPYQFYCENPDPILWGIDKYPNQEDGWEAISQRAFRLLPYNKAKRFSSSKRDFKNDDFIERQLNDTRYIAKKAKEVLSNICYDVRVMPGQLTAELRHLWGLNNVLQPLQTIDLKDIQINEDESVPCYLVTDEFGNTVSLKRRQNLKPKTGDSEILISGQIENQQFHSARFTINFEAPGLQNGWYWAKIGISNVGKPMPMYVDKPIVNEDFIVFKGYVTKGYFNNDTLGKRKTDIQDGRYWAKVKISAVRFEEPVKGKEPTVNRNQVLLYGIVEEGYFNSYIYKCEANLPDGKYWLILTIDADNIEFIKAVNPKPATSLNEFVITATIDDSSKFVADNDKDFQTETNEKSGKYYAVLTINSAPIDLFNIENKPDDIQKGQTLIEGNIWVDKYTGEIKFDPKKNRDDHRHHAVDAIAIALTEQGYLQRLSTYNAQRKGKQREKQYSTEKFPEPWPGFDQDVRKAVNSILISHNKSNKVLTKNRKGFSVRGQLHKEFVFGKRQAPQQEEGYHRRIKITELENNKHVGKVVDLTIRALILKHLEENCQVNVSNPKGFNIPKDAFVKDGQWRLFLSNKHGEPVPVKKIRIKEYLGKAAKLKSGINQWVNPRNNHHVLIYTDLNGDLKEDVVQFWTVAERILQGVEIYQLPEDGKEIVTTLEINDMFLLGLSDEDIKSHKDDLSFLSKHLYRVQKFTSGDYYFRFHTASTIANDSERIYIKNFSDGLTGWKRFNPKKAYLDIDGKISVT

SEQ ID NO: 3874 - protein, 1518 aa, unidentified
  REGION 1..1518: note = Description of Unknown: Cas Enzyme sequence
MKILGLDLGTNSIGWAVVEKDEGRILDVGVRIFPEGVVKETIGTGDKEQSKNATRRDKRQMRRHFYRKRLRKIKLLEILISLQMCPLNLEELMKWKNWDKARKTDGIKFPDTDEFREWLKMNPYFLREKALHEEITLQEFGRVLYHMIQRRGFLSSRKSKEDSTIFTKGKPDENILPINETKEKIGDKTLGSYLYSISRKTGVPYRKLTDETDKEIRLRGRYTTREMYIAEFDKIWRRQAVHLELDNRMIEIKKTREIRGTLEGNRNRTKINALIKKYGADNIAIEKTDNKNVTKITSKQIKPLKEALGGIIEVKTDENGRDTIDFSSHESILFWQRPLRSQKKLIANCRFEDELPVIDSKGRFVTNKNGGIQHRSKKPCPLSHPEFELFRAHQFINNIRFGRNIKLTDNQRQAVLELINRNDSNFDFKKIPDALNLTYEKFNFEDKQKVPGNTTIKQLRALFEDTIWEEHYDTIWHCFYFYDDNVKLFKKMKRDFGFNGDMEAIKKVKLKDGYSNVSLKAIRNILPFLEKGYHYDKAVILGGVRNAFGNKWDDLIGLHEEIIEDVISILKEDNEEGVAIEKIKDYLSSPLFGFGFSKNDPRFTRLYHHSQSIEQNKLLEDSIPELENLRNPIVQQALYEMRRLVNTLLVKYRKQFGNKFHFDRINVEMGRELRNNKTQRQELSWRISENEKKNDEARARLAEFGLQPSRENIHKYLMFREIEERVSGPVQCPYTGRIIKISDLFGRDNSIQIEHIIPYSTSLDDSFGNKTLCEANFNREKGEKTPFEYYSANPDPKLWGINSYSKAEDGWNEIADRAFRLLPYNKAKKFTSKKTFQKADFIERQLNDTRYISRKAVELLSHICYDVRVMPGQLTAELRHLWGLNNIIQPVRNLEVKDFNFNEDYAVPCYLLTDDNGEIVSIHPKLNDMPPVGNEEILIPFSVDNKKPYSKYYTFSIEVPLLEDGKYWARLRVTEPIRLIPQFIDRPALNERVIVLKGRIEKGVFIHDNIGRIKTSLEDGRYWAKFRVTDKKFEQPSSDKPPKSSRSQILLFGTVEANVFMSYIYECKANVPDGKYWIFLDCNLDDIEFIRAENERPELNDQQIYITGTVDDDGFFSSEATPFQRKIQEKPGKYYAILSVSSENPEIFRIENEPPKAEKGLSLVEGNIWVDKYTGEIKFDPKKNREDHRHHAIDAIAIALTEQGYLQRLSTYNAQLKDKQRGKLDSTEKYPEPWVGFDSDVKKAIDGILVSHKKSNKTLTKNRKGFSVRGQLHKESIFGKHHDLNENEGYHIRVKITELETNKHVEKIVDIAIKERIKHFLQDEYGIDIQDPKGYKIPKDAFITDGEWRLFLPNKRGEPVPIKKVRIKENLGKAAQLKSDLNQWVNPRNNHHVLIYKDYDGNLKEDVVQFWTVVERILQGGSIYQLPEDGKEIITTLEINEMFLLGLSDSDYESNKYNFSFLRKNLYRVQKISDGDYSFRLHTASAINNPEEEVRIKSMKAWLVFNPIKLKINVLGDY

SEQ ID NO: 3875 - protein, 1332 aa, unidentified
  REGION 1..1332: note = Description of Unknown: Cas Enzyme sequence
MKILGLDLGTNSIGWAVVEKDFDEFHLIDKGVRIFQEGVKIEKGIEGSKAAERTSFRSARRLKFRRKLRKINTLKVLIKFGYCPFLSLEELDKWRYEKIYPDNLEFRNWWLTDENSNKTPYYFRYLAVNQKMDLSIQDHRFMLGRAFYHMAQRRGFLSNRLEGTKESDGAVKQGISQINEEKGSKTLGHYFYEKYLNGEKIRDTYTHRNEHYLEEFNAISDFQGLPEDLRRELQRAIFFQRPLKSQKGIVGKCVFEKSKSRCPVSRPEFEEFRMLCFINNIKIKSPDDEKLRFLTEIERNKIFPLFYRKSKDHFDFEDIAKALAPKNQYSYYKSSGKKETDWLLNYNMKTSVSACPVSARFKVLFGDDFYNFSVPYKREKDGHLSSIDLNDVWHVLFCFDSDSKLEAFARIRLGFSEEQVQEFLKIKMKKDYAALSLKAINNILPFLKQGLIYSHSVFLANMNKIIPEEVWALESNRKLIKGEVFNIISSQNTEKQIIDIVNGYIQNCRRELSTWSKEAEALFQKDLTSIIKDYYGPRTYEGFSEEKKIEIEGKAFNLFMNQMPKNFGRGDFAQIPTIDERVKNFLHDNFDVTDDDLEKLYHPSSIEVYKPPVRGKDGHLYLGSPMVSSIRNPMAMRSLHQLRKVINELIRVGKIDQNTRIHIELARDLMNANERKALQSWQRDRERLRDEYSKKIKNDCGFGDDYVPSQEEILKYQLWEEQNHKCIYTGNEISLCEFLGPNPSYDVEHTIPRSLSFDNSQENKTLCDNKFNRSVKRNKIPAELTNHDDILQRIDHWREKYEDLTNLIQVATRQARAAVDKESKDRAIQKRHKLTFEMNYWRNKYNRFVMKDVPAGFKNSQLVDTGIITKYARLYLNTYFDRVLTVKGSTVADFRTIWGLQEEYEKKERVNHIHHCVDAITMACMTKENYELLAKFYHDWEETEYAGYDKKPKIVKPWPTFAEDLKEIENEVLISHYTPDVLPKKAKKKLKIRGKIKRNEKGEPVYLQGDSVRGSLHKETNYGAIKRSVIDKEGNTTEKIVFVSRKPLDSLTPADINNIVDENVRTIVAEGKAKEEPLKKELDKWTRLEKEEDDPIRKTQFSEKVSELKLQLESLFRIENKNGSFTPIKKVRCVATTVTNPLDIKRHRDVSKHDYKHYSHFANDSNYVMGIYEGLDNKEKIKRDFLLVNNLDAAKYYNGKSEEDLLPEIHPKSDLLLKYLLKIGSMVILWETSAKEVWDLNISEVTRRMYKVIGMSLNTIRQGEKKWLFGNIVLRHITEARPATDLRTQDGLFRSNEDYIPQRKLSHNQFNALVEGFDFYLSPIGELKKIEK

SEQ ID NO: 3876 - protein, 518 aa, unidentified
  REGION 1..518: note = Description of Unknown: Cas Enzyme sequence
MTKVLGLDLGTNSIGWAVVDKEGEKILDAGVRIFPEGVEPTTIGKGDNEQSKNATRREKRQLRRHFYRKRLRKIKLLEVLIGQKMCPLRIEDLRKWKNWNSKEKAEGRRFPSTIEFDRWIQMNPYELRDKALREQVTLFEFGRIMYHLIQRRGFLSSRKGEQDPKTLFEKGKPDENILPVNETKEKIGNTSLGSYLNSIAYKENTPYKTRTDVKGNEIRVRGRYTVRKMYVEEFMKIWDKQNEYYDLDVIKLKTRKIRELRGSLNGARNRNKLEYLVSKYGEENVIIEQKSNNITQVITISEILLKKYLGGEIYYVENEEGEKKLKFRSNESVLFWQRPLKSQKSLLTDCRFESNLPVIMSNGEIRKDKEGKFVLRSKKPCPISHPEFELFRAYQFVNNIRFGRNTNLTNEQKDTVLDLINSKDASFYFSDIRKKLELTYEKFNYDDKFKVVGNPTIKKLSSLFDKKIWEENYQDIWHCFYFYDDNQKLFEKLKKDYDYSKGIDLLVKVKLKDGYSNV

SEQ ID NO: 3877 - protein, 988 aa, unidentified
  REGION 1..988: note = Description of Unknown: Cas Enzyme sequence
LKKGYQYDKAVILGGVKNAFGKRWEYFKDSHYKIENEIISILYEDNAEGDAICKIKEHLSSPVFNYGFSKDDNWFAHLYHHSQEIEKASKFSDKLPIPENLRNPIVQQGINEMRRLVNSLMEKYQNQYGDDFRFDAIKVEMGRDLRNSKSARQELTFRIRDNESKNEEARARLAEYGLQQSRSNIHKYLMWKEIEEKAGAAKCPYTGKTISISDLLGTDNSVQIEHIIPYSVSLDDGFGNKTICESHFNNLKGELTPYQFYQKRSDKDLWGVNSWDAVVERAFQILPYNKAKRFTSKKDFEKSSFIERQLNDSRYIAKKSIELLSNICENVRVMPGQLTAELRHLWGINNVLQKPVVGINDHVLKLAKEETVKCYLVVDEENNVIDFVKKQNDRPNTKEGEILIPVSVNKNKLISNLFSFDIDVDDLQDGKYWIKVNLSDDFTVIPKHIDKANVDDDRIVFRGKIEKQVFKNDTSGNVNKTGKEDGVYWANFGIKDKKFVDLKTNKERPKTKSKKQIVLFGNVANDEFKCYIYNCQTNLPDGKYWLILDIDYNDVSFEKAINEKPELRNDKVCLSATVDQNSELILDVDKTYKKQVGLAPGKYYSVYQIVDYTKELCPIENQKPKVANEQKIIEGSIWVDKYTGEAKFDPKKNRDDHRHHAIDAIVIALTEQSYLQHLSTYNAKQKARQRGKIDSTEKFSLPWTGFINDVHKKADEILISYKKQNKVLTKNKKGFSVRGQLHKENVFGKRQAPNQEQGYHRRTKVTDLENNKHIAKVVDDSVRKIILDHLRYNCAVDISNPKGFKVPKDAFVKDGEWQLFLPNKRGDKVPIKKVRIKESIGNAAQLKSNINQFVNPRNNHHVVIYEDFDGNLQENVVQFWTVVERQMNGEEIYKLPHDGKNIITTLEINDMFILGLSDEEFEDNKSNYAFLSKYLYRVQKVSSMYYTFRYHLASTVTNNEQEFSIRSMKSFVEANPIKLKINEHGKLV

SEQ ID NO: 3878 - protein, 1209 aa, unidentified
  REGION 1..1209: note = Description of Unknown: Cas Enzyme sequence
MKKRILGLDTGTNSLGWAVVERDDDNMLSLIDRGSLIFQEGVKIEKGIDSSKAAERTEHRASRKHYFRRRLRKIELLKVLVKYGWCPYVSAEELHLWHTKKQYPKNDEFMLWQRTNDNLEQNPYYYRHVCLHDELELSNPSEAFILGRALYHLVQRRGFLSNRLDQTEDEESGKVKTAISDLSKEMQEAGCEHLGDYFYKLYSEEGNKVRIRTRYTDREQHYKAEFYAICKCQKLSEEQISELERALYFQRPLKSQRQGVGKCTFEPSKPRCADSHPAFERFRLLSFLNNVKVQGPHDIELRSLNADEREKALPLFFRKSKSNFDFEDIAKTIAGKGRYQYIKDEGDKGYKFNYRMSQGVTGCPTIAQLKAIFGEDYANGIAEVYTRGEGKTVEQMVEDVWNVLYSFPDKENVKQWAKDNLQLDDDQAEKFSKIRLTRNFASLSLSAIKKILPWLERGLIYSHAVTMAKVPNIVGKAVWQEYGNTITTELIELIENFNPKDEAMQGTLDFCVKDYLRNNFDLAPGVAEKLYHPSMIETYPDAKKNEHGVYQLGSPRTNSVRNPMAMRSLHELRKVVNQLLRNGTIDENTEVHIEYARELNDANRRKAIAQWNRDREKKRAKYKDDIVKLYKEQTGKTITPTEDDILRFELWEEQKHICLYTGKQIGIADFVGENPSFDIEHSIPRSVGGDSTMENLTLCSSRFNREVKKAKIPTELSNYDEIMPRLDEWKKQIETLRKDIDKVRTHSGMAKEVKDRIIQKRHLLRIQLEYLQGKYKRFTMTEVPEGFARRQGAGIGLVGKYAGLYLKSLFHKKEDRAKSNVRVIKGATTAEFRKMWGIQNEYEKKSRDNHIHHCIDAIVIACIEPGQSNETARYYQQLEEYERHEGNKPSFKKPWPTFTEDINALAQEIIVVHDTPDNMPKHARKRVLTANGKVLAKGDSARGSLHNDTFYGAIERDGEVKYVVRKMLSVLKETDVENIVDEVVKQKIKDAIKTKGFKEAMAGDIYMNEARGVKIKKVRCYAPTVVTPLHIRQQRDLSKKEYKQQYNVTLDGNYCMAIYEGIVKGKMKRTYEIVNMIDASNYYKESSGLTKLYPIAPEEKNGMKYRCKITTGTQIILLQSDDEEINLENSRELSARMYYVAIMKKNGQILLRHNQEARAATVIKNEARAGAYKKTDNYRSQIMMTLSDFHALVEGVDFEINVLGEIKRK

SEQ ID NO: 3879 - protein, 1210 aa, unidentified
  REGION 1..1210: note = Description of Unknown: Cas Enzyme sequence
MDKRILGIDTGTNSLGWAVVDKNGNGTYSLIKKGSLIFQEGVKIEKGIESSKAADRTSHRALRKQYFRRRLRKIEVLKVLIEFGWCPYLAPEALHLWHVKKTYPMDEAFIAWQRTNDNYDENPYYYRHICLHEQLDLSETADRYILGRAMYHLAQRRGFLSNRLEQGDDDETGKVKEGISSLSKCMTEAGCDYLGDYFYKIYKEKGNTERIRTRYTDREEHYKKEFYAICKQQNLSAEQISKLEKALYFQRPLKSQRQGVGKCTFEPKKARVADSHPAFELFRMLSFVNNIKVKGPHDVELRPLTTEEFEEARPMFFRKSKSQFDFEDIAKAIAGKGKYQHINDAGDKPYKFNYRMTQSVTGCPTIASLISVFGNDYESAIAERYTLSDGKTPTQMVNDVWNVLYSFSDKDKLKQWGAEKLQMSEEEAEKFSKIRLTHNFASLSLAAVNKILPWLEQGLIYPHAVLMAKVPDIVGKNVWKSRGESITTELLSLISNFNPKDIAMTGTLDFCIKDILRDICELEPGAVEKLYHPSMIETYPDAKKNSQGIYQLGSPKTNAVRNPMAMRSLHQLRKVINMLLREGTIDSQTEVHIEYARELNDANKRKAIAQWNKDRENLRKKYAEEIRTLYKQECGKSIEPTEDDIVKYQLWEEQGHICLYTGESIGIADFVGSNPSYDIEHTVPRSVGGDSTLENMTLCSSKFNRDIKKAKLPTQLPNHDDIMGRLEKWREKIEKLRKDADRVKTHSGMDKAVKDRLIQKRHQLRLELDYWVGKYKRFQMKEVPEGFARRQGAGIGLVGKYAGLYLKSLFHKADDRNKSNVRVVKGATTAEYRKMWGIQDEYEKKSRDNHVHHCIDAITIACIEPGEYNATARYYQQLEEYERTKAAKPSFPKPWPTFTEDVKAIAQEILVVHSTPDNMPKQARKYVQTANGRKMAKGDSARGSLHNDTYYGAIERDGEIKYVVRKGLSSLKESDVENIVDEVVKEKVKQAIAEKGFKEAMAGDIFMNKEKGILIKKVRCFTPTVTNPLHIRTHRDMSKKEYKRQFHVTPDGNYCMAIYEGIIKGKMKRTYEIVNMIDAATYFKKSSDLAKQYPIAPESKNGLKLRCTLHTGSQVILLQSDSEEIDLKDLENVTKRLYYVAVMRSDGRIVLRHNQDARDATTLKKERKSGAYKVGEQYRAEIMLSLSDFHALIEGIDFNINALGEVTMLK

SEQ ID NO: 3880 - protein, 1219 aa, unidentified
  REGION 1..1219: note = Description of Unknown: Cas Enzyme sequence
  MOD_RES 1167..1169: note = Any amino acid
MIKTETDNDMEKILGLDLGTNSIGWAIVSRNDDNTYSLLDKGVHIFQEGVAREKGVEKPSVQDRTAARASRRHYFRRRLRKIELLKVLRDNDLCPYLSDEELNSWRKDKVYPLNDEFIRWQRTDDNLGKNPYFDRYVCVTRKLNLNLRQDRYVLGRAFYHLNQRRGFLSNRKDAAGSADGNVKAGISELSKEIKAAGCEYLGEYFYHMYGKGRIRTRYTARNEHYHSEFQAICRKQDLREDIVLRLERAIFYQRSLKSQRGNVGRCTFEKSKRRCPLSHPRYEESRMLQYINSIKLNYLDEGFRQLTDGEISLILPLFYRKSKPDFDFEDLAKKIAGKGNYSYKDDTKDVAYKFNYKMASNVSGCPVTAAILSALGITDYVNWENELCSLYVKGAGKSSDEILNDIWHALFNFDDECRLRHWLQCALQIDESDASQLANTKIPMGYASLSLNAINKIIPWLKRGYLYSDAVFYANLSAVLPKGISGARLKEIEENVRIVLDEVNSNSQGRETKKIKEVSDYLLSLGEDIRIEKIYHPSMIDVYQKAMPDSNGEYRLGSPRTNAFKNPMAMRALFRLRALVNALLAEGKVTPETKIHIEFARELNDSNRRKAIAEYQRELDRQRKEDCCRIKEDYLHEYGKEIEPTESDLIKFRMYEEQNHKCLYTGKTIGLSQFVGFATEFDIEHTLPRSRGGDDSLMNKTLCDGHYNRFVKKTKLPSELAEYKEILQRVEPWKEKIDSLEKLIYGLRRRKCTAMTKSDKDQIITRLHLLTMQRDYWKGKYERFLMTAVPDGFSNRQGVDIGVIGKYAKLYLQTVFNRTFVVKGATTAAFRKYWGLQSEYARKSRSNHSHHCIDAVTIACIGKNEYDEWKHYVEQEDKYEFGLVPHKPSFVKPWPTFTEDVLGIPDSLLITHYSADNMAKASRRKLRVRGVIQYDEAGKAKYCQGDTARKLLHKDTFYGAVEHEGDIRYVVRKSLDSIENKDVRNIVDEVVREKVEAAIKEYGSLKEAVANGIWMNEEKGVPIKKVRIYVPSVTNPIAIKLHRDVSQKDYKRSLYVANDTNYCMAVYGDRKPSFTLVNSLSAVINFNERGDLGNWVPMSDTNDYPLRFVLKVGTMVLFYEKSPEEFVNCSREELSKRLYKVVGLSSMTIQKKYTYGVVSFKHHQEAXXXIVAKKGAWKNGDEYRPLISLLHTQLSLLVEGVDFDVSITGEITFRPRPQW

SEQ ID NO: 3881 - protein, 1209 aa, unidentified
  REGION 1..1209: note = Description of Unknown: Cas Enzyme sequence
MNKRILGIDTGTNSLGWAVVDKKGDGNYTLVCKGSLIFQEGVKVEKGIESSKAADRTSHRALRKQYFRRRLRKIEVLKALIGFDWCPYLTPEALHNWHVKKTYPLDEAFIAWQRTNDNLDENPYYYRHLCLHERLDLSKQADRYILGRAMYHLAQRRGFLSNRLEQGSDDETGKVKEAISSLSKSMAEAGCEYLGDYFYKIYKEKGNTERIRTQYTDREEHYKKEFYAICKRQALSDDQISILEKALYFQRPLKSQRQGVGKCTFEPTRPRVADSHPAFEMFRMLSFVNNIKVKGPHDVELRPLSPEEYEKAKPMFFRKSKPQFDFEDIAKAIAGKDKYQYIKEVGDKEYKFNYRLSQSVTGCPTIASLMSIFGDDYVSAIAERYILSGNKSPEQMLNDVWNVLYSFSDKDKVKQWGEEKLQLNNEEAEKFSKIKLTHSFASLSLSAVNKILPWLEQGLIYPHAVLMAKVPDIVGEEVWRNREESITKELLSLIANFNPKDVSMQGTLDLCIKDILKDMCDLQPGAVEKLYHPSMIETYPDAKKNAQGIYQLGSPRTNAIRNPMAMRSLHQLRKVINTLLRDGTIDSQTEVHIEYARELNDANKRKAIAQWNKDRENKHKKYADDIRTLYKQKCGKDIEPTEDDILKFQLWEEQNHICLYTGNSIGITDFVGPKPNYDIEHTIPRSVGGDSTLENMTLCSSRFNREVKMTKLPSQLSNHEEIMLRLEEWRKKIEKIRKDVDRVKTHSGMDKAVKDRQIQKRHLLKLELDYWVGKYKRFQMEEVPEGFALRQGAGIGLVGKYAGLYLKSLFHKADDRTKSNVRVIKGATTAEYRKMWGIQDEYEKKSRDNHVHHCIDAITIACIEPGEYNATARYYQQLEEYERNRANKPSFPKPWATFTEDIKAIAQEMLVVHSTPDNMPKRARKYVKTSNGKKLAMGDSARGSLHNDMYYGAIERDGQIKYVIRKELRSIKETDIDNIVDDIVKEKVKQAIAEKGFKKAMEEDIFMNEEKGIKIKKVRCFTPSVTNPLHIRIHRDESRKEYKRQFHVTLDGNYCMAIYEGEIKGKMKRTYEIVNMIDAASYFKKSTDLTKRYPIAPESKNGLKFRCTVRTGTQIILLQSDDEEVNLANKEDVAKRFYFVAVMQRDGRIVLRYNQDARDATTLKKERKSGAYKVGEPYRSEIMLSLSDFHALVEGVDFKINVLGEIEML

SEQ ID NO: 3882 - protein, 1216 aa, unidentified
  REGION 1..1216: note = Description of Unknown: Cas Enzyme sequence
  MOD_RES 159..164: note = Any amino acid
MKERILGIDTGTNSIGWSIVEYDNEAFENKYTLVDKGVNIFQEGVKIEKGIESSKAAEKTAHKHQRVGYWRRKIRKIKLLKLLIENNLCPPLLLEDLKKWRSKKEYPLDENFMEWQRTDDNDNKNPYYYRNLCLSEKLDLSDITNRYKVGRAIYHLNQXXXXXXKEEAKASEGVVKDDINSLTKSIQDNGMEYLGQYFYKLYQNHEKIRSKYTSRIEHYEKELLAICKKQGLSDELTEDIRKTILSQRPLKSQKQNIGKCVFEPSKPRCATSHPLYEQYRMYAFINNIKMQTPNDNTLRSLTEDEKKHIIPLFLRKSKDFKFEVIAKKLSGTKKNFCYYKDKAENAYRFNYQMDTLVSGCPVISQLSEVFEVKDDIDGWLGAACEVYTLATGKNRYEIMNDIWHVLFFFDDENKLKTFAMDKLQMDEVHASMFSKIHLPSDYASLSLKAIRKILPYMKQYGMIYSHAVFMANLSSVIKFEADNESLLPMLPREDAEDIVKAFYEYDPSMSAIKTQEEYVRRYVAYKYNLDEKSERNLRKLYHPSMIETFPKVRKRTEKGYYQLASPRSNSMRNPMAMHALFRLRHVVNTLLREGKIDEDTTIRIEFARELNDFNKRSAIRRWQNGLEKSKKEAILRIKEHFGDDYNPTDTDLLKYKLWDEQGHICIYTGRKIGLGELFNPNEFDIEHTIPRSVGGDSTDMNLTVCDSRYNREVKKTHIPSELSNHESILERIDDWRKKVEKLDRDIRKQNTRGISDKETKDSIIQKKHCLILERDYWKGKYNRFIMTEVPEGFSRRQGVDISVISKYARLYLKSLFRNVHIVKGIVTSDFRKIWGLQEEYEKKERINHCHHAIDAITISCIGKAEYDKLAQYYHDEELYNWSMDSRRAVFQKPWNTFTEDLKHIEETLLVSHYTSDNINKKTCKRIRKNGKITGGYMRGDTARVSLHQDTYYGAIERNCEVRYVVRKPVGDVDPKNIVDDVVRDKVMSAISEHGSLKKAVEAGIWMNKDKGIKINKVRVFANQIKRPLEIRKQRDVSVKEYRRYFHVANDSNYIMGIYVGTDKKGKEKRTFELVNSLDAVRFYNSGVLKQGIGLLPNMDSNGYVLKWKLKIGTMVLLYENTPDEIYDLDIKMLTRRLYKITGMSSMVVSGCSYGTLALVYHQEARPSTEFSSKNGVYKSDEELRSGITLLHTQFKGLVQGQDFEINDIGEIIFLNK

SEQ ID NO: 3883 - protein, 1223 aa, unidentified
  REGION 1..1223: note = Description of Unknown: Cas Enzyme sequence
MKERILGIDTGTNSIGWSIVECNDEISENKYTLIDKGVNIFQEGVKIEKGKESSKASERTMHKHQRVGYWRRKIRKIKLLKILIRNQLCPSLSVVELKQWRSLKKYPLNEDFMAWQRTDDNIGDNPYYFRYLCLTEKLDLTNLKNRYIVGRAIYHLNQRRGFLSNRKENARENDGKVKQGIETLAQSMKDCETEYLGEYFNLLYQKGEKIRSHYTSRVDCERELLAICKKQGLSEELTQELRHTIITQRPLKSQKHVVGRCVYEPSKPRCPMSHPLYEQYRMYAFINNIKMQGPGDHILRPLTEVEKQVIIPLFLRKSKKEFKFEDIAKKLSGGKKVFCYYKDKTECAYRFNYYMDTLVSGCSVIAQLSEVFDVKGNVDDWLERACEVYTHGDGKNRYEIMNDIWHVLFFFDSEDKLKEFALEKLQMDEAHAILFSKIHLPSDYASLSLKAIRKILPYMKEYGMIYSHAVFLANLPSVIPCKVDKEALLPMLLREEADDIVRAFYEYDPSMSAIRTQEEYVKRYIAYKYNLDEKDERKLKNLYHPSMIETFPKVRQQTAEGYYQLGSPRTNSMRNPMAMHSLFRLRHVINALLKEGKIDEYTTIRIEFARELNDANKRAAIRQWQNENNKKNTEATERIKEHLGKDYVPSSTDILKYQLWEEQNHLCLYTGETINLADLFDSNKYDIEHTIPRSVGGDSTAMNLTVCNSRYNRKVKLAQIPTQLSCHEQILERIASWKETIEKLGKEIRKINTRGVSGKEVKDRMIQKRYRLMLERDYWKGKYDRFVMTEVPEGFSRRQGVDISVISKYARLYLKSLFHNVYIVKGIVTSDFRKIWGIQDEYEKKQRVNHCHHAIDAVTIACIGKTEYDKLAQYYHDEERWEWGLDSRRAEFPKPWKTFTEDMKRLDETLLVSHYTTDNMNKQTRKKVRKNGKFMGQYMQGDTARGSLHEDTYYGAIERNGTIKYVVRKPLSQLDEKDVKNIVDDVVRKKVEEAIKEHGTLKNALDFDIWMNQEKCIKINKVRIYAAQNKRIFKVRQQRDLSPKEYKRPFYAANDSNYAMGIYVGKDKNGQEKRDFEVVSCLEAAEYYSSGVSVQNIDLLPLESRKGYLLKWKLKAGTMVLLYDDVETLNDIYDLDIRELCKRLYKITGISKTVDDGYICGMLSLVFHQEARPIKEAAFRKGAFKCGEPTRPRIVLRHTQFKALVQGYDFEIDDLGKIKFKNR

SEQ ID NO: 3884 - protein, 1219 aa, unidentified
  REGION 1..1219: note = Description of Unknown: Cas Enzyme sequence
MSKVLGLDLGTNSLGWAIVEQTGEGYELVDKGVDIFQEGVAREKNNEKPAVQDRTDARALRRRYFRRRLRKIELLKVLVRYDLCPHLSEEQLAEWRKRKIYPLDEEFLRWQRTDDNTDRNPYRDRYRSLTEELDLDNRNDRYTLGRAFYHLAQRRGFISNRKDAGKEGEDGQVKSGIETLTSDMTHAGCRYLGEYFYRLYQRNEKIRKKYTSRNEHYLAEFRAICEKQRLPEEWRKALYRAIFFQRPLKSQRGSVGRCTFEKTKSRCPVSHPHFEEFRMYCFINNIRIATPADLTFRPLIPAEIEAIRPLFLRKSKPHFDFEEIAKKIAGKGRYSCKGDRDEAPYRFNFARTATVTGCPVTTALISVFGEDWLSEICSRYTLGTGKNEKQITNDVWHALFSFDDEDRLRSWACEKLRLTEEQAAAFAAIRMPQEYAALSLNAIDKMLPYLRAGYRYDEAVFLANLKAALPDSVYSDEARRREIERGIADLLLAYVRNPYDQYDSKERRISEYFRDNGLDTARLHRLYHPSMIETYRDAQPDERGILQLGSPRTSSVRNPMAMRALFRLRALVNKLLRDGKIDRTTKIHIEFARGLNNANKRKAIEQYQREREAEHRNFAEEIRKQYLAETGSEVEPTEDEILKYRLWEEQKHLCPYTGNQIRISDFIGGSTRYDIEHTVPRSRGGDNSQMNKTLCENRFNREVKKTKLPSELSEYAEISEHIERFGWREKVESLQKMIEMQVRKSKGAATKSEKDKAIQQRHYLQMQLDYWRGKLDRFTMTEVPEGFSNRQGVDIGIIGRYARLYLKTVFDRIYTVKGETTAEFRKMWGLQEEYEKKERVNHVHHCIDAITIACIGRNEYDRWAEYAGAEERYRRGEGTRPRFEKPWPTFTEDLKTMAEALLVAHHTPDNMAKQSRKRLRIRGKVRVGYNGKAIYMQGDTARGALHMQTFYGAIRRGDEIKYVVRKSLDQLQLSDIEKIVDEAVKERVREAIAAVGFKTAMNPEAYTIWMNEEKHVPIRKVRIFTPNVTQPIPLKKQRDLSVKKYKQDYHVMNDSNYCMAIYEGTDRNGKTKRSFKIVSNLEAAQHFKASVDKTVHPDLVPLSDTNGFPLKFILKTGTMVLFYENSADELFECTQAELAKRLYKITGFSTLTVANNSYGRISLKYHQEARPAKDLKAKSGVWKMGEEYRPIVSILHTQLHAYVEGYDFELTVTGELKFK

SEQ ID NO: 3885 - protein, 1228 aa, unidentified
  REGION 1..1228: note = Description of Unknown: Cas Enzyme sequence
MKKRILGIDTGTNSLGWAVVDRLDNGQYELIRKGSLIFQEGVKVEKGIESSKAAERTTHRALRKQYFRRKLRKIEILKVLVQYQLCPPLTKQQLHDWHINKKYPVTEAFMKWQRTNDNLEHNPYYYRHRCLTETLNLEHLDDRYALGRAMYHLAQRRGFLSNRLENEENEESGKVKGGINQLSQEMAEAGCDYLGEYFYRLYSEQGNKVRIRTRYTDREEHYKKEFLAICDKQNLPAPMCKALEKAIYYQRPLKSQKQGVGRCTFEPQRPRCADSHPAYEEFRMWSMINNIKIKGPNDEHLRSLSEKEVESILKLFYRRSKPNFDFEDIAKELVGKGKYQYIKDAGDKPYKFNFRMSQSVAGCPTCASFRNIWGDDYPQSIAESYTRMEKKDGSIKTLDEVVDDVWNALFFLETQEKVKTFALQNLQLEEEQAEKFAKIRLTHSYASLSLCAVRKILPYLKRGVKYSHAVFMANVPTIIGQKVWNNGQEYIERTLLQSMCDIDADLRNNGKIKGAQQTIESMIVDYLSNNFDLKPGALDRLYHPSMIDVYPDAKTNKDGIYQLGSPRTDAIRNPMAMRSLHQLRKVINQLLKEQVIDPQTEVHIEYARELNDANQRKAISNWNNTRCKNREKYRAEIKRLYLEATKQEIEPTEDELIKYELWEEQNHKCLYTDDNIGIVDFIGKNPKYDIEHTIPQSVGGDSSMMNLTLCQNKFNRDIKKAQLPSQLANHAAILARIEKWEKKVYALRKELDGIRTHSGMEKSVKDKLIQKRNLKRIEYDYWKGKVDRFHMTQVPAGFALRQGAGIGLVSKYAGLYLRSLFHKPEDRTLSNVRVIKGLTTAEFRRMWGIQDEYEKKCRDNHVHHCIDAITIACIDKAAYDRTAQYYHDKEAFRWGYGQKPTFPKPWKTFTEDIKRLSEEILVAHDTPDNMAKKAKRRDVATPTGHYMSQGDCARGSLHNDTYYGAIERDGEIKYVVRKFLTSFEKESELDNIVDDEVRKKIKQAVSEMGFKQAMEGPLYMNKEKGILIRKVRCYANAVKNPLDIRKHRDCSEKEYKEQYHVMNDSNYALGIYEGLIKGKMKRDFELCNMLSAANLMRRGKEQDQYQKLFPSRKNELELSMVFKIGTRVILYENHPDEIDIHNTLDINKRLYKVTGLSISRVDVYSYGMITLRHCQEARIAKELSEKKGVYRKDENFRPIIVMNHNQIKALVEGIDFEMNVLGEIKMLE

SEQ ID NO: 3886 - protein, 1217 aa, unidentified
  REGION 1..1217: note = Description of Unknown: Cas Enzyme sequence
MKRILGIDTGTNSLGWAVVERNDNNTYRLIRKGSLIFQEGVKIEKGIESSKAADRTSHRALRKHYFRRRLRKIEVLRVLVKLGWCPKLTDEQLHLWHTKKQYPNSEAFMAWQRTNENLEQNPYYYRHVCLHDKLDLNNEAEAYILGRALYHLAQRRGFLSNRLDASEEDENGTVKTEINKLSQEIEDSGCQYLGDYFYKLYSENGNNVRIRNRYTDREAHYKKEFYAICKTQELSEQQIKALEKALYFQRPLKSQRQGVGKCTFEKGRQRCADSHPEYELFRMLTFLNNVKVKGPHDIEFRPLNNDEYEKALPMFYRKSKANFDFEDIAKAIAGKGNYQYFKDEGEKPYNFNYRMSQGVSGCPTTSRLREIFGEDYAQGIAEVYSKGAGKTPEQMVNDVWNVLYSFSDKNKLMQWGIENLQLNKEQAEKFSKIKLTHNFASLSLCAISKIIPWLEQGLSYSHAVSMAKIPDIVGKAIWEEHKDSITKELIDLITNFDPKDESMQGTLDYCIKDYLKNNFELKAGATDKLYHPSMIETYPDAKPNANGIYQLGSPRTNAVRNPMAMRSLHQLRKVINELLKEGTIDQNTEVHIEYARQLNDANKRWAIGDWNKSQEKKKKEASDAIKKLYKEATGKDIEPTQDDITKYLLWEEQKHLCIYTNESIGITDFIGSNPSFDIEHTIPRSMGGESVMSNLTLCASWYNRDVKKAKMPSQLNKKVYEAILERISHWKEEIERLRKEKDKLRTHSGMAKDVKNRLIRKRHLKDIELKYWQDKYNCFLLKEAPEGFARRQGAGIGLVGKYAGLYLKTIFHKKDDRTKTNVRTIKGSTTAEFRKMWGIQDEFEKKSRDNHIHHCIDAIVIACIDTGSYNEVARYYQQLEEYERTKDNKPSFPKPWTTFTEDILALKDEMLVVHSTQDNMPKHAKKRVRIAGKKLIAKGDAARGALHNDTYYGAIERDGEIKYVVRRALSSFEKESDLENIVDDAVKDIIKKAVAEKGFKKALSEDIFMNESKGIKIKKVRCYAKSVKKPLNIRKQRDISNKEYKRQYHVQNESNYLLAIYEGEIKGKVKRGYELVKNIEAAEFYKASTSKGDYPSIVPEKDEKGLPLKHLLTIGKHVLLYESSASEIDFKDIHDLSKRLYKITGLSYLPVGKGFGNIVMRHHQEARASSEIKIKNGAYKNNEEYRPSILMLHTQFHALVEGEDFIITPLGDIKPIH

SEQ ID NO: 3887 - protein, 1221 aa, unidentified
  REGION 1..1221: note = Description of Unknown: Cas Enzyme sequence
MTTRILGLDTGTNSLAWAVVERDEKGNYTLVKRGDVIFTEGVKIEKGIESSKAAERTGHKSLRVHYFRRRLRKIETLKTLVRLGLCPHLSDEQLRLWKTKKTYPLTADLMLWQHSGSAEENNPYYCRYVCLTQKLDLTDQRQRFLLGRAFYHLAQRRGFLSNRLDTSAESDETGKVKSGISQLSDEIANAGCEYLGEYFYLLYKQHGNNIRLRNRYTDREEHYKKEFLAICEKQQLDAAWVDALQRALYFQRPLKSQRRGVGKCTFEPKKPRCAESHPANEAFRMLCFLNNIKIQTPHDATLRPLNEEEREKIWSLFFRKSKPNFDFEDIAKALAGKNNYAYYKDNNGKPYKFNYRMQQGVSGCPVTAQLMDVFGHDWQAGIAETYTAVAKKDSKKTLDEMGDDVWNVLYSFSSKDKLKAFAIEKLQLDEALATKFANIKLPHAFAALSLKAIRNILPFLRQGFIYSHAVLLAKIPDVVTKAVWENDDARERILSGVMDIITNYNPKDRGLEGTIDFCIKSYLKDVVDLQPGATDKLYHPSMIETYPDAKQNKAGVYQLDSPRTNAIRNPMAMRSLHVLRKVVNKLLMDGIIDRNTEVHVEYARELNDANKRKAIADYQKNLEKKRADYRKRIIELYAEECHKAIDPTDTDILKFQLWEEQNHKCVYTDAEIGICDFLGNNPKFDIEHTIPRSVGGDSTQMNLTLCDSAFNRQVKGTKLPTALDNHADILTRIAHWKSQCEELQKQIDKIRTFAGMEKGMKDRLIQKRHRLKMELAYWQGKYERFTMTEVPEGFSRRQGAGIGLVSKYAGLYLKSLFHNVYVIKGVTTAEFRRMWGLQGEYEKKSRNNHCHHCIDAITIACIGKAEYDRMAQYYHEEEDFLWHGSTYKPQFDKPWETFTEDVLAQEHSLLVKHLANDNMPKRAKKLIHTATGKHFAQGDAARGSLHKDTYYGAIEQNGEIRYVLRKTIASFTSESELENIVDQAVKEKVMAAVAGKNFKEAIAKPIFMNEEKGIRINKVRCYANSVKKPLNIRQQRDLSGKDYKHQFHVVNDNNYLMAIYQGEVKGRIKRDFVLVNNIAAATHFKQCAREDKCGALVPQNSPKGHLPLLATLKIGTQVLLYEDAPEEINFDNQQDLVRRLYKVVGFSSMTITGNDYGVLSLRHHQDAQQAKDVKFKNGKYQQNEALRQGITLLHTQFKALVEGIDFEFNILGEIKRKTAHA

SEQ ID NO: 3888 - protein, 1210 aa, unidentified
  REGION 1..1210: note = Description of Unknown: Cas Enzyme sequence
MKRILGIDTGTNSLGWAIVDKHEDETYSLVNKGSLIFQEGVNIEKGIESSKASERTMHRASRRHYFRRRLRKIEVLKVLVKNGWCPQLTDEELNLWHTAKQYPKNDSFMLWQRTNENIDQNPYYYRHICLHERLDLENENEAFILGRALYHLAQRRGFISNRLEQSEEEESGAVKEGISLLSNDMKEAGCDFLGDYFYKLYKENGNKVRIRNRYTDREEHYLKEFHAICQCQRLTVEQVKELERALYFQRPLKSQRQNVGKCTFEPAKPRCADSHPDFEKFRMLQTLNSIKVKGVYDVELRPLNDEERQKAMPMFFRKSKSTFDFEDIAKAIAGKNKYQNIKDEGDKPYKFNYRNEQGLAGCPTIASFISVFGENYEEAISETYRLAEGKSKSDMVNDVWNVLYSFTDREHLKQWGIDYLQFGEEDAEKFSKIKLTHNFASLSLCAIRKILPWLEKGMIYSHATLLAKIPDIIGHALFEEQKDEIVGDVMALIECFDNTQGRIDSVIKEYLLNNFDLKPGTAESLYHPSMIDVYPDARFDARKNCYQLGSPQTNSVRNPMAMRSLHQLRRVINQLLRDKIIDQNTEIHIEYARELNDSNKRKAILRWNKDREKERMKYADEIKKIFGDSYVPTDRDLLKFQLWEEQNHRCLYTDEQIGITDFLGSHPKYDIEHTIPRSVGGDFLMENMTLCSSKFNRDIKKAKLPSQLANHEEIMIRLAPWKEKIEELRKKADKIRTHSGMDKDTKDRLIQKRHLLRLELDYWQGKYKRFQMTEVPQGFSLRQGAGIGLISKFAGLYLKTLFHQHDNRERSNVRVIKGAVTAEYRKMWGIQDEYEKKSRDNHVHHCIDAITIACIEPGQYNETARYYQQYEEYERNQGSKPSFRKPWPTFTEDILNLFREVIVVHNNPDNLLKSQNKTIRTSNGKFVAKGDSVRGTLHKDTIYGMIERDGEMKYVVRRPFTSFEKEFDLDSIVDDSVRQTIKNAVNLLGFKAVMEKATKGELYLNVEKGVAIKTVRCFVSGPVSGKVISVRQLRDRSRHDYKNHHYAENGDNYMLAIYEAPDGKRTFETVNIMDTAKAYKSVDNAKLLKKCTPDNSLIFILKKGMHVILVEKSKDEVDLTNISDISKRLYVISGLSTSSIVTGGRTYQYGMVSMKHSQEAKASSECKEKKGEFKMGEEYRAKIVMNHNQFKALVENVDFKIDCTGKISKL

SEQ ID NO: 3889 - protein, 1210 aa, unidentified
  REGION 1..1210: note = Description of Unknown: Cas Enzyme sequence
MKKRILGIDTGTNSLGWAVVDKNDDGEYSLIHKGSLIFQEGVKVEKGIESSKAADRTAHRSLRKQYFRRRLRKIKVLEVLVEFGWCPYLSSEALHLWHVKKTYPMDEAFMSWQRTNDNFEENPYYYRHLCLHRYLDLNEQSNRYILGRAMYHLAQRRGFLSNRLDQGNEDETGKVKEGISSLSKSMEEAGCEYLGDFFYKIYKEKGNTERIRTRYTDREEHYKKEFYAICKQQRLSEEQISKLEKALYFQRPLKSQRQGVGKCTFEPKKSRVADSHPLFELFRMLSFVNNIKVKGPHDVELRPLTTEEFEMAKPAFFRKSKPQFDFEDIAKAIAGKGKYQYIKEIGEKPYKFNYRMSQSVTGCPTIANLMSLFGDDYEEGIAERYTLSEGKTPKQMLNDVWNVLYSFSDKDKVKQWGKEKLQLSDEEAEKFSKIRLTHAFASLSLAAINKILPWLEQGLIYPHAVLMAKVPDIVGEEVWKSRSEAITKELLSLISNFNPKDIGMTGTLDFCIKDILKDMCDLAPGAVEKLYHPSMIETYPDAKKNSQGIYQLGSPRTNAIRNPMAMRSLHQLRKVINTLLQEGTIDNQTEVHIEYARELNDANKRKAIAQWNKERENKRKKYAEDIRSLYKQESGKAIEPTEDDIVKFQLWEEQNHICLYTGESIGITDFIGPNPSYDIEHTVPRSVGGDSTLENMTLCSSKFNRDVKKAKLPTELPNHDDILGRLEGWREKIEKLRKDADHVKTYSSMDKATKDRLIQKRHLIRLELDYWVGKYKRFQMEEVPEGFARRQGAGIGLVGKYAGLYLKSLFHKADDRSKSNVRVVKGATTAEYRKMWGIQDEYVKKSRDNHVHHCIDAITIACIEPGEYNSTARYYQQLEEYERNNAPKPSFPKPWPTFTEDIKAIAQEMLVVHSTPDNMPKRARKYVQTSNGRKLAMGDSARGSLHNDTYYGAIERDGEIKYVVRKTLSSLKETDIENIVDDAVKERVKNAVAEKGFKEAMAGDIFMNEMKGIKIKKVRCFTPAVTNPLHIRTHRDESRKEYKRQYHVTLDGNYCMAIYEGEVKGKLKRTYEIVNMMDAAAYYKKSAGMTSLYPIAPENKNGLRFRCVVRTGTQIILLQSDNEEINLTDKEDLAKRFYFVAVMRSDGRLVLRYNQDARDATTLKKERKSGAYKTGEQYRSEIMLSLSDFHALIEGVDFKINVLGEIVMFK

SEQ ID NO: 3890 - protein, 1216 aa, unidentified
  REGION 1..1216: note = Description of Unknown: Cas Enzyme sequence
MKRVFGIDLGTNSIGWSIVEQLENGKYRHIKSGVDIFKDGVDHDKSGEHPCVQLRTNARGLRRHYFRRRLHKIELLKILIEERMCPPLTDEDLKRWRFKKIYPKEDNFMEWQRTNDNLEKNPYHDRYVALTRKLDLSIESDRYILGRAFYHLSQRRGFLSNRKDSTKEQEGEVKAAISELSDKIKEAGCSYLCEYFYKLYQAGDKIRGHYTARNEHYLKEFQAICDKQCLGADLCKRLNNAIFYQRPLKSQKGNIGRCTFELGKQRCSTSHPAYEEYRMLCFINNIRLHRQGEDSDFRVLTKEEVDAIIPKFVCKSQFKFEKLAKVLAHKKENYGFKYDSDESTLKFNYRKETSIAGSPVTAGLKEIFGEEWKSEICSVYMKSEGKTEDRIIDDVWHVLYSFDNDENIRDWAKKNLQLDDEQAEKFAKIKIERDYASLSLNAIRKILPYLRRGLRYDEAVFCANIPAALGNVEDVDEYRKIEDDVVACVRNFKSCEVAGRKNTLEKEVAELLEEKYGVDKRHLGKIYHPSKTETYPTAQPDNNGLRLLGSPRTASVRNPMAMRALFRLRALTNELLKKGEINSETVVNIEFARGLNDANMRKAIENYQREIADRHQKYAKEIKDCYLKETGKNIEPTENEILKYQLWEEQNHQCLYTGKMISVADFIGANPKFDIEHTLPRAAGGDDSQVNKTLCDSRFNREVKKAHLPSELANHAEILLKAKNLWQKKIYELTKQIEGTKGYAADKNAKDGKIQRRHLLKMKRDYYIGKLQRFEMKEVPTGFSNRQGVDIGIIGKYAKLYLHTVFDKIFVVKGATTAAFRKVWGLQSVYEKKERINHVHHCVDAITIACIGKKQYDDWKCYQEAEDMYYRGETGRPSMDKPWSTFTEDVKQLTEGLLIHHYVPDNAGKASKKKLRVRGRIQRNAEGRALYATGDCARLSLHQQTFYGAIKQDDEIRYVVRKPLDSLEKKDIEKIVDPEVRQKVKEAVDAKGMKDAVADGIWMNEEKRIPIKKVRIYTSIANPLRLKRQRDLSVHDYKRDYYVANDGNYCMGIYEGTDAKGKKKKTFKIVNNMDAANYFKARQRGEDVELLPMSDGNDFPLKCVLKTGSVVLFYQDTPKELKECSKKELAKRLYRVVGMSEMKIKQKTGKIDCYGMLSLTFHQEARPSSDLKDKNGVWRIGEDVRPKIKLTHNQTNFLVEGIDFRLTLSGDVEWLK

SEQ ID NO: 3891 - protein, 1229 aa, unidentified
  REGION 1..1229: note = Description of Unknown: Cas Enzyme sequence
MATILGLDLGTNSLGWAVVEETEHGYTLKEQGVDIFQEGVAREKNNEKPAVQDRTNARALRRQYFRRRLRKIDLLRVLVRYDLCPPLSGEQLTAWRKEKRYPLDEAFLQWQRTDDNADRNPYHDRYVALSEQLDLGNRQHRHLLGRALYHLAQRRGFISNRKEAGKEQEEGTVKSSIRSLTAEMEAAGCRYLGEYFYQLYQHKEKIRGKYTSRNEHYLAEFEAICERQQLPDEWRKALHRAIFFQRDLKSQKGAVGRCTFEPRKSRCPVSHPRFEEFRMLQFINNIRITSPQDTAPRPLTQEEVEVIRPLFYRKSKPHFEFEEIARKIAEKGKYACGEERTEAPYRFNFARTTTVSGCPVTASLIAVFGSDWLREMCSLYLLGEGKNEEQVLNDVWHALFFFKDEECLRTWALEKLQLTAEQAKAFAAIRLPQDYAALSLNAINKILPYLRLGYRYDEAVFLANLKAVLPKEVYDNEERRHEIEHDIAELLLGYKRNLYDKYDSKERRIADYFSDHGLGLSRFDRLYHPSMIETYRKAQPDAAGLLQLGSPRTPAVRNPMAMRALFRLRALVNRLLRDGKIDRNTKLRIEFARELNNANLRKAIEQYQREREAENRKFAEEIRSQYAAETGRTIDPTDDEVLKYRLWEEQQHVCPYTGRQIRISDFIGANPGFDIEHTIPRARGGDDSQMNKTLCENRYNRAVKRSRLPAELSDHAEIMACIESFGWQEKVEALQKQIDAQIRKSKAAATKAEKDSAIQRRHYLKLQQDYWRGKYDRFTMTEVPEGFSNRQGVDIGIIGRYARLYLKTVFDRIYTVKGATTSDFRKIWGLQAEYEKKARVNHVHHCIDAITIACIGHREYLAWKRYAEEAERYQLGEGDRPDIEKPWPTFTEDVKAVADELLVSHHTADNMAKQTRKKLRVRGRVRLNDAGKPIYMQGDTARALLHKDTFYGAIEREGEIRYVVRKSLGQLQPGDENKIVDEVVRERVREAIAAVGFKTAMNADEYTIWMNREKGVPIRKVRIYTPSVTQPVALKKQRDLSEKEYKQDYHVVNDGNYCMAIYEGVDKKGKKRRTFEIVSNLEAARYFKASTDRNDRPDLVPVADTNGYPLKCILKTGTMVLFYENTPAELYECSRKELAKRLYKVTGMSTLTLKRSNGKVDKYGTMTLKHHQEARPAGELKAKNGEWKQNEEYRPVISLLHTQLNAYVEGYDFELTITGEIKFKHAMPC

SEQ ID NO: 3892 - protein, 1239 aa, unidentified
  REGION 1..1239: note = Description of Unknown: Cas Enzyme sequence
MEICNILFNFTRNNFFHMAKVLGLDLGTNSLGWALADEYEQGYALLDKGVEIFQEGVARDKNNEKPAVQDRTDARALRRHYFRRRLRKIDLLRVLVRYDLCPPLTEEQLSTWRQKKQYPLDEEFLRWQRTDDNEDRNPYHDRYVALTERLDLENRAQRWLLGRAFYHLAQRRGFLSNRKEAGNEKEDGTVKESIKNLSAEMEAAGCRYLGEYFYGLYQHKERIRGKYTSRNEHYLTEFNAICDRQQLPDKWRRALHRAIFFQRDLKSQKGSVGRCTFEPTKSRCPVSHPRFEEFRMWSFINNIRVTGPGDLQPRPLSREEAEAIKPLFFRRSKNKVYFDFEEIARRIAGKGKYACREERIEAPYRFNFARTTTVSGCPVTASLMDIFGKEWLREIRSLYLLGDGKTEEQVLNDIWHALFSFKDEERLRDWACEKLQLSEEQAKAFAAIKLPQDYAAMSLNAINKILPYLRCGYRYDEAVFLANLRAALPKEVYADENRRHNIEQDIASLLLDYKRNPYDKFDSKECRIADYFSDHGLDMSRLDRLYHPSKIETYPDAKPNAEGIMQLGSPRTSAIRNPMAMRALFRLRDLINTLLREGRIDRDTKIRIEFARGLNDANRRKAIEQYQREREAENRKFAEEIRRQYTAETGREMEPSDDEVLKYRLWEEQQHICPYTGRQIRISDFIGANPGFDIEHTLPRALGGDDSQMNKTLCENRFNRETKRAKLPAELSNHAEIMERIESFGWREKVESLQKQIEAQVRRSKGAATKPEKDSAIQRRHYLQMQLDYWRGKYERFTMTEIPEGFSNRQGVDIGIIGKYARLYLKTVFDRIYTVKGSTTAAFRKMWGLQEEYIRKERVNHIHHCIDAITIACIGRREYDRWAQYAGDEERFNYGESDKPRFEKPWPTFTEDVKAVADELLVAHHTPDNMTKQTRKKLRVRGRVKLSADGKPIYQQGDTARCRLHQETFYGAIKREDEIRYVVRKSIKLLQPTDIDKIVDDAVRDRVRMAIDEVGFKTAINPDEYTIWMNREKGIPIRKVRIFTPGVTQPIALKKQRDLSDKEYKQDYHVANNGNYCMAVYEGKDKKGKLKRSFELVSNLEAAQYFKASADRETYPDMVPLADANGFPLKCILKTGTMVLFYENSPAELYECSRKELVKRLYKVTAMAAEGRVQFLFHQEARDQKTLTALYGAGTSQFCQSNPSPKLRLSVSNFNMLVEGYDFELTVTGEIKFKGDRPC

SEQ ID NO: 3893 - protein, 1213 aa, unidentified
  REGION 1..1213: note = Description of Unknown: Cas Enzyme sequence
MKKRILGLDTGTNSLGWAVVDRDENGGYSLISKGSFIFQEGVKIEKGIESSKAADRTAHRSLRKQYFRRRLRKIEVLKVLVEFDWCPYLSPEALHLWHVKKQYPMDKAFMSWQRTNDNFNENPYYYRHLCLHKQLDLSEMSDRYVLGRAMYHLAQRRGFLSNRLEQGDDDETGKVKADISSLSKSMADAGYEYLGDYFYALYNKKGNTERIRTHHTDREEHYKKEFYAICKKQNLSEEQVSRLERALYFQRPLKSQRQGVGKCTFEPKKPRVADSHPAFELFRMLSFVNNIKVKGPHDVELRPLTSREVEEAKSMFFRKTKPIFDFEDIAKAIAGKGKYQHIKEAGDKPYKFNYRMTQGVTGCPTIASLMSLFGDDYESAIAERYTLSEGKTPKQMVNDVWNVLYSFSDKDKVKQWGQEKLQMSDEDAEKFSKIRLTHSFGSLSLSAINKILPWLEQGLIYPHAVLMAKVPDIVGEAVWKTRGESITQELLALITNFNPKDVTLTGTLDFCIKDILRDLCDLKPGAAEKLYHPSMIDTYPDAKKNSQGVFQLGSPRTSAIRNPMAMRSLHQLRKVVNALLREGTIDSQTEIHIEYARELNDANKRKAIAQWNKNRENQRKKYIEEIRTQYREACGKDIVPTDDDIIKFQLWEEQDHICLYTGKQIGITEFIGTNPCYDIEHTVPRSVGGDSTLENMTLCSSKFNREVKKAKLPTQLSNYEEIMERLEEWRTKIEKLRKDVDHVKTYSSMDKAVKDRLIQKRHLLKLELDYWVGKYKRFQMEEVPEGFARRQGAGIGLVGKYAGLYLKSLFHKADDRAKSNVRVVKGATTAEYRKMWGIQDEYEKKSRDNHVHHCIDAITIACIEPGEYNATARYYQQLEEYERTRAAKPSFPKPWPTFTEDIKAIAQEMLVVHSTPDNMPKQTRKYVQTTNGNGRKLAKGDTARGSLHNDTYYGAIERDGEIRYVVRRPLSSFEKPSDIENIVDEVVKEKVKQAIADKGFKEAMAGDIYMNEEKDIKIKKVRCFTPTVTNPLHIRTHRDESRKEYKRQFHVTLDGNYCMAIYEGEVKGKVKRTYEIINMIDAASYYRDSAGVTKQYPIAPENKNGLRFRCTVRTGTQIILLQSDNEDINLKDKEDLAKRFYFVAVMKKDGRIVLRYNQDARDATTLKKERKSGAYKIGEQYRPEIMLSLSDFHALVEGVDFNINVLGEIVMLK

SEQ ID NO: 3894 - protein, 1209 aa, unidentified
  REGION 1..1209: note = Description of Unknown: Cas Enzyme sequence
MKKRILGIDTGTNSLGWAVLDKNENGNYTLINKGCLVFQEGVKVEKGIESSKAAERTLHRALRKNYFRRRLRKIEVLKVLIELDWCPYLSPEALHQWHVKKKYPVDDAFLSWQRTNDNLDVNPYYYRHICLHEQLDLNEKSDRYILGRAIYHLAQRRGFLSNRLEQGNDDETGKVKEAISSLSKSMSDEGCEYLGDFFYKLYKEKGNKVKIRTRYTDREEHYKKEFYAICSKQNIPKEQISKLEKAIYFQRPLKSQRKSVGKCTFEPKKSRISDSHPAFELFRMLSFVNSIKVKGPYDVEMRPLSTEEYEKAKSMFFRKSKSQFDFEDIAKAIAGRNKYQHIKDVGEKEYKFNYRMTQSVTGCPTIANLISIFGDDYETAIAERYILHKGKTTKQIVNDVWNVLYSFSDKEKVKLWGMDKLQMDENEAEKFSRIRLTHSFASLSLAAVNNILPWLEQGLIYPHAVLMAKVPDIVGKDIWKSRGTSIAKELLFLINNFDPKDISLTGTLDFCIKDVLKDMCELMPEAVDKLYHPSMIETYPDAKKNSQGIFQLGSPKTNSIRNPMAMRSLHQLRKVINTLLLDGTINNQTEVHIEYARELNDANKRKAISQWNKKRETLRKKYAEEIRILYKQECGKEIEPTNDDIIKYQLWEEQDHICLYTGKSIGITEFVGPNPSYDIEHTIPRSIGGDSTLENMTLCYSKFNREVKNAKLPTQLANYDDIIERLEKWRNKIETLRKDIDHVKTYSNMKKEKKDQQIQKRHFLKLELNYWIGKYKRFQMEDVPEGFARRQGVGIGLVGKYAGLYLKSLFHKTDDRNKSNVRVVKGATTAEYRKMWGIQDEYEKKSRDNHVHHCIDAITIACIEPGEYNETARYYQQLEEYERNKAPKPSFPKPWPTFTEDIKAIAHEMMVVHSTPDNMPKRARKYIKTVKGKKLAKGDSARGSLHNDSYYGAIERDGDIKYVIRKMLSKITENDIENIVDQTVKEIVKQAIAEKGFKEAMSGDIFMNKEKGIKIKKIRCFVPSVTKPLHIRTHRDLSQKEYKQQFHVTSDGNYCMAIYEGEVKGKVKRTYEIVNMIDAANYFKKSSDLTKQYPIAPENKNGFKYRCTVRTGTHIILLQSDNEEINLANKNDLTRRLYFVAVMQKDGRLVLRFNQEAREAKILKKERKSGAYKVGEQYRSEIMLSLSDFHALIEGVDFKINALGEIVML

SEQ ID NO: 3895 - protein, 1230 aa, unidentified
  REGION 1..1230: note = Description of Unknown: Cas Enzyme sequence
MKKRVLGLDTGTNSLGWAVVDKFEDNSYKLIRKGVLLFQEGVKIEKGIESSKASERTGHRSLRKQYFRRRLRKIEVLKVLVEHQLCPYISSEALHEWHVHKVYPMVDDFMLWQRTNENEEKNPYYYRHICLTTRLDMDSISDRYILGRAMYHLAQRRGFLSNRLDNSQDNKESGKVKTAITELSKEMESMGCKYLGEYFYQLYSKKGNTVRIRTRYTDRELHYKKEFDAICEKQGIGDELKEALEKALYFQRPLKSQRQGVGKCTFEPQKPRCAESHPSYEEFSMLSFINNIKVKGPNDIDLRPLSAKEIENIIPLFYRKSLINSSHFDFEDIAKSIAGRKNYSYIKDKDDKPYKFNFRMSQGVAGCPFTSQMRSIFGADWKTAIAESYTMMEKKNGVKTIDEAVNDIWNVLYSFSSETKLREFAINKLQLDEEKAEQFSKVKMNSGFVALSLKAIHKILPFLREGYIYSHAVSLANIPSIVSKEIWDNEKKRAFILRNLNELIVNFNPKDKSLQGTLDFCIKDFLRNNFELRAGATDKLYHPSMIETYQDAKTDKNGIFQLGSPRVNAIRNPMAMRSLHELRKVINQLLREQVIDNTTEVHIEYARELNDANKRKAIADYQKNLDNRRKQYREEIVKFYKENGISLEPTEEDILKFQLWEEQDHICLYTGDQIGISDFLGKNPLYDIEHTIPRSVGGDSTRENLTLCQRRFNRDVKKAQIPSQLTNYEDILVRIAGWKEKVEKLSKDIDKIHTFSGMAKGPKDGLIQKRHRLTLERDYWRGKYSRFTMTEVPEGFSRRQGASIGLVSKYAGLYLKSLFHDPKDRNKSNVFVVKGVTTAEFRRMWGLQSEYEKKSRDNHVHHCIDAITIACIGKYDANLMSRYYHDVEAYEAGFGKKPQFPKPWPTFTEDVLAIQNELLVVNDMPDNMPKKAKKRIKLENPHRIVTAQGDSARGCLHNDTYYGAIERDGEIRYVVRRPLSSFEKLSDLESIVDETVKQTIKDAVNGKNFKEAIAEGIYMNKEKGIRINKVRCFADSVKNPIKIRKHRDLSKKEYKQQYNVMNDSNYLMAIYEGEEKGKLKRKFEIVQMIDSALYFKESSDKDLYSQIVPKSKNDYPLRFVLKKGTNVLLYERVPEEIDFSNIKDLKRRLYFVTGLSISTIQGTYVYGMVTLKHHQEARASKELKATKGEYKNSDQYRPVIIESHQQFLGLVEGYDFEIDKLGGIKPIKHD

SEQ ID NO: 3896 - protein, 1230 aa, unidentified
  REGION 1..1230: note = Description of Unknown: Cas Enzyme sequence
MKKRILGLDTGTNSLGWAVVDKNDDHSYELVRRGVLLFQEGVKNEKGIESSKASERTGHRSLRKQYFRRRLRKIEVLKVLVKYHLCPYLSDEALHEWHIHKIYPKKDDFMLWQRTSDNEDKNPYYYRHLCLSKTLDLNAVEDRYILGRALYHLAQRRGFLSNRLDKSADDKESGKVKESISSLSEDMRKLGCEFLGEYFYRLYSEQGNKVRIRNCYTDREEHYKKEFYAICQRQQLDKPIVEALERALYFQRPLQSQRQGVGMCSFEPQKPRCAVSHPDFEEFRMLTFINNIKVKGPHDFDLRPLCAEERLRIRPLFFRKSLIKTNSFDFEDIAKAIAGRNNYSYFKDNDAKSYKFNYRMSQGVSGCPFTSQLRDIFGGDVWKDALAESYTQMTTKDGLKSVDDAVNDIWNVLYSFSSKECLKAFAKEKLQLDDDHAQKFSEIKVGSGFASLSLKAIRKMLPFLREGYIYSHAVLLANIPTIVGKHIWADEQHRQFILQNVNGLLENNNSLDKGMQGTLDYCIKDFLQNYYDLKPGAADRLYHPSMIETYQHAKPNSEGILQLGSPRTNAVRNPMAMRSLHEIRKVVNQLLREGVIDNNTEVHIEYARELNDANKRKAIADYQKTLDNQRKKYQGEIQKFFAEQGLAKEPTERDILKFQLWEEQDRICPYTGRQIGISDFLGSNPQFDIEHTIPRSAGGDSTRENMTLCDSRFNREVKKTLLPSQLSEYADILVRIQGWKEKVENLSKSIDKTRTFSGMEKDMKDRLLQKRHRLMMERDYWKNKYERFTMTEVPDGFSRRQGSGIGLISKYAGLYLKSLFHNPLNPNERKIFVIKGKTTSEFRQMWGLQSEYEKKCRDNHVHHCIDAITIACIDKYDASLMSRYYHQLEDYEQGYGTKPQFPKPWPTFTEDVLGIQNELLVVNDAPDNMPKKAKRNHVKTPRGVFMAQGDSARGSLHNDTYYGAIERDGKIRYVVRRPLSSFEKESDLEDIVDEAVKQKIKDAIAGRSFKEVIDEGVFMNEAKRIKINKVRCFADSVKNPIHIRHHRDVSKKEYKQQFHVANDTNYLMAIYEGEEKGKTKRDFELVKTIEAAEFYRQSTDKFAFPLIVPEKSIKHDYPLLCTLHVGQHVLLYEKYPHEITIGDKSDLKKRLYKISGLSVMVMEKSNYGVIKLRYHQEARPSKDIKSKNGAYKAGEETRPAITLLHTQFKALVEGRDFDIDVLGEIHFKIS

SEQ ID NO: 3897 - protein, 1232 aa, unidentified
  REGION 1..1232: note = Description of Unknown: Cas Enzyme sequence
MQKYFHKFADKAKKPMEKVLGIDLGTNSVGWAVIEREGDVRRLVDKGVSIFQEGVARDQGVEKPAVQQRTEARALRRTYRRRRKRKIDLLRVLVRHELCPPLTDEQLDRWQSHKKYPLDDAFIAWQRTDETSDKNPYRDRYRALTERLDMSVEADRYALGRAFYHMAQRRGFLSNRKDETEKSEGDVKQGIASLTEAMRDAGCEYLGEYFYRLYRDGGKIRGAYTSRNEHYKAEFDAVCRRQELTPKLTEALRKAVFHQRPLKSQKGSVGKCTFERSKSRCPLSHPRYEEFRMLSFLNNIRITTPHDDTTPRRLVAEERAAIMPLFMRKSKPMFDFEDIAKRIAGRKSAYAYDGDASEAPYRFNYRMSDSVAGCPMTTALKEIFGEDYIATICSLYTLADGKSPERIVDDVWHALFWFDDEDKLKQWAADRLRLSDDDAARFAAISTKQGYASLSLNAIDKILPYLRNGYRYDEAVFCANLKAALPTDARNDESLRREIVGDVAAIVADFRPNPYMKGDTKESRIDEYLRRRGIEADMRRLYHPSKTETYPDAEPNAEGMRLLGSPRTSSVRNPMAMRALFRLRTLINRLLNDGRIDPSTKINIEFARGLNDANKRKAIERYQRERENERNKFADEIRNLYGRPIDPSENDILKYRLWEEQNHVCLYTGRQIGITDFIGSDTTCDIEHTVPRSRGGDDSLQNKTLCDNRYNRDVKRGKLPSELPDRDAIMARIETLGWVQRIEDLRRQIERAARNSKSAATKEDKDNAIQRRHKLRMELDYRVGKYERFTMSEAPDGFSNRQGVDIGIISRYARLYLKTVFDRVYTVKGATTAEFRKMWGLQEEYAKKERTNHVHHCIDAITIACIGRKEYDLWAQYAAEEEYYRYSKGRKPVFEKPWPTFTEDVKAATDELLVAHHTPDNMPKRTRKRLRKRGKVQHNAAGKIKYATGDSARGSLHKDTFYGAIERDGVIKYVVRKRVADLGPKDVEKIVDEAVRQKIRDAIDKLGFKEAVAGTIYMNEEKRIPINRVRIFVPSVTSPIELKEHRDLSAKEYKRHYHVVNDGNYCMAIYEGADKKGKPKRSFEIVNNLEAAEYFKRGADRTSRPDLVPQSDANGYPLKCILKTGTMVLFYENTPAELYDCSTKELGARLYKLTKFSSMTNKNNSYGTLTFRHHREACPAKDLKAKNGEWKTDEEYRPLIAIYHTQLNAFVEGYDFELTVAGDIIFKRTRHD

SEQ ID NO: 3898 - protein, 1210 aa, unidentified
  REGION 1..1210: note = Description of Unknown: Cas Enzyme sequence
MKKRILGIDTGTNSLGWAVVDKNEDGSYSLINKGSLIFQEGVKVEKGIESSKAADRTSHRALRKQYFRRRLRKIEILKVLIEFDWCPFLSPEALHQWHVKKLYPKDEAFMSWQRTNDNFEENPYYYRHICLHRKLDLNERSERYVLGRAIYHLAQRRGFLSNRLEQGNEDETGKVKEAISSLSKNMSDTGCEYLGDYFYKIYKEKGNTERIRTHYTDREEHYKKEFYAICECQDLTEEQITKLEKALYFQRPLKSQRQGVGKCTFEPKKARVTDSHPSFELFRMLSFVNNIKIKGPHDIELRPLSQNEFEKAKPMFFRKSKSQFDFEDIAKAIAGKGKYQHIKDAGGKDYKFNYRMTQSVAGCPTIASLMSVFGDDYETAIAERYTLSEGKTPKQMVNDVWNVLYSFSDKDHVKQWGKEKLQMSDEEAEKFSKIKLTHSFASLSLAAVHKILPWLEQGLIYPHAVLMAKVPDIVGNDVWKTCGESITKELYTLITNFNPKDENMQGTLDFCIKDLLKDMCNLAPGVAEKLYHPSMIETYSDAKMNSQGVYQLGSPRTNAVRNPMAMRSLHQLRKVINTLLQEGIVDSQTEVHIEYARELNDANKRKAIAQWNKNRETLRKKYAEDIRTLYKQECGKTIEPTDDDIVKFQLWEEQNHICLYTGSSIGISDFIGHNPSYDIEHTVPRSVGGDSTLENMTLCSSKFNREVKKAKLPSQLSNHDAIMDRLEEWRVKIEKLRKDVDRVKTHSGMDKAVKDRQIQKRHLLKLELDYWAGKYKRFQMEEVPEGFARRQGAGIGLVGKYAGLYLKSLFHKADDRSKSNVRVVKGTTTAEYRKMWGIQDEYEKKSRDNHVHHCIDAITIACIEPGEYNATAKYYQQLEEYERTKAAKPSFPKPWATFTEDIKAIAQEMLVVHSTPDNMPKRARKYVQTSQGKKLAMGDSARGSLHNDTYYGAIKRDGVIKYVIRKELSSLKESDVENIVDDIVREKVKQAIADKGFKQAMGEDIFMNKEKGIKIKKVRCYAPSVTNPLHIRTHRDESQKEYKRQYHVTPDGNYCMAIYEGEIKGQIKRSYEIVNMIDAAAYFKKSSDMSGQYPIAPEIKNGLKYRCTVRTGTQIILLQSDDEEINLANKEDIARRFYYVAVMQKDGRLVLRYSQDARDATALKKERKSGAYKVGEQYRSEIMMSLSDFHALVEGVDFKINVLGEIVLLK

SEQ ID NO: 3899 - protein, 1223 aa, unidentified
  REGION 1..1223: note = Description of Unknown: Cas Enzyme sequence
MKKKILGLDTGTNSLGWAVVERDENNEYSLIDKGVVIFQEGVKIEKGIESSRASERTGHRANRKHYFRRRLRKIETLKVLVKYKLCPSLTDEQLALWHKKKIYPLDENFMQWQRTNENEEKNPYYYRHICLHEKLDLSKQTDRFILGRALYLLVQRRGFMSNRLDTTSEDETGKVKQSISDLNKEMEEAGFEFLGDFFYHLYSTEGNKVRLRSRYTDREEHYFREFNEICRVQGLDEEMIDNLRKALYFQRPLKSQRAGVGKCTFEPKKPRCAASHPDFEEFRMLSLMNAIKIQTPKDDVMRPLNEEERAEIEPLFYRVSAVNFDFEDIAKKIAGKNNYMYFKDAGDKPYKFNYKMTQGASGSTTIAQLRAIFGEDWKQGIAETYTKMECKNGSKSIDDAVNDIWNALYSFESVDKLKQFAKENLQLDDQLAEKFSKIRLTNGFASLSLKAIRKILPFLRVGMIYSEAVFFANIPTIISEELWERDKDDILANIYDSIHNSDATKPDMHVTIESIIKDHLQNNYDLKPGAADMLYHPSMIETYPDAQKVNGVYQLGSPRTNAIRNPMAMRSLHQVRKLVNALLREKIIDNTTEVHIEYSRDLNDANKRNAIAKYNKEQETKHKEYRNRIKELYKAETGKDIEPTELEIKKFQLWEEQEHRCLYTGRQIGIASFIGANPEFDIEHTIPRSVGGDSTMENLTLCENKFNREIKKAQIPTQLANHAEIMARFEGWKKQIEDLDKQLNARNLRTNSGMEKGMKDFRIQKKHLLRMKKEYLLGKYKRFTMTEVPEGFARRQGAGIGLVSKYAGLYLKSLFHKSADRAKSNVYVVKGPTTAEFRKIWGLQAEYEKKERVNHVHHCIDAITIACIGKAEYDELAWYYHDYEDYETARCNKPTFKKPWPMFTEDVKNIEKELLIVHSTPNNFGKKAKKVIKTANGKVIAKGDSVRGSLHMDTYYGAIERDGEIRYVVRKPLDATFFDSPKKLDLIVDDAVREIVKEAVAGKNFKEAISAPIYMNKEKGILIKKVRCYMNSVKNPLHIRKHRDISVKEYKQQCHVVNDSNYMMAIYEGEVKGKEKREYELVSMLDAAKYYKRSADREEIPILVPERSTNGYKLKWRLYVGSMVILYEKTPNEIDFNDMKDVSKRLYKVVGLAFHSNKRYSVIKLRFHEEARAASDVKYKDGAYKNGEPFRPAPRMLNTQFNALVEGIDFSIDELGKIKLLHR

SEQ ID NO: 3900 - protein, 1231 aa, unidentified
  REGION 1..1231: note = Description of Unknown: Cas Enzyme sequence
MITRILGLDTGTNSLAWAVVDRDANGNYTLVKRGDVIFTEGVKIEKGIESSKAAERTAHKALRVHYSRRRLHKIDTLKVLVELNLCPYLSDEQLNQWKAKKTYPLTDDFMLWQRSGSAEENNPYYCRHRCLTQKLDLTDQSQRFLLGRAFYHLAQRRGFLSNRLDTSADSDESGKVKSGIAELSVEMEKAGCEFLGEYFYQLYKQHGNTIKLRSRYTDREEHYKKEFLAICEKQELDPKWVEALQKAIYFQRPLKSQRKGVGKCTFEPKKPRCAESHPDYEAFRMLCFLNNVKIQTPNDTSLRPLNEDEREKIWPLFFRKSKPNFDFEDIAKALAGKNNYAWYKDAGEKPFKFNYRMQQGVSGCPVTAQLIDIFGSDWQTAIAETYTAVEKKNGTKTIDEMADDVWNVLYSFSSKDKLKAFATEKLQLDEASATKFANAKLPHGFASLSLKAIRNILPFLRQGFIYAHAVHLAKITDIVTKAVWNDADKREMILSGLMEIIENYNPKDRGVEGTIDFCIKSHLQDVIDLRPGAADALYHPSMIETYPDAKLNKMGVFQLGSPRTNAIRNPMAMRSLHILRSVVNQLLRDGIIDRNTEVHVEYARELNDANKRKAIADYQREQEKKRKQYRDDIIALYKSECHKEIEPTDTDILKFQLWEEQDHLCLYTGTQIGICDFLGDNPKFDIEHTVPRSVGGDSTQMNLTLCDATFNRQVKGAQLPTQLSNHADILVRIDHWKSKCEDLRKQLDKIRTYGGMEKNMKDRLIQKRHRLKMDLDYWQGKYSRFTMPEVPEGFSRRQGAGIGLVSKYAGLFLKSLFHNEQNPNKSNVYVVKGVTTAEFRRMWGLQGEYEKKSRLNHCHHCIDAITIACIGKAEYDKMAQYYHDEELFQWRGTTTKPHFNKPWPSFTEDVLAIEQSLLVKHLTKDNMPKQAKKRVRTATGKYLAQGDTARGSLHKDTYYGAIEQDGEIRYVLRKPLNKFENEAELEKIVDQAVKEKIKEAIAGKNFKTAITEPIFMNKEKGIRINKVRYYVKAQERLKIRQQRDLSSKEYKQFFYVENESNYLLAIYEGELKGKKERDFCVVNNLDSAACLKRSNKGKAAPLVPERSEERNLPLLAVLKRGTQVLFYENSPEEILFDNPQDLVRRLYKVTGINTKKDVKNGKTYLYGNIELRFHQNAQKKDDVKMQSGVYKNNEVLRQGIVLSHKQFKALVEGVDFEFNVLGEIKKKERHA

SEQ ID NO: 3901 - protein, 1229 aa, unidentified
  REGION 1..1229: note = Description of Unknown: Cas Enzyme sequence
MITRVLGLDTGTNSLAWAVVDRDANGNYTLVKRGDVIFTEGVKIEKGIESSKAAERTAHKALRVHYSRRRLHKIDTLKVLVELDLCPYLSNEQLNLWKAKKTYPLTDDFMLWQRSGSAEENNPYYCRHRCLTQKLDLTDQSQRFLLGRAFYHLAQRRGFLSNRLDTSADSDESGKVKSGIAQLSVEMEKAGCEFLGEYFYQLYKQHGNTIKLRSRYTDREEHYKKEFLAICEKQELDPKWVEALQRAIYFQRPLKSQRKGVGKCTFEPKKPRCAESHPDYEAFRMLCFLNNVKIQTPNDTSLRPLNEDEREKIWPLFFRKSKPNFDFEDIAKALAGKNNYAWYKDAGEKPFKFNYRMQQGVSGCPVTAQLIDIFGSDWQTAIAEAYTAVEKKNGTKTIDEMADDVWNVLYSFSSKDKLKAFATEKLQLDEASATKFANAKLPHGFASLSLKAIRNILPFLRQGFIYAHAVHLAKIPDIVTKAVWNDADKREMILSGLMEIIENYNPKDRGVEGTIDFCIKSHLQDVIDLRPGAADALYHPSMIETYPDAKLNKMGVFQLGSPRTNAIRNPMAMRSLHILRSVVNQLLRDGIIDRNTEVHVEYARELNDANKRKAIADYQREQEKKRKQYRDDIIALYKSECHKEIEPTDTDVLKFQLWEEQDHLCLYTGTQIGICDFLGDNPRFDIEHTVPRSVGGDSTQMNLTLCDATFNRQVKGAQLPSQLSNHADILVRIDHWKSKCEDLRKQLDKIRTYGGMEKNMKDRLIQKRHRLKMDLDYWQGKYSRFTMTEVPEGFSRRQGAGIGLVSKYAGLFLKSLFHNEQNPNKSNVYVVKGVTTAEFRRMWGLQGEYEKKSRLNHCHHCIDAITIACIGKAEYDKMAQYYHDEELFQWRGTTTKPHFNKPWPTFTEDVLAIEQSLLVKHLTKDNMPKQAKKRVRTATGKHLAQGDTARGSLHKDTYYGAIEQDGEIRYVLRKSLSDFNSESELENIVDQAVKEKIKEAIAGKNFKTAITEPIFMNKEKGIRINKVRCYADSVKKPLHIRQQRDLSAKEYKHQFHVVNDNNYLMAIYEGDVKGKIKRDFTLVNNITAASYFKQSCRESNGKKLVPERSLKGNLPLLATLKIGTQVLLYENSPKDIQFDNPQDLVSRLYKIVGFSSMTITGNDYGVITLRNHQNAQQAKDVKYKNGKYRENEELRQGITLLHTQFKALVEGTDFEFNIIGEIIKKGSHA

SEQ ID NO: 3902 - protein, 1223 aa, unidentified
  REGION 1..1223: note = Description of Unknown: Cas Enzyme sequence
MITRILGLDTGTNSLAWAVVDRDANGNYTLVKRGDVIFTEGVKIEKGIESSKAAERTAHKALRVHYSRRRLHKVDTLKVLVELDLCPYLSDEQLNQWKAKKTYPLTDDFMLWQHSGGAEEKNPYYCRHRCLTQKLDLTDQSQRFLLGRAFYHLAQRRGFLSNRLDTSADSDESGKVKSGIAQLSVEMEKAGCEFLGEYFYQLYKQHGNTIKLRSRYTDREEHYKKEFLAICEKQELDPKWVEALQKAIYFQRPLKSQRKGVGRCTFEPKKPRCAESHPDYEAFRMLCFLNNVKIQTPNDTSLRPLNEDEREKIWPLFFRKSKPNFDFEDIAKALAGKNNYAWYKDAGEKPFKFNYRMQQGVSGCPVTAQLIDIFGSDWQTAIAETYTAVEKKNGTKTIDEMADDVWNVLYSFSSKDKLKAFATEKLQLDEASATKFANAKLPHGFASLSLKAIRNILPFLRQGFIYAHAVHLAKIPDIVTKAVWNDADKREMILSGLMEIIENYNPKDRGVEGTIDFCIKSHLQDVIDLRPGAADALYHPSMIETYPDAKLYKMGVFQLGSPRTNAIRNPMAMRSLHILRSVVNQLLRDGIIDRNTEVHVEYARELNDANKRKAIADYQREQEKKRKQYRDDIIALYKSECHKEIEPTGTDILKFQLWEEQDHLCLYTGTQIGICDFLGDNPKFDIEHTVPRSVGGDSTQMNLTLCDATFNRQVKGAQLPTQLSNHADILVRIDHWKSKCEDLRKQLDKIRTYGGMEKNMKDRLIQKRHRLKMDLDYWQGKYSRFTMTEVPEGFSRRQGAGIGLVSKYAGLFLKSLFHNEQNPNKSNVYVVKGVTTAEFRRMWGLQGEYEKKSRLNHCHHCIDAITIACIGKAEYDKMAQYYHDEELFQWRGTTTKPHFNKPWPSFTEDVLAIEQSLLVKHLTKDNMPKQAKKRVRTATGKYLAQGDTARGSLHKDTYYGAIEQDGEIHYVLRKPLNKFENEAELEKIVDQAVKEKIKEAIAGKNFKTAITEPIFMNKEKGIRINKVRCYADSVKKPLHIRKQRDLSAKEYKHQFHVVNDNNYLLALYGKVSEAQREFVFVNNITAASFFKQSYRKKNGEMLVPITSPKDNLPLLVMLKIGIQVLLYEKSPKEIKFDNPHELVKRLYKIIGLGVDGSAIMIDLKHHQEARQAKDIKPKKGAYTENETLRPCIRLRHTQFKALVEGVDFEFNVLGEIKKKERHA

SEQ ID NO: 3903 - protein, 1216 aa, unidentified
  REGION 1..1216: note = Description of Unknown: Cas Enzyme sequence
MSTKTLGIDLGTNSIGWAIVKNNENDHELLDSGVLIFQEGVAREKGAEIPAVKTRTQARGARRHYFRRRLMKIELLKVLVKHNLCPHIPDTDLNDWRFKKKYPLIDEFIRWQRTSEENNPYHARNEAISRELDLTDSGDRYLLGRALYHLAQRRGFLSNRKDQTKESSGDVKQGIADLTKEMEENGCRYLGNYFHLLYQQGKKIRTRFSDRIAHTEKEFFAICSKQNLPQEIIEELHRAIFFQRPLKSQKGSIGKCIFESNRNRCPVSHPAFEEYRMLAFINNIRVITPDDSDFRPLSQKEKAEILPLFFRKSKDSFDFEDIAKKIAGKGNYSFRDDKRATAYKFNYRMATFVSGCPLTTGLINIFGSDWRSTVCSCYNLAKDKNESQIINDVWHSIYAFDSDEKLAKWAIDNLQLNATQAEELLKIKVPQGYASLSLKAINKILPHLRKGMRYDEAVFVANLDATLPDHIKSDGVRKENIANEIAEMIADLKNNPLQKSITKQAAVRQILEDIPGIELNKLDRIYHPSKLDVYPEAETNSDGIILLGSPRTSSIRNPMAMRALFKLRHLINRLIKEGKIDRATRINIEFARGLNDSNMRKAIERYQRENEKMHKEYADKIAKLLKETSNADIIPSETDILKYQLWEEQGHQCLYTGEQISITDFISSNPKYDIEHTIPRSIGGDDSQANKTLCSSVFNRQVKGASMPSQLSNHSIILERIDRLGWNKIINDLNNEIARIRTGNASTKDIKDAMIQKRHYLKMKLNYWKGKVERFSMTEVPEGFSNRQGVDIGIIGKYAREYLRTLFRSEERQIFTVKGMTTAEFRKMWGLQDEYSKKGRINHTHHAIDAIVIACIGRREYQLWAEYTRSMEDYGFKGGLKPHFEKPWASFTEDVKEISRQMLIVHDSYDNTLKPSKKVLRKRGKICRAANGDTIYQQGDTARASLHKQTYYGAINLNGDIKYVLRVPVDSLKEKDIDKIVDPAVKEKVMQAVQQRGFKNLFDAPIWMNEEKGIAIKKVRVFTPSITSPIHLKKHRDESKHPYKQAFHVANDSNYCMGIYEGYDHKNKRKRSFAIVNNLDAVKLHKSGADILPLSDPNDLPLKWILKVGTLVLFYENSPAEVYECSQSELARRLYVVSGLSTLPTGKGYGVINLRFHQEARPSTDSNAKNKNGTWTQGENIRPGIIVLHTQFNALVQGQDFIISESGTIKFLHPLC

SEQ ID NO: 3904 - protein, 1226 aa, unidentified
  REGION 1..1226: note = Description of Unknown: Cas Enzyme sequence
MKERILGIDTGTNSLGWAIVDYDADAVGDKYRLVDDGVNIFQEGVKIEKGIESSRAAERTDHKHQRLNYWRRKVRKIKLLKILIKHHLCPPVSDEELKRWRSEKMYPQNELFMTWQRTDDNENKNKNPYYYRYLCLTQTLDMTDITNRYIVGRAIYHINQRRGFLSNRKEDAKENEGKVKTDIDNLTKAMQDSGCEYLGQYFYQLYQKGERIRAHYTDRLLHYEQELLAICKKQGLSEELTRELRRVIITQRPLKSQKQSVGKCVFEPKKPRCPMSHPLYEQYRLYQFINNIKMQTPCDNNLRPLTEKEKNAIIPLFLRKSKPSFDFKEIAAKLSGTKNNFCYYKDNADKAYKFNYYENTNVSGCPVIAQLAEVFEAGKNVDEWLDIACEVYTQGVGKTRFQIMNDVWHALFFFEDKSKLEDFAKEKLQLDDKHAEMFATIKIPSDYASLSLKAIRKILPYMKRYGMIYSHAVFLANLPAVIDCPLDKEELLPMLPKENADDIAEAFNEYDNLKDTEIKTREEYVRRYIIKKYGLDEQDEKKLKKLYHPSMIETFPKVLRPTDEGFYQLGSPRTNSMRNPMAMHSLFRLRHVVNTLLKEGKIDEFTTIHIEFARELNDANKRAAVRQWQNEREKQNKDYAAKIKELIGGNYEPTETDILKYRLWEEQEHLCLYTGDKINATDLFDGKKYDIEHTIPRSAGGDSTDMNLTLCQSKFNREVKKTTLPAKLPNHEQIMERIENWKEKQEELAKQIRKLNTRGASDKDMKDRIIQKRHRLMLDYDYWRGKYNRFTMEKVPEGFSRRQGVDISVISKYARLFLRTVFKNVYIVKGIATSDFRKIWGLQEEYEKKQRINHCHHAIDAITIACIGKAEYDQLAQYYHDKERRNWGLDSKQAVFPKPWVTFTEDVKSIEQSLLVSHYTADNTAKHTRKRVRRNGKATGEYMQGDTARGSLHLDTYYGAIERNGEVRYVVRRPLDQLDLKAVEDIVDGAVREKIKAAIAKHGSLKKAVEAGIWMNREKGIKINKVRVYANSVKRPINIRKHRDVSSKEYKQTFHVANDLNYAMGIYVEADSQNKKAKRGFELVNLLDAVTFYNSGVKTQGIDLLPTVSKKGFPLKWRLKIGLMVLLYETSPEEINDLDKRELSKRLYKITGMSSMVVSGNSYGVLSLTYHQEARPTTEVKAKNGEYKQGEQLRSKITLLHTQFRALVQGQDFEINDIGEITFLHR

SEQ ID NO: 3905 - protein, 1213 aa, unidentified
  REGION 1..1213: note = Description of Unknown: Cas Enzyme sequence
MEKRLGIDVGTNSLGWAIVEVDDEGCTLLDRGVDIFQEGVAREKNQEKPAVQDRTDARALRRHYFRRRLRKIALLRVLVRHDLCPALSEEQLNAWQGKGIYPLDDAFIRWQRTDDNADRNPYRDRFRCLTEELDLACREERYVLGRALYHLCQRRGFLSNRKDAGNEAEEGKVKQEIKTLSADMAAAGCEYLGEYFYRLYQRKEKIRKHYTARNEHYLAEFRAICRKQRLGEELQQALERAIFYQRPLKSQKGLVGKCTFEKDKSRCPVSHPRFEEFRMLQFINNVRVTGPGDAEPRPLSPEEVEIVRPLFLRKSKPHFDFEDIAKKIAGKGNYACRGELLQAPYCFNCAGKSTVTGSPVSALFASVFGDDWQREICSLYTLGAGKNEEQILNDVWHVLFAFEDEERLQAWLQEKLQLSADDAKTLAAFRLPQGYASLSLNVINKILPYLRRGYRYDEAVFFANLGKVLPAEVYADPARRREVEQGISAQMDDLGDGEKTRKEERIRDYLRRYWGVEEKRLERLYHPSMIEAYPSASPNGQGLLQLGSPRIPAVRNPMAMRALFRLRVLLNELLREGKIDRGTKINIELARELNDANKRKAIERYQREREAENRKYAEEIRQQYVEATGHSIEPSEEDILKYRLWVEQGHCSLYTGKTIGISEFLGDGRRYDIEHTVPRSRGGEDAQYNKTLCEEEFNRDIKRDKLPSELANHTAILACVESCGWFERIEGLEHRVWGADRRAKSATTKSAKDFAIQDRHYWRMHLDYWRRKCEAFTMTEVPEGFSNRQGVDVGIIGRYARLYLQTVFDRVYTVKGATTAAFRRMWGLQEEYAAKERVNHVHHCIDAITIACIGSREYALWAQYVRQDELYRWGEADKPRCGKPWPTFTEDVRATADELLISHHTPDNMPKQSRKRLRVRGKVQRNDRGEVKYMQGDTARGALHQQTFYGAIERDGEIRYVVRKSLDQLLPADVEKIVDEAVRQKVREAVEAYGFKEATDPTKHTVWMNEEKQIPIRKVRILTGVKNPILLKPHRDVSVKEYKRYYHVVNDGNYCMAIYEGRDRQGRLKRTFEIVNKLEAARYFKRSADRESRPDLVPLSDVNGYSLKYLLKTGTMVLFYENSPDELYECSVGELAKRLYKVVGMAQDGRVQFLFHQEARDQKAVTAECGMGISVFDARHPAPKLRIRVSNFKMFVEGYDFELTVTGEVKFKR

SEQ ID NO: 3906 - protein, 1224 aa, unidentified
  REGION 1..1224: note = Description of Unknown: Cas Enzyme sequence
MEKILGVDLGTNSIGWAIVEDTDKGYILKDRGVDIFQEGVARDKNNEKPSVQDRTEARALRRHYFRRRLRKIELLRLLVKYGLCPYLTDEQLDLWRMKKQYPLDDGFLQWQRTDDNKDKNPYHDRYAALTQTLDLEKMEHRYMLGRAIYHLAQRRGFISNRKEVGKDKEDGVVKDGIKSLSMEIEKAGCHYIGEYFYKLYQHKGKIRGRYTSRNEHYRTEFDAICERQQLPEEWRKNMYRAIFYQRPLKSQKGLVGKCTFEPKKSRCPVSHPRFEEFRMLSLMNNVRVTSPGEIEPRPLSQGEITTITPLFLRKSKPYFDFEEIARKIAGKGKYACRNDRNEAPYRFNYARTATVSGCPVTAAIVAVFGSDWISEICSLYRLGEGKTEEQVINDVWHALFSFDDETRLKTWAQENLQLTEEQAEDFASIRLPQDYAALSLNAINKILPYLRRGYRYDEAVFLANLKSALPFDIYEDEQRRGEIENDIANLLSSYKRNPYDKYDTKERRITDYFSDHGLDTSRIDRLYHPSMIDTYRRVMPDSEGCMQLGSPRTSSIRNPMAMRSLFRLRALINRLLRDDKIDRDTKVNIEFARGLNDANRRKAIEQYQREREAENRRYADEIRKQYMTESGREIVPSEDDILKYRLWEEQQHICPYTGRQIGISDFIGSSPVFDIEHTVPRARGGDDSQMNKTLCDSRFNRERKRAKLPSELSSHVDILERIESFGWLKRVEDLQKQIEAQVRKSKGAATKTEKDGAIQRRHYLQIQLDYWRGKCERFTMTEVPDGFSNRQGVDIGIIGRYARLYLKTVFDRIYTVKGATTAAFRKMWGLQDEYSKKERTNHVHHCIDAITIACIGRKEYDRWAQYAADEERYSYGERGKPRFEKPWPTFTEDVKAVADELLVSHNTPDNMEKQTRKKMRVRGKVKFNSEGNPIYIQGDTARRKLHQDTFYGAIKREDEVKYVVRKSLGQLQQSDVDKIVDDAVKSRVKEAIREVGFAKAMDSEEYTIWMNEAKRIPIRKVRIFTPSITQPISLRKQRDLSDKEYKQDYHVANDGNYCMAVYEGQDKRGKTKRTFEIISNLEAAKYFKRSADRADRPDLVPMSDSNGYPLKCILKIGTMVLFYEKSPAELYECSRKDLVKRLYKVTGFSTLTVSSNSYGRLTLKFHQEARQAGELKAKSGEWNSAEEYRPVISLLHTQLNAYVEGYDFELTVTGEIKFKHEMPC

SEQ ID NO: 3907 - protein, 1224 aa, unidentified
  REGION 1..1224: note = Description of Unknown: Cas Enzyme sequence
MTKVLGLDLGTNSLGWALVDESENGYALLDKGVAIFQEGVARDKNNEKPAVQDRTDARALRRHYFRRRLRKIDLLRVLVRYDLCPPLTDEQLSTWRQKKQYPLDEEFLRWQRTDDNEDRNPYHDRYVALTERLDLENRAQRWLLGRAFYHLAQRRGFLSNRKEAGNEKEDGTVKESIKNLSAEMEAAGCRYLGEYFYGLYQHKERIRGKYTSRNEHYLTEFNAICDRQQLPDKWRRALHRAIFFQRDLKSQKGSVGRCTFEPTKSRCPVSHPRFEEFRMWSFINNIRVTGPDDGTPRPLTPKEIETIRPLFFRKSKSYFDFEEIARRIAGKGKYACREERIEAPYRFNFARTATVSGCPVTASLMDIFGKEWLREIRSLYLLGDGKTEEQVLNDIWHALFSFKDEERLRDWACEKLQLSEEQAKAFAAIKLPQDYAAMSLNAINKILPYLRCGYRYDEAVFLANLRAALPKEVYADEDRRHNIEQEIASLLLDYKRNPYDKFDSKERRIANYFSDHGLDMSRLDRLYHPSKIETYPDAKPNAEGIMQLGSPRTSAIRNPMAMRALFRLRDLINTLLREGRIDRDTKIRIEFARGLNDANRRKAIEQYQREREAENRKFAEEIRRQYTAETGREIEPSDDEVLKYRLWEEQQHICPYTGRQIRISDFIGANPGFDIEHTLPRALGGDDSQMNKTLCENRFNRETKRAKLPAELSNHAEIMERIESFGWREKVESLQKQIEAQVRRSKGAATKPEKDSAIQRRHYLQMQLDYWRGKCERFTMTEIPEGFSNRQGVDIGIIGKYARLYLKTVFDRIYTVKGSTTAAFRKMWGLQEEYTRKERVNHIHHCIDAITIACIGRREYDRWAQYAADEERFNYGETDKPRFEKPWPTFTEDVKAVADELLVTHHTPDNMAKQTRKKLRVRGRVKLSADGKPIYQQGDTARCRLHQETFYGAIKREDEIRYVVRKSIKLLQPSDIDKIVDDAVRDRVRMAIDEVGFKTAINPDEYTIWMNREKGIPIRKVRIFTPGVTQPIALKKQRDLSDKEYKQDYHVANDGNYCMAVYEGKDKKGKLKRSFELVSNLEAAQYFKASADREACPDLVPLADANGFPLKCILKAGTLVLFYENSPAELCDCTPKELTKRLYKVTGFSTLTVSNNSYGRLALKHHQEARPAGELKAKSGVWKTNEEYRPVISILHTQLNAYVEGYDFELTVTGEIKFKHGRPC

SEQ ID NO: 3908 - protein, 1219 aa, unidentified
  REGION 1..1219: note = Description of Unknown: Cas Enzyme sequence
MTKVLGLDLGTNSLGWALVDESENGYALLDKGVAIFQEGVARDKNNEKPAVQDRTDARALRRHYFRRRLRKIDLLRVLVRYDLCPPLTDEQLSTWRQKKQYPLDEEFLRWQRTDDNEDRNPYHDRYVALTERLDLENRAQRWLLGRAFYHLAQRRGFLSNRKEAGNEKEDGTVKESIKNLSAEMEAAGCRYLGEYFYGLYQHKERIRGKYTSRNEHYLTEFNAICDRQQLPDKWRQALHRAIFFQRDLKSQKGSVGRCTFEPTKSRCPVSHPRFEEFRMWSFINNIRVTGPDDGTPRPLTPKEIETIRPLFFRKSKSYFDFEEIARKIAGKGKYACREERIEAPYRFNFARTATVSGCPVTASLMDIFGEEWLREIRGLYLLGDGKTEEQVLNDIWHALFSFKDEERLQEWAGKNMQLDEQQAQAFAAIRLPQDYAAMSLNAINKILPYLRCGYRYDEAVFLANLRAALPKEVYADEDRRHNIEQEIASLLLGYKRNPYDKFDSRERRIADYFSDHGLDMSRLDRLYHPSKIETYPDAKPNAEGIMQLGSPRTSAIRNPMAMRALFRLRDLINTLLREGRIDRDTKIRIEFARGLNDANRRKAIEQYQREREAENRKFAEEIRRQYSAETGREIEPSDDEVLKYRLWEEQQHICPYTGRQIRISDFIGANPGFDIEHTLPRALGGDDSQMNKTLCENRFNRETKRAKLPAELSNHAEIMERIESFGWREKVESLQKQIEAQVRRSKGAATKPEKDSAIQRRHYLQMQLDYWRGKCERFTMTEIPEGFSNRQGVDIGIIGKYARLYLKTVFDRIYTVKGSTTAAFRKMWGLQEEYVRKERVNHIHHCIDAITIACIGRREYDRWAQYAADEERFNYGESGKPRFEKPWPTFTEDVKAVADELLVAHHTPDNMAKQTRKKLRVRGRVKLNADGEPIYQQGDTARCRLHQETFYGAIKREDEIRYVVRKSLADLKLTDIDKIVDPEVRLRIEKAVKADGLETVKRTDYTVWMNREKGIPIRKVRIFTPGVTQPIALKKQRDLSDKEYKQDYHVANDGNYCMAVYEGKDKKGKLKRSFELVSNLEAAQYFKASADRETCPDLVPLADANGFPLKCILKAGTLVLFYENSPAELYECSRMELVKRLYKVTAMAAEGRVQFLFHQEARDQKTLTALYGAGASQFRQSNPSPKLRLSVSNFNMLVEGYDFELTVTGEIKFKHGRPC

SEQ ID NO: 3909 - protein, 1347 aa, unidentified
  REGION 1..1347: note = Description of Unknown: Cas Enzyme sequence
MTKILGLDLGTNSIGWAVVETENNKEFTLLEKGVRIFQEGVKIEKGIEGSKAAERTAFRSARRIKYRRKLRKIQLLGVLSDYGYCPVLTKNELDSWRYKKVYPANSSFLVWQKTNEIQLENPYYYRSLLVEKKLDLNNERDRFKIGRAFYHISQRRGFISNRLESTKENVGTVKKSIAEISSAKGDKTLGQYFYERYQKGEKIRDSYTHREEHYLEEFMRISEFQQLNPEFIDKAKRAIFYQRPLKSQKGLVGKCVFEPRKSRCSVSRPEFEEYRMLCLINNIKIKTPKDENLRFLTNDEKEKIKPQFFRKSKDHFEFEDLAKQLAPKKQYKFYKSREIFKEDWLFNYSMNTTVSGCPVSARLKDLFGEDYMGVRFDYIREKDRKKSVIDIHDIWHVLYTFDSDEKLKEFASNRLNLDDTQIKEFLKIQLKKEYAALSLKAINKILPFLREGLIYSHAVFIANMEEAIPEKIWNNIENKTIIKNEIHNIISNQNEEKQIIDIVNGIIKTNRNENSVWSDEAIEFFKKDLKIKIKNYYGIKTFDAFPEEKKIRIEENAFHLFKKQMMKNIGRGEFATVQRIDERLKSFLSDKFDIDPLLLKKIYHPSAIEVYKPPVRKEDGKLYLGSPMVSSVRNPMAMRALHQLRKLINELIRKESIDTDTKINIEMARELMNANERKAYQSWQNDREKARKEYAIKIKQHLEVDGEPSDTDILKYQLWEEQNHKCLYTGKEIAISDFLGSNPKFDIEHTIPRSISLDNSQTNKTLCENFFNRSVKKNRIPSALSNHAEILERIEAWKLKYEELEKQIQYAVRQARGAVDKGAKDIAIQKRHKLKFEYEYWKNKYDRFLMNDVPEGFKNSQLVDTGIITKYSRMYLNTLFEKVYTVKGNTVADFRKLWGLQDEYEKKARVNHSHHCVDAVTIACITKNNYENLAKFYHDWEELNTKGVDQLPPIDKPWKTFTEDIKTIQNEILVSHYTPDNLPKQTKKILRKRGRIQKDSKGNPVYLKGDTVRGSLHQQTFYGAIEKTEVNKKGETEKVIKYVIRKSLDALDDNNIKNIVDERVKNIIQNARTKEKDFLKEIEIQNKKLARAEDAEKFEVQAEIDKLKKQVADLYSMPNRNGSPVPIKKVRIFQTSVTNPIHLKPQRDKSQRTPKPHKENYHVANDSNYMMAIYEGKDEKEKLKRDFKLLNNLEAGEFFKYSVHKELKEQNLENIQNVIPDKVLSGKIELQLRAILKIGTMVILWENSPDEVWDLSVSEINKRLYKIIGLSIQRIIGLSGKVNEYATIVMRFNQEASQAIDLKTMDGKFEKNEVFKAQRKMNHNQFNALVEGVDFNLSVLGEIKRLR

SEQ ID NO: 3910 - protein, 1304 aa, unidentified
  REGION 1..1304: note = Description of Unknown: Cas Enzyme sequence
  MOD_RES 1218..1223: note = Any amino acid
MAKVLGLDLGTNSLGWALVDESENEYTLIDKGVDIFQEGVARDKNNEKPAVQDRTSARALRRHYFRRRLRKIELLKILIRYDLCPPLPEELLTAWQKEKRYPQDNEFLRWQRTDDNGDRNPYHDRYVALSERLDLGNRTQRWLLGRALYHLAQRRGFLSNRKEAGNEKEDGTVKECIKNLSAEIAAAGCRYLGEYFYGLYQHKERIRDKYTSRNEHYLAEFNAICDRQQLPDEWRKALHRAIFFQRDLKSQKGSVGRCTFEPTKSRCPVSHPRFEEFRMLSFVNNIRITGPGDNAPRPLTQEEFETIRSLFFRKSKPYFDFEEIARRIAGKGKYACKEERTEAPYRFNFARTATVSGCPVTASLQAIFGDDWITEIRSLYLLGAGKNEDQMLNDVWHALFSFNDEGRLRSWACEKLQLTDEQAKAFAAIKLPQDYAALSLNAIGKILVYLRCGYRYDEAVFLANLRAALPKEVYADESRRHEIEQDIVSLLLDYKRNPYNKFDSKEHRIADYFSDHGLDASRLMRLYHPSKIETYPDAQPKANGILQLGSPRTATIRNPMAMRALFRLRNLINTLLREGRIDRDTKIRIEFARGLNDANRRKAIEQYQREREVENRKYAEEIHSQYAAETGREIKPSDDEVLKYRLWEEQQHVCPYTGRQIRISDFVGSAPDFDIEHTLPQARGGDDSQMNKTLCENRFNRETKRAKLPAELSNHVEIMERIESFGWREKMESLQKQIEAQVRRSKSAAIKSEKDDAIQRRHYLQMQLDYWRGKYERFTMAEIPEGFSNRQGVDIGIIGKYARLYLKTVFDRIYTVKGSTTAAFRKMWGLQEEYARKERTNHVHHCIDAITIACIGRREYDRWAQYVADEERYGYGESGKPRFEKPWPTFTEDVKAAADELLVAHHTPDNMTKQTRRKLRVRGRIKLNADGEPIYQQGDTARCRLHQDTFYGAIKQDGEIRYVIRKSLAQLQPTDIDKIIDDAVRDRVREAIDEVGFKTAMNPDEYTIWMNREKGIPIRKVRIFTPSVKHPIALKKQRDLSAKEYKRDYHVVNEGNYCTVIYEGQDKKGKTKRTFELVSNLEAAQYFKASADREARPDLVPQTDTNGFPLKYILKTGTMVLFYENTPAELYECTRKELVKRLYKVTAMAAEGRVQFLFHQEARDQKTLTSLYGAGTSQFCQSNPSPKLRLSVSNFNMLVEGYDFELTVTGEIKFKDDXXXXXXDTLLFEPAQRPDDHPHARGPRPTEKHPDRGYRLRGAGGPADLHHAAALECAVGQQRGSYPVRREPNAERLVDEFGFKQNAR

SEQ ID NO: 3911 - protein, 1225 aa, unidentified
  REGION 1..1225: note = Description of Unknown: Cas Enzyme sequence
MAKILGLDLGTNSIGWAITELTENGYNLLDKGVHIFQEGVNKTKSGEEPMVKIRTNKRGLRRLYYRRRLRKIELLKILVANDMCPFLSEKQLSEWRYKKTYPMDESFLSWQRTDDNMDKNPYHDRYLSLTTNLDFSKQSDRYIIGRALYHLSQRRGFLSNRKDQSKENEEGKVKTAISDLSSEIQASGCKYLGEYFYHLYQKNVSIRRKYTSRKEHFEKEFWAICEKQHLPESLQKSLYKAIFYQRPLRSQKGLVGSCTFEKGKSRCPISHPRFEEFRMLQFINNIRVKSFKDEDYRELSKSELEKVFPLFYRKSKSTFDFEDIAKAIAGKKKDCYAYKDDRIEAPYRFNYRMTTSVSACPVTASLRSIFGEDWLREICSVYIKAGEKTQDQILNDVWHVLFSFDDDDKLYEWAKLNLQLDDEQANNFVRIRIPQDYASLSLNAINKMLPYLRVGYRYDEAVFLANLPNVLDKNVWNDEERKSSIVKDVANIVSEFKPNPNIKNDTKENAIYNYLLDLGIDASEIKIEKMYHPSMIETYQIAQPNKDGLILLGSPRTSSVRNPMAMRALFRLRALINQLIKEGKIDHHTKINIEFARGLNNANKRNAIYQVQRENEARHKKYAEEIKIAYKEHCGKDINPSAEDILKYQLWQEQKNLCLYTGKQIGICDFIGNGQDYSPKYDIEHTVPRSRGGDNSQMNKTLCECDFNRKIKKGKLPSELANHSNVLAVIESLGWEEKIKDLYKQIEKTRGSFSTKEIKDSMIQKRHRLTMELNYWKGKIDRFKMTEVPAGFSNRQGVDIGIIGKYARMYLKTVFDKVYVVKGTTTSDFRKAWGLQTEYERKERSNHVHHCIDAITIACIDSNTYQKWAEYVSKYEQYEKGYASRPVFAKPWGSFTEDVKSVAEDLLIAHHMPDNMPKQSRKKVRVRGKIMYNNEGNPIYAQGDTARASLHQDYFYGAIRQGDDLKYVIRKSLDKLQESDVEKIVDNAIKECVKKTIIQHGFKEAMSKPICFNEEKGVYIKKVRIYTPNVTQPLHLKKHRDESRYEYKREYHVVNDGNYCMAIYEGLDKKGKPARDFEIVNSITAASYFKQSCDRDSYPDIVPIVSKNGYPLKCLLKTGTLVLFYEHSPEELYECTKEELVKRLYKVTGMSTLTLQKKYCYGTITLKYHQESRPAGDLKAKNGLWTRNEEYRPVIAIYHTQLNAYIEGFDFDMTITGEIKFKRDH

SEQ ID NO: 3912 - protein, 1231 aa, unidentified
  REGION 1..1231: note = Description of Unknown: Cas Enzyme sequence
MITRILGLDTGTNSLAWAVVDRDANGNYTLVKRGDVIFSEGVKIEKGKESSKAAERTGHKSLRVQYARRRLRKIDTLKVLVSLDLCPYLSDEQLSQWKAKKTYPLTDDFMLWQRSGSAEENNPYYCRYRCLTQKLDLTDQSQRFLLGRAFYHLAQRRGFLSNRLDTSADSEESGKVKSGIAQLSVEMEKAGCHYLGEYFYQLYRQHGNTVRLRSRYTDREEHYIKEFLAICEKQELDAQWVEKLQSALYFQRPLKSQRKGVGKCTFEPKKPRCAESHPDYEAFRMLCILNNIKIKTPNDTSLRPLNAQEREKIWPLFFRKSKPSFDFEDIAKALAGKNNYAWIKDAGENPYRFNYRMHQGVSGCPVTAQLIDIFGSDWKAGIAETYTAVGKKNGTKTIGEMADDVWNVLYSFSSKDKLKAFATEKLQLDEASATKFANTKLPHGFAALSLKAIRNILPFLRQGFIYAHAVLLAKIPDIVTNAVWEDAHKREQILSGLLEIIENYNPKDRGVEGTIDFCIKSHLQDVVDLRPGAADALYHPSMIEPYPDAKLNKMGVFQLGSPRTNAIRNPMAMRSLHILRSVVNQLLRDGTIDRDTEVHVEYARELNDANKRKAIADNQKNIERKRADYRKRIIELYKEKCHKEIEPTDTDILKYQLWEEQNHKCLYTDREIGICDFLGDNPKFDIEHTIPRSVGGDSTQMNLTLCDAMFNRQVKGARLPSQLPNHHDILKRIAPWKSKCENLRKQLDKIRTYGGMEKAMKDRLIQKRHRLKMELSYWQGKYERFTMTEVPEGFSRRQGAGIGLISKYAGLFLKSLFHSAVNPNKSNVYMVKGVITAEFRRMWELQGEYEKKSRLNHCHHCIDAITIACIGEAEYEKMAQYYHDEEVSRWYGSANKPHFKKPWATFTEDVLAIEQSLLVKHLTKDNMPKQAKKHVRTAKGKYLAQGDTARGSLHKDTYYGVIEKDGILYHVLRKPIDKFEKESELEKIVDQAVKEKIKAAVAGKNFKTAITEPIFMNKEKGIRINKVRCYVKAQERLKIRQQRDLSTKEYKQFFCVENENNYLLAIYEGELKGKKERDFCVINNLDAAANLKRSNKGKAAPLVPERNAERNLPLLAVLQRGTQVLFYEDSPEEILFDNPQDLVRRLYKVVGINTKKDVKKGKTYLYGNIELRFHQNAQKKDDVKMESGGYKNNEAPHQGIVLSHKQFKALVEGIDFEFNILGEIKKKDNHA

SEQ ID NO: 3913 - protein, 1225 aa, unidentified
  REGION 1..1225: note = Description of Unknown: Cas Enzyme sequence
MITRILGLDTGTNSLAWAVVDRDANGNYTLVKRGDVIFSEGVKIEKGKESSKAAERTGHKSLRVQYARRRLRKIDTLKVLVSLDLCPYLSDEQLSQWKAKKTYPLTDDFMLWQRSGSAEENNPYYCRYRCLTQKLDLTDQSQRFLLGRAFYHLAQRRGFLSNRLDTCADSEESGKVKSGIAQLSVEMEKAGCHYLGEYFYQLYRQHGNTVRLRSRYTDREEHYKKEFLAICEKQELDAQWVEKLQSALYFQRPLKSQRKGVGKCTFEPKKPRCAESHPDYEAFRMLCILNNIKIKTPNDTSLRPLNTQECEKIWPLFFRKSKPNFDFEDIAKALAGKNNYAWIKDAGEKPYKFNYRMHQGVSGCPVTAQLIDIFGSDWKAGIAETYTAVGKKNGTKTIDEMADDVWNVLYSFSSKDKLKAFVTEKLQLDEACATKFANAKLLHGFAALSLKAIRNILPFLRQGFIYAHAVLLAKIPDIVTAVVWDDADKREQILSGLLEIIENYNPKDRGVEGTIDFCIKSYLQDVVDLRPGAADALYHPSMIEPYPDAKLNKMGVFQLGSPRTNAIRNPMAMRSLHILRSVVNQLLRDGVIDRDTEVHVEYARELNDANKRKAIADNQKDIERKRADYRKRIIELYKDKCHKEIEPTETDILKYQLWEEQNHRCLYTNGEIGICDFLGDNQKFDIEHTIPRSVGGDSTQMNLTLCDATFNRQVKGARLPSQLTNHADILKRIAPWKSKCEDLRKKLDKIRTYGGMEKKIKDKLIQKRHRLKMELSYWQGKYERFTMTEVPEGFSRRQGAGIGLVSKYAGLFLKSLFHNEQNPNKSNVYMVKGVTTAEFRRMWGLQGEYEKKSRLNHCHHCIDAITIACIGKAEYEKMAQYYHDEELFQWRGTTTKPHFNKPWRTFTEDILAIEQSLLVKHLTKDNMPKQAKKHVRTAKGKYLAQGDAARGSLHKDTYYGAIQQEGEIRYVLRKSLSDFNSESELENIVDQAVKEKIKAAVAGKNFKTAIAEPIFMNKEKGIRINKVRCYADSVKNPLHIRQQRDLSDKEYKQQFHVVNDNNYMLAIYEGEVKGKVKRDFVLVNNITAASFFKRSNRRKNAETLVPKTSPKGNLPLLVMLKIGMQVLLYEKSSEEIKFGSPHDLVKRLYKVVGLSIDGSCIMIDLRHNQEARQAKDVKPKKGAYMENEQFRPCIRLRHTQFKALVEGIDFELNILGEIKKKEHHA

SEQ ID NO: 3914 - protein, 1231 aa, unidentified
  REGION 1..1231: note = Description of Unknown: Cas Enzyme sequence
MNTRILGLDTGTNSLAWAVIDRDDNGDYTLVRRGDVIFTEGVNVDGQPVPSKAAVKSKYKSLRVQYATRRLRKIDTLKVLVSLDLCPYLSDEQLSHWKAKKTYPLTDDFMLWQRSGSAEENNPYYCRHRCLTQKLDLTDQSQRFLLGRAFYHLAQRRGFLSNRLDTSADSEESGKVKSGIAQLSVEMEKAGCHYLGEYFYQLYRQHGNTVRLRSRYTDREEHYKKEFLAICEKQELDAQWVEKLQSALYFQRPLKSQRKGVGKCTFEPKKPRCAESHPDYEAFRMLCILNNIKIKTPNDTSLRPLNTQEREKIWPLFFRKSKPNFDFEDIAKALAGKNNYAWIKDAGEKPYKFNYRMHQGVSGCPVTAQLIDIFGSDWKADIAETYTAVGKKNGTKTIDEMADDVWNVLYSFSSKDKLKAFATEKLQLDETCATKFANAKLPHGFAALSLKAIRNILPFLRQGFIYAHAVLLAKIPDIVTNAVWDDADKREQILSGLLEIIENYSPKDRGVEGTIDFCIKSHLQDVVDLRPGAADALYHPSMIEPYPDAKLNKMGVFQLGSPRTNAIRNPMAMRSLHIIRSVVNQLLRDGTIDRDTEVHVEYARELNDANKRKAIADNQKEIERKRADYRKRIIELYKDECHKEIEPTDTDILKFQLWEEQNHKCLYTNGEIGICDFLGDNPKFDIEHTIPRSVGGDSTQMNLTLCDATFNRQVKGARLPSQLTNHADILKRIAPWKSKCEDLRKKLDKIRTYGGMEKKIKDKLIQKRHRLKMELSYWQGKYERFTMTEVPEGFSRRQGAGIGLISKYAGLFLKSLFHSAGNPNKSNVYMVKGVLTAEFRRMWGLQGEYEKKSRLNHCHHCIDAITIACIGEAEYQKMEQYYHDEEVSRWYGSANKPHFKKPWATFTKDVLALEQSLLIKHLTKDNMPKQAKRRVRTAKGKHLAQGDAARGSLHKDTYYGAIEQEGEIRYVLRKPISKFEKESELENIVDQAVKEKIKAAVAGRNFKTAIAEPIFMNKEKGIRINKVRCYVKAKERLKIRQQRDLSTKEYKQFFCVENENNYLLAIYEGELKGKKERDFCVVNNLDAAAYLKRSNKGKAAQLVPERSAERNLPLLAVLQRGTQVLFYEDSPEEILFDNPQDLVRRLYKVVGIGTKRVKIGGKLYSYGEVKLRFHQNAQKDDDVKYVSGEYKNNEEQYQGIILLHTQFKALVEGIDFELNILGEIKKKDNHA

SEQ ID NO: 3915 - protein, 1225 aa, unidentified
  REGION 1..1225: note = Description of Unknown: Cas Enzyme sequence
MNTRILGLDTGTNSLAWAVVDRDAAGNYKLVRRGDVIFSEGVKIEKGVESSKAAERTGHKSLRVQYARRRLRKIDTLKVLVSLDLCPYLSDEQLSQWKAKKTYPLTDDFMLWQRSGSAEENNPYYCRYRCLTQKLDLTDQSQRFLLGRAFYHLAQRRGFLSNRLDTCADPEESGKVKSGIAQLSVEMEKAGCHYLGEYFYQLYRQHGNTVRLRSRYTDREEHYIKEFLTICEKQELDAQWVEKLQRALYFQRPLKSQRKGVGKCTFEPKKPRCAESHPDYEAFRMLCILNNIKIKTPKDVSLRPLNAEEREKVWPLFFRKSKPNFDFEDIAKALAGKNNYAWIKDAGEKPYKFNYRMHQGVSGCPVTAQLIDIFGPDWKAGIAETYTAAGKKNGTKTIDEMADDVWNVLYSFSSKDKLKAFATEKLQLDEACATKFANAKLPHGFAALSLKAIRNILPFLRQGFIYAHAVLLAKIPDIVTAVVWDDADKREQILSGLLEIIENYNPKDRGVEGTIDFCIKSHLQDVVDLRPGTVDVLYHPSMIEAYPDAKLNKMGVFQLGSPRTNAIRNPMAMRSLHILRSVVNQLLRDGTIDRDTEVHVEYARELNDANKRKAIADNQKDIERKRADYRKRIIELYKDECHKEIEPTDTDILKFQLWEEQNHKCLYTDSEIGICDFLGDNPKFDIEHTIPRSVGGDSTQMNLTLCNATFNRQVKGAQLPTQLTNHAGILARIEPWKSKCEDLRKKLDKIRTYGSMEKKIKDKLIQKRHRLKMELSYWQGKYERFTMTEVPEGFSRRQGAGISLISKYAGLFLKSLFHNAVNPNKSNVYMVKGVLTAEFRRMWGLQGEYEKKSRLNHCHHCIDAITIACIGEAEYQKMEQYYHDEEVSRWHGSAGKPHFKKPWPTFTEDILALEQSLLIKHLTKDNMPKQAKKHVRTAKGKYLAQGDTARGSLHKDTYYGAIEQEGEIRYVLRKSLSVFDSESELENIVDQAVKEKIKAAVAGKNFKTAIAEPIFMNKEKGIRINKVRCYADSVKNPLHIRQQRDLSDKEYKQQFHVVNDSNYMLAIYEGEVKGKVKRDFVLVNNITAASFFKRSNRRKNAETLVPKTSPKGNLPLLVMLKIGMQVLLYEKSPEEIKFDKPHDLVKRLYKVVGLSIDGSCIMIDLRYNQEARQAKDVKPKKGAYMENEQFRPCIRLRHTQFKALVEGIDFEFNILGEIKKKEHHA

SEQ ID NO: 3916 - protein, 1210 aa, unidentified
  REGION 1..1210: note = Description of Unknown: Cas Enzyme sequence
MEKVLGLDLGTNSIGWAVIGRNEDDSCMLIDRGVHLFQDGVAHDKSGEKPAVQERTAARASRRHYFRRRMRKVELLKVLVREGFCPHLSDEDLKKWQNEKVYPLNEDFMRWQRSYAEPDRNPYHDRYRALTEKLDLTETRDRYVLGRALYHINQRRGFLSNRKDAADDAESGKVKEGISKLSKEMAEAGCRYLGEYFYRLFQKGDKIRCKYTAREEHYKAEFEAICEKQNLSARLKTDLERAIFFQRSLRSQKGSVGKCSFEKGKPRCPVSHPKYEEFRMLQFINSVRVQRPFETEASPLNDEEVQSIKSLFFRKSKTDFPFEEIAKKIAGKGNYAYKENGRDDQYRFNYRMSVSVSACPVSAAIISALGLQGPDGWEEELCSVYTKADGKTQDGILNDVWHALFFYDDGKKLSEWLSAALQLDEEKADGLAKFRLSQGYAALSLKAINKILPWLRRGHIYSDAVFYANLPAVLPSSVTQDTAKMADVFENVRTLLEDFSKDPLSRESSKVKNISDYLLGVSDGVHTEKLYHPSMIETYRAVMPDGRGQVHLGSPRTEAFKNPMAMRALFRLRALLNRLLDEGIIDPTTKINIEFARELNDTNMRKAIADWQKDLEEQRKKDAEAIRSIMGDGYVPSEDELLKYRLYEEQNHICLYTGRQISPRMFLGGVSEFDIEHTIPRSRGGDDSQANKTLCENKFNREIKKTQIPSELVDHDVILERIAGWKETIEELSNQISFQRRKARGAQTKEAKDAAIRRMHYLKMKLNYWKGKYERFTMTKVPEGFSNRQGVDIGIIGKYARLYLKTLFRKIYVVKGATTAAFRKEWGLQNEYSKKERVNHAHHCIDAVTIACIGKNEYDRWAQYLRKEENYQFGKGPKPRFEKPWPTFTEDVLAIPSSLIVSHYTPDNLPKLDKKKVRVRGVIQRNSDGEPMYAQGHTARALLHKDTFYGAIQKDDDVRYVVRKPLDSLDEKKDVPKIVDDAVREKVLAAIAEHGSLKKAVAETIWMNKEKGVPIRKVRVYTPTITSPIALKPHRDESDKEYKRNYYVANDSNYCMAIYGDDKPSFKLFNALSAVNHFNGKDGTWIDEVNEKGQPLRCILRTGTMVLLYEKSPEELYTCSQEELSLRLYKVTILSSMTVQEKYRYGTITLKHHLEARPSTELKEKKGLWRIDEDFRPVIGLNHNQTKFLVEGVDFYLTVTGKIFFKKKGK

SEQ ID NO: 3917 - protein, 1204 aa, unidentified
  REGION 1..1204: note = Description of Unknown: Cas Enzyme sequence
MERILGIDTGTNSLGWAIVDKDENQYHLVAKGSNIFSEGVKIEKGIEFSRAAERTDHRSVRKHYWRRKIRKIRLLTILSDNDLCPRLKHEQLHQWRLTKAYPLDDAFMEWQRTEDKAQINPYKFRYICLTQKLDLSDITQRFILGRALYHLNQRRGFLSNRKESTKESEGTVKEGISSLSKDMKDAGCEYLGEYFYQLYQQGKKIRNHYTARKEHYLKEFKAICAKQELDDALIEKLEKAIFDQRPLKSQKGQVGTCTFEKGKPRCPSSHPLYEDFRMYSFINNIKVQVSTLYDKGERTLTDEEKQLIIPLFKRKSKRTFPFEDIAKKIAGKNNYCYIKSDEEKAYKFNYQMDTQVSGSPVNAQLEEIFGEDWLSSVCEVYTLANNKTRFQIMNDVWHVLFFYDDEEKLKEFAKDRLQLDDELAEKFSKISIPNDYAALSLKAVRKIMPYLRNYGLIYSEAVFLANLVDVLPQHVWGVKEMREAAIENVIDVMHSYDKNNIDGITLEVCVKTFLKERYQVNDDDLKKLYHPSMLDPYPRQRPNDEGVFQLGSPRISSVKNPMAMHSLFRLRKVVNLMLKEGYVTPDTKIHIEFSRDLNDANKRWAIQTWQRENEKDRERCRKEIEKYIASPSDTDILKYQLWEEQNHKCLYTGDEIRITDFLGDNPLFDIEHTIPRSAGGDSTKMNLTLCSSRFNRDEKKTKLPAELVNHDEILERIKDWKEKYEELDKQIRKISTKGATSKEEKDGIIRRRHYLILQRDYWRGKYQRFTMAEVPEGFSRRQGTDISVISRYARMYLKSVFKQVYIVKGIATSDFRKMWGIQEEYAKKERVNHVHHCIDAITIACIGKAEYDKLADYRHKYDEYLFNGKRKPSFDKPWPSFVIDIKHIQDELLVAHYAKDIMPKQAKRYVRDSKGKKVLTQGDTARASLHNDTYYGAIEVDGEVKYVVRKNLAGLEEKDVKNIVDAEVKSKVENAILLHGSLKKALEETIWMNEEKQIPIKKVRVFTGSVTRPINIRQQRDQSKHEYKRQYHVQNDRNYMMAIYVGHDKKGKEKRDFELVNNITAANFYRRSNDRVPTDGQLVPLFSENGYELRYKLKIGTMVLLYENGPEEVWELDRVNLQKRLYKVTGLSSMIIQRKFEYGTIELVHHQNAKPSSEIKKINGEYKSGEEFRPGIKMLHSQIRALVQDVDFEINDLGEIRRLI

SEQ ID NO: 3918 - protein, 1203 aa, unidentified
  REGION 1..1203: note = Description of Unknown: Cas Enzyme sequence
MERILGIDTGTNSLGWAIVDKDENQYHLVAKGSNIFSEGVKIEKGIEFSRAAERTDHRSVRKHYWRRKIRKIRLLTILSDNDLCPRLKYEQLREWRLKKVYPTDDTFMEWQRTEDKAQINPYKFRYICLTQKLDLSDLTQRFILGRALYHLNQRRGFLSNRKESTKESEGAVKEGISSLSKDMKDAGCEYLGEYFYQLYQQGKKIRNHYTARKEHYLKEFKAICAKQELDDALIEKLEKAIFDQRPLKSQKGQVGTCTFEKGKPRCPSSHPLYEDFRMYSFINNIKVQVSTLYDKGERTLTDEEKQLIIPLFKRKSKRTFPFEDIAKKIAGKNNYCYIRSNEEKAYKFNYQMDTQVSGSPVNAQLEEIFGEDWLSSVCEVYTLANNKTRFQIMNDVWHVLFFYDDEDKLKDFAKNRLQLDDELAEKFCKISIPNDYAALSLKAIRKIMPYLRNYGLIYSEAVFLANLVDVLPQHVWGIKEMREAAIENVIDVMHSYDKNNIDGITLEVCVKTFLKERYQVSDDNLKKLYHPSMLDPYPRQRPNDEGVFQLGSPRISSVKNPMAMHSLFRLRKVVNLMLKKGYITPDTKIHIEFSRDLNDANKRWAIQTWQRENEKDRERCRKEIEKYIDNPSDTDILKYQLWEEQNHKCLYTGDEIRITDFLGDNPLFDIEHTIPRSAGGDSTKMNLTLCSSRFNRDEKKTKLPAELVNHDEILERIKDWKEKYEELDKQIRKISTKGATSKEEKDGKIRRRHYLILQRDYWRGKYQRFTMTEVPEGFSRRQGTDISVISRYARMYLKSVFKQVYIVKGIATSDFRKMWGIQEEYAKKERVNHVHHCIDAITIACIGKAEYDKLADYRHKYDEYLFNGKTKPTFDKPWPSFVIDIKHIQDELLIAHYAKDIMSKQAKRYVRDSKGRKVLTQGDTARASLHNDTYYGAIEIDGEVKYVVRKNLAGLDEKDVKNIVDAEVRSKVENAILLHGSLKKALEAKIWMNEDKQIPINKVRIFTGSVTRPINIRQQRDQSKHEYKRQYHVQNDRNYMMAIYVGHDKKGKEKREFELVNNITAANFYRRSNDRVPTDGQLIPLFSESGYELRYKLKIGTMVLLYENGPEEVWELDRVNLQKRLYKVTGLSSLVIQKYVYGTINLVHHQDARPSTEVKQTNGVFKAFDDFRAGIKLYHTQFNALVQGVDFEINDLGEIRRLI

SEQ ID NO: 3919 - protein, 1208 aa, unidentified
  REGION 1..1208: note = Description of Unknown: Cas Enzyme sequence
MKRILGIDTGTNSLGWAIVEKEDDDYQLLDKGVNIFQEGVKIEKGIEASKAADRTSHRSIRIRYYRIKLRKIRLLRILSDNHLCPPLSTSELSLWRQKKEYPNTNELFMQWQRTDDREGKNPYADRHRCLHEKLDMDNINDRYVLGRAFYHIIQRRGFLSNRKEQVGDDSGKVKEGINSLTQEMEEAGCQYLGDYFYSLYNKGEKIRNHYTDRIEHYLAEFIAICKQQNLDDDLKDKIGKAIFDQRPLKSQKGQVGKCVFEKNKTKCPSSHPLFEEFRMLSFVNNIKIKTPKDDVMRSLNKEERESISPLFYRKSKKHFEFEDIAKKLAPKKQYGFYKKSSDVEMPYLFNYPMDTPVSGCPVTAALKDIFGENWIDAVCEVYTNANGKSRLEIINDIWHVLFFYSDSDKLALFARTKLQLGEKEAKAFSDISIPADYASLSLKAICKILPYLRKGLIYSHAVFLGNLCEVIPSYIWKVKEMREAAIDSVIKEMDTYDSRDKRTFELCIKEYLKEQYHLTDEIVEKLYHPSMMEVYPKVHLNHQGIYQLQSPRIESVRNPMAMRSMFRLRKLINRLLEMGKIDEETEIHIEFARELNDANKRQAIAELVKNNFAENEKARKAIKELYKEETGAEVEPTDVDILKYTLWKEQNSVCPYTGKNIRISDFIGANPMFDIEHTIPQSVGGDSTKMNLTLCDSRFNREIKKTKLPAELSNHDEVLQRIKGWKERYENLNQKIRKQKKLSKGATTKEQKDSIIKKRHLLELERDYWRGKYERFTMTNVPEGFSRRQGTDISVISKYARLYLKSIFKHVYTVKGIATSDFRKIWGIQEIYSKKERVNHVHHCIDAIVIACIGLDEYNKLGAYYHDEENKKWYGMSGASFPKPWSTFVEDIKNIQNELLVYHYTPDNMPKQGRRRIMIDGKKVLSKGDAARGSLHKDTYYGAIEKEGEVKYVKRIAIEDLDEKSVDTIVDETVKAIVKKAITAKGLKEAKASTIWMNEEKQIPIKKVRCYTPSVTKPLNIRKQRDLSTKEYKQQYHVVNDDNYLLALYVGQDKKGKEKRDFEIVNMLEAAQYYKTSNDKETTDYNMVPFKSKHDYPFAYSLKIGTMVLLYENSPEEVWDASKREMVKRLYKIVGMSSMVVSGCSYATIKMRHHEEARLSKNLKFKNGTYKQNEEFRPAILMYHTQIKALVQGYDFDINELGEIKRLR

SEQ ID NO: 3920 - protein, 1203 aa, unidentified
  REGION 1..1203: note = Description of Unknown: Cas Enzyme sequence
MSRILGIDTGTNSLGWAIVEKEGDSYRLLHKGTNIFSEGVKIEKGIESSRASERTEHRAIRRHYWRRKVRKIRLLAILAENHLCPPIPKGSLREWRLKKSYPKDEGFMNWLMTEDKEGVNPYHFRYICLTQKLDLTNIAERYILGRALYHLNQRRGFLSNRKEDTKASEGNVNSGISELTKEIEEAGCTYLGEYFYHLYEKGEKIRKHYTARKEHYLKEFYAICEKQGLDAGLVKKLEEVIFNQRPLKSQKGVVGSCTFEKGKPRCPVSHPLYEDFRMYAFLNNVKIQTPFDAQLRPLDSDELEKVKPLFKRKSKRSFNFEDIAKKLAPKNDYCFYKDKDQKSYRFNYPMDTSVPGSIVNAQLEEIFGENWLDAVCEVYTLAKGKSRFEVMNDIWHALFFFDDEDKLKAFAQARLQLSEDDASRFSKISLPQDYASLSLKAIRKILPFMRDYGLIYSHAVFLGNLKEVLPAHVWGVPQVRQAAIEKVIEVLLSVHQTSDVRTQEQCVKDFLKERYHLDDKTVGKLYHPSMIDLYPRVRPNAKGIYQLGSPRISSVRNPMAMHSLFRLRKVVNLLLQEGYIDQETTVHIEFSRDLNDANRRWAIQTWQRNQEKERERCRKEIERLFKEATGKDIVEVNDRDVLKYQLWEEQHHKCLYTGEEIGLADFLGAHPKYDIEHTVPRSAGGDSTKMNLTLCNSHYNREVKKTKLPTELAEHEAILQRIEEWKEHYEDLERQIRKLKGQYTSTKEEKDKKIRRKHMLLLERDYWRGKYNRFTMTEVPEGFSRRQGTDISVISRYARLFLKSVFRHVYIVKGIATSDFRQIWGIQEEFTKKERVNHVHHCIDAITIACIGPDEYAKLAQYYHDEENHDWYGKNKGQFAPPWPAFVEDIKSLQNELLIAHYSEDRMQKRAKRYARTPQGKVLTAGDAARASLHNDTYYGAISVGDEIKYVVRKALDSIEEKDVKNIVDEAVRKKVEAAITQHGSLKTALEHTIWMNREKHIPINKVRLFTPSVTRPIDIRQQRDQSRHEYKRQFHVQNDRNYMMAIYIGRNEKGKEKRDFELVSNLVAAKRMKKSNGSPQPLVPATKNGYPLACQLKIGTMVLLYDSRPDEVWDLSADDLQKRLYKVTGLSILVVKANAYGRIYLFHHQEARPSVEVKVKNGAYVQGEVYRPAIMLLHTQFKALVQGLDFEINDLGEISRLR

SEQ ID NO: 3921 - protein, 1209 aa, unidentified
  REGION 1..1209: note = Description of Unknown: Cas Enzyme sequence
MEKILGIDTGTNSLGWGIVQKDEAGNYTLLEHGVNIFQEGVKIEKGIESSRAADRTEHRSIRVHYWRRKVRKIRLVTILSRANLCPPVSFGMLREWRTKRVYPQDEAFLAWQRTDEAQNINPYYYRYLCLTKKLDLSDLSQRYILGRALYHLNQRRGFLSNRKESTKESEEGKVKEGISQLSEDIAAAGCQYLGEYFYTLYQKGERIRAHYTARNDHYLNEFRAICAMQQLDAELVGKLEKAIFFQRPLKSQKQQVGKCTFEPKKARCSTSHPLYEEYRMYTFINNIKVKTPKDEDLRPLTPEEKNLIIPLFMRKSKPSFTFEDIAKKIAAGKKNYAYVGDKGDKPYIFNYHMDTNVSGCPVMAGLREIFGEKWVDAVCEVYTLAKGKSRLEIVNDIWHALFFYDDDAMLKGFARDRLQLSEEDAEKFCKIKVAQDYAALSLKAIKKILPYLRDYGLIYSEAIFLANLCEVIPSYIWNTAEMRQAVIENVIEVMHTDEADTDGFTTEQRVKAFLKETYFVEDKDLKKLYHPSMIDVYPRQRRNDKGIYQLGSPRINSVRNPMAMHSLFRLRKVVNQLLAEGKIDEETVIHIEFARELNDANRRKAIQDYQRENEKDREACRKKIQELFAEKNMKYEPTDTDVLKYQLWEEQGHICLYTGESIGLTDFLGSNPKYDIEHTIPRSVGGDSTKMNLTLCQNRFNREIKKAYMPSQLANHEDILQRIESWKEKYEELDKRIRKLRGSSATTKEAKDGIIRNRHLLSLRRDYWRGKYQRFKMEEVPEGFSRRQGTDISVISRYARLYLRSVFHKVFIVKGIATSDFRKIWGIQEEYEKKARVNHAHHCVDAITIACIGPNEYAKLAKYYHDLEKFEKYGNERPSFEKPWPDFVNDMKHVQDDLLVAHYTQDNMMKSARRRIMTPEGKKLAMGDVARGSLHLDTYYGAIERDGEVKYVVRKSLNSIEEKDVKNIVDDAVREKVESAISEFGGLKKAVEADAIWMNKEKGVRIAKVRLYAGSVTRPINIRKQRDESVHEYKRQYHVQNDRNYMMAIYVGKTDKGKEKREFELVNNLTAADYYRQSNDRRKVGDTLFPLKSKKGYDLAYLLRIGGLVLLYEESPEEVWELDANELQRRMYKVTGLSSMVITGNAYGTISLVHHQDARPGTDVKLKNGAYIQNEEFRAGIKELHTQFKALVEGVDFKLNELGEITRLI

SEQ ID NO: 3922 - protein, 1203 aa, unidentified
  REGION 1..1203: note = Description of Unknown: Cas Enzyme sequence
MEKILGIDTGTNSLGWAIVEKSDEGKKLLDKGVHIFQEGVKIEKGIESSKAADRTGHRATRVRYYRIRMRKIQLLKILIDNHLCPPLSKDDLKTWKLKKIYPKNELFMHWQRTNDNEGKNPYADRHKCLHEKLDLDNLMNRYALGRAFYHLIQRRGFLSNRKEQGGDDTGAVKEGISVLSEEMRNAGFEYLGDYFYSLYNKGEKIRDHYTARNEHYLKEFKAICEKQELDSRLGSDVVKAIEKAIFYQRPLKSQKGQVGKCVFEKNKAKCPASHPLFEEFRMLQFLNNVKIQTPKDDALRPLNNDEREKVIPLFFRKSKRNFDFEDIAKKLAPKKMYAFYKQNPDMPYLFNFPMDVSVSGCVVTAYLREIFGEDWLTGVCEVYTLAEGKTRMQILNDVWHALFFYSDKERLEGFAKERLQLSDDDAKKFSEIPMPSEYASLSLKAICKILPYLRRGMIYSRAVFLGNLCEIMPQYVWNISEMREAAIDKIVYEMDNYNPSIDNRTLEVCIKDYLKSEYGVTDEDLKKLYHPSMMETYPPVRPNGDGLYQLGSPRINSVRNPMAMRSMFRLRKLINRLLQEGKIDKNTTINIEFARELNDANKRKAIADNVRENQKQRDEARKKICELYKAETGKDIEPNDDDILKYILWEEQEHVCLYTGKQIGIADFIGANPKYDIEHTVPQSVGGDSTRMNLTLCDSRYNREVKKAQLPSELSNHDEILRRIEPWKRKYEDLDKQIRRQRTSGASTKDAKDKIIQRRHLLQLRRDYWRGKYERFTMTEVPEGFSRRQGTDISVISKYARLYLKSIFDKVYTVKGIATSDFRKIWGIQDVYASKERVNHVHHCIDAIVIACIGKAEYDKLAQYYHDKENHEWYGYSKADFVKPWPTFVEDIRKVQNEILVSHYTPDNMPKQGRKHIMVNSKKVLSKGDAARGSLHKDTYYGAIERDGNIKYVVRYELSKFTENDKNKIDLIVDDIVRDIVKAAIAEKGFKEAMAGPIWMNEEKQIPIKKVRCYTKLANPPHIRTHRDISTKEYKRVFYVDTDENYAMAMYIGYNKRGQERRDFEMVNMLEAARFYKSSNDKEVVDGSIVPIKSKHDYPLAYILKKGTMVLLYENTPEEIWEGDKKELVKRLYKVYGFEKDGRVKIVFHEEARPRKEIKVDSDKFSQNKEICPAKRLSCSNLRILVQGYDFDINELGEIKRLR

SEQ ID NO: 3923 - protein, 1205 aa, unidentified
  REGION 1..1205: note = Description of Unknown: Cas Enzyme sequence
MERILGLDTGTNSLGWAIVERNEGQYTLLEKGTSIFTEGVKIEKGIESSKAAERTAHRSVRKHYWRRKIRKIKLLTILSENDLCPPLDKSALREWKLKKKYPENDAFMSWQKTEDKSDVNPYRFRHICLTEKLDLADLTQRYILGRAIYHLNQRRGFLSNRKETTKESDGTVKESISQLSLEMAQNGCEYLGEYFYRLYQSGQKIRNHYTARKEHYLKEFLAICEKQELDADLVTKLKNAIFFQRPLKSQKGLVGTCTFEKGKARCPSSHPLYEDFRMHQFVNSIKIETPYEEGMRQLTEAEKEAIYPLFKRMSKRSFVFEDIARKLAGRKNYCYFKDKEQLPYRFNYQMDSQVAGSIVNAQLQEIFGENWQDANSEVYTLSKDKTQSQIINDVWHALFFFDDEEKLKEFAEKRLQLDEEMAEKFSKISLPNDYAALSLKAIRKILPYMRDYGLVYSQAVFLANLKEVLPSHIWGIKETREATIENVIDLMSAYDKNKEVRTIEQCVKGFLCERYGVSDRDLRKLYHPSMIDLYPHARENANGILQLGSPRISSIKNPMAMRSLFRLRKVVNLLLKEGKIDEETTIHIEFSRDLNDANRRWAIQAWQRQQEKERQKCSEELKRYVSDPSDRDILKYQLWEEQNHKCLYTGEEISITDFLGDTPKFDIEHTIPQSAGGDSTKMNLTLCNSRFNRDVKKTKLPSMLPDHDLILERIAMWKEKYETLERQIRKIATRGASSKEEKDARIKRRHFLSLQRDYWRGKYQRFLMTEVPEGFSRRQGTDISVISRYARMYLKSVFKHVYIVKGIATSDFRKMWGIQDEYSKKERINHIHHCIDAITIACIGKTEYDRLAHYYHVLDEYRQGRGQKPQFEKPWPSFVSDIMKIQDELLVSHYSKDSMPKQTRKQVRDKNGRREYDKNGNPLLIQGDTARASLHNDTYYGAIEVDGEIKYVVRKNLDSLDVKDVDNIVDSEVRHKVKQAISVHGSLKKALEATIWMNEEKQIPIKKVRIFMGSVKRPIHIRQHRDQSKHEYKRQFHVQNDRNYMMAIYKGFDRKGKEKSSFEIVSNIQAAQYYRSSYRDSNATIVPPSKNGYKLRYLLKIGTMVLLYENVPEEIWDLDRENLVKRLYKVTGLSSMMIGDYPYGTIVLLYHQEARPSSEVKAINGEFKTSNAFRPCIKLLHGQFKALVEGIDFELNDLGEIRRMK

SEQ ID NO: 3924 - protein, 1204 aa, unidentified
  REGION 1..1204: note = Description of Unknown: Cas Enzyme sequence
MERILGIDTGTNSLGWAIVDKEDGVTQLVAKGTNIFSEGVKIEKGIESSKAAERTEHRSVRKHYWRRKIRKIRLLTILSDNHLCPPLDKSSLRQWRLKKIYPDSELFMEWQRTEDKANVNPYKFRYVCLTQKLDLTDITQRYILGRALYHLNQRRGFLSNRKETTKESEGKVKEGISDLSDEMKSAGCEYLGEYFYRLYQDGKKIRNHYTARKEHYLKEFHAICDKQELDAELVKKLEKAIFDQRPLKSQKGQVGTCTFEKGKPRCPLSHPLYEDFRMYAFINNIKVQIHTLYENTERGLSKEEKKQVISLFKRKSKRTFPFEDIAKKLAGKNNYCYYKSDEDKPYRFNYQLDTQVSGSPVNAQLEEIFGEDWVTSVCEVYTLAKDKSRFQIENDIWHALFFYDDEDKLRVFAKNRLQLDDEQAEKFSKISMPNDYAALSLKAIRKILPYMRDYGLIYSEAVFLANLVEVLPQHIWGIKETREAAIENVIEVMHSYDKNNVDSVTLEQCVKGFLKDRYNISDDDLKRLYHPSMMELYPRQRPNDDGIYQLGSPRISSVKNPMAMHSLFRLRKVVNLLLKEGMITPETKIHIEFSRDLNDANKRKALQTLQRQNEKDREECRKKIAEHIDNPTDDDILKYQLWEEQNHKCIYTGEEIRITDFLGDNPKYDIEHTIPRSAGGDSTKMNLTLCSNRFNRDVKKTKLPSQLSNHDDILERIAGWKDKYEELDKQIRKINTKNVTSKEDKDRLIQRKHLLKEQCKYWKGKYDRFLMTEVPEGFSRRQGTDISVISRYARLYLKSVFKHVYIVKGIVTSEFRELWGLQNEYTKKKRDNHVHHCIDAITIACVDKAAYDKLAQYHHQQDEYKYDKGSRPDFEKPWPSFVNDVKHIQDELLIAHYSKDNMPKQAKRYVRDSKGNKVLTQGDTARASLHNDTYYGAIEVDGDVKYVVRKSLDTLEEKDIKNIVDAEVRSKVENAILLHGSLKKALEETIWMNEDKQIPIKKVRIFTGSVTRPINIRQQRDQSKHEYKRQYHVQNDRNYMMAIYVGRDKKGKEKREFELVNNITAANFYRRSNDRVPTDNQLVPLYSKNGYELRYKLKIGTLVLLYENSPEEIWELDRMNLQKRLYKITGMSSMVLREKDYYGTIEMVHHQNAKPSSEIKKVNGKYVSNEDFRSGIKMLHTQFKALVQGVDFELNDLGEIRRLI

SEQ ID NO: 3925 - protein, 1204 aa, unidentified
  REGION 1..1204: note = Description of Unknown: Cas Enzyme sequence
MERILGIDTGTNSLGWAIVEKDDNAYRLIAKGTNIFSEGVKIEKGIESSKAAERTDHRSVRKHYWRRKIRKIRLLTILSENSLCPPLRKEQLKQWRLKKVYPADDDFMEWQRTEDKANVNPYKFRYICLTQKLDLSDMTQRFILGRALYHLNQRRGFLSNRKESTKESEGAVKEGICNLSDDMRSAGCEYLGEYFYQLYQDGKKIRNHYTARKEHYLKEFHAICAKQELSAELVSKLEKAIFDQRPLKSQKGQVGTCTFEKGKSRCPSSHPLYEDFRMYSFLNNIKVQVDTMFEQGERYLTEEEKRKVIPLFKRKSKRTFPFEDIAKKLAGKNNYCYYKSGEDKPYKFNYQLDTQVSGSPVNAQLEEIFGEDWLTSASEVYTLAADKSRFLIMNDIWHALFFYDDEDKLKEFAMNRLQLDEDQADKFSKISIPNDYAALSLKAIRKILPYMRNYGLIYSEAVFLANLVEVLPQYIWGVKEMREAAIENIIDVMHSYDKNNVDGLTLETCVKAFLKERYQVSDEALKKLYHPSMLDLYPRQRPNEEGVYQLGSPRISSVRNPMAMHSLFRLRKVVNLMLKKGYITPDTKVHIEFSRDLNDANRRWAIQAWQRENEKDRERCRKEIEKYITTPSDTDILKYQLWEEQNHKCLYTGEEIRITDFLGDNPKYDIEHTIPRSAGGDSTKMNLTLCSNRYNRDVKKTKLPTQLSAYEDILERIHDWKEKYEELDKQFRRISTKGVSSKGEKDSKIRRRHLLSLQCDYWRGKYQRFTMTEVPEGFSRRQGTDISVISRYARMYLRSVFKQVYIVKGIATSDFRKMWGIQDEYTKKERVNHVHHCIDAITIACIGKTEYDKLAQFYHESDEYKQGRGKKPEFEKPWPTFVNDIKQIQDELLIAHYSKDLMPKQAKRYVRDSKGRKVLTQGDTARASLHNDTYYGAIEVDGEVKYVVRRSLDGLDEKDVKNIVDGEVRSKIENAILLHGSLKKALEETIWMNEDKQIPIKKVRVFTGSVTRPIHIRQHRDQSKHEYKRQYHVQNDRNYMMAIYVGHDKKGKEKREFELVNNITAANFYRRSNDRVPTDNQLVPLVSKSGYELRYKLKIGTMVLLYENSPEEVWELDKKNLQKRLYKVTGMSSMVIQGKFEYGTIEMVHHQNAKSSSDIKKVNGEYKDGEEFRSGIKMLHSQIRALIQGVDFEINELGEIIRLL

SEQ ID NO: 3926 - protein, 1204 aa, unidentified
  REGION 1..1204: note = Description of Unknown: Cas Enzyme sequence
MERILGIDTGTNSLGWAIVDKDENGYKLVSKGTNIFSEGVKIEKGIESSKAAERTEHRSVRKHYWRRKVRKIRLLTILSENNLCPPLKTADLRQWRLKKIYPKDEDFMEWQRTEDKANVNPYKFRYICLTQKLDLSDITQRFILGRALYHLNQRRGFLSNRKESTKESEGAVKEGISALSDEIKAAGCEYLGEYFYQLYQKGERIRNHYTARKEHYLKEFKAICTKQELDEELVIKLEHAIFDQRPLKSQKGQVGTCTFEKGKSRCPSSHPLYEDFRMYSLINNIKVQVNTMFEKGERFLTDEEKQKIIPLFKRKSKRTFPFEDIAKKLAGKNNYCYYKSGEDKPYQFNYQMDTQVSGSPVNAQLEEIFGEDWLTSVCEVYTLAKDKTRFQIMNDVWHTLFFFDDEDKLKEFAKNRLQLGEEDAEKFSKISIPNDYAALSLKAIRKIIPYMRNYGLIYSEAVFLANLVDVLPQHIWGIKEMRDATIENVIDVMHSYDKNNVDGITLETCVKGFLKDRYQVSDEALKKLYHPSMMELYPRQRPNDDGIYQLGSPRISSVKNPMAMHSLFRLRKVVNLMLKEGYVTPDTKIHIEFSRDLNDANKRWAIQAWQRENEKDRERCRKEVEKYITNPSDTDILKYQLWEEQNHKCLYTGEEISITDFLGDHPKYDIEHTVPRSAGGDSTKMNLTLCSSRFNRDEKKTKLPTQLAVHDDILERIKDWKERYEELDKQIRRISTKGAASKEEKDAKIRRRHLLSLQRDYWRGKYQRFTMTEVPEGFSRRQGTDISVISRYARMYLRSVFKQVYIVKGIATSDFRKMWGIQEEYTKKERVNHVHHCIDAITIACIGKTEYDKLAQFYHESDEYQQGRGEKPVFEKPWPSFVSDIKKIQDELLIAHYSKDNLEKYTKKNLRGKDGRIIRDQQGNKLQMKGDTSRNSLHNDKFYGAINHDGTIRYVYRTNIEDLDAKSIDNIVDPAVRGIIEAAIATHGSLKAAVNNGIWMNEEKRIPIKKVRIFRNDVKKPIELKDQRDLSDKEYKHHYYVTNDGNYMMLIFSKINNKGREIREHVVINSLEATEVIKSHKRTQNGKVAWESYYSKEGYDLIYKLKSGTMVLMYENNGDEIWDLDKRNLQRRLYIITKMKFDGRIYMMHHQEAREKKDLEEKSGLFKENEEYRPIIVNSYNQFKALVQGVDFEINDLGEIKRLI

SEQ ID NO: 3927 - protein, 1216 aa, unidentified
  REGION 1..1216: note = Description of Unknown: Cas Enzyme sequence
MTKILGIDTGTNSHGWAIVEKQADEYHLLDKGVDIFQEGVLKTEKGKEYSKAAERTAHKAARVRNYRIKLRKIRLLRILSDAHLCPPLSKVELSTWRLKKEYPKNELFMQWQSTDDESEKTPYAYRHKCLHESLDFSSITDRHILGRAFYHMIQRRGFLSNRKDQSADDTGMVKESISNLTQEMHDAGYEYLGDYFYSLYNKGEKIRNHYTARNEHYLAEFKAICEKQELDKNLGHEVVHQIEKAIFDQRPLKSQKGQVGKCVFEKNKTRCPSSHPMFEEFRMLSFINNIKIQTPNDGALRSLSAEERELIMPLFFRKSIIKKKQFVFEDIAKKLARREQYGFYKKSTDVEMPYLFNFPMDTSVSGCPVTAALIDIFGENWIDALCETYTLAEGKSRLDIVNDIWHVLFFYTDEAKLAEFGKNRLQLNDEDAKKFSKITLQNGYGRLCLKVICKILPYLRRGLVKDHAILLGNLCEVMPQYEWDIKEMRIAAIDNIIREINKTDTKDESTSEKRIKLEKRIKEYLKNQYHVSEEKLKKLYHPSKMDKYPRVLRTNDHGVYQLGSPRIDSVRNPMAMRSIFRLRKLVNRLLEEGKIDLDTEVHIEFARELNDANKRRAIAKFAKDNQKKNDEARKKIIDIMGEDYDVKDDDIKKYILWEEQGHICLYTGRQIAISDFIGNSQNFDIEHTIPRSVDGDSTRMNLTLCDSRFNREIKKTKLPAELPNHDEIMARINDWREKYESLDGQIRKLRGKSKGATTKKLKDDIIYNRHLLELQRNYWRGKYLRFTMEIVPEGFSRRQGTDIGVISKYARLYLKSLFKHVYTVNGIATSDFRKIWGVQDVYGKKERVNHVHHCIDAIVVACISRDEYDKLSAYYHNEENHKWYGMSKAYFKKPWPTFVEDLKNVQDEILVYHYTPDNMPKQGRRKILLDVEVDGIKKKKKVLCKGDAARGLLHSDTYYGAIENDGVVRYVKRINLASMKVTDVKNIVDDAVRGIVEAAIREKGFKEAMAGTIWMNEEKQIPIKKVRCYTSIKNPISFDKKKQRDLSDKEYKRNYYVTTKGNYIVALYVGSTKTGKRKTFYEFVNMMEAAGYYKTSNDKSVVGHNIVPLEKDDCQLAFILKKGTMVIFYKETKEEVWDYSQKETVRNLYYVSGIESDGRVTFKYHQEARRDEELPRNASDTSDIKPKIRVGLASAKILVQGYDFEINELGEIKRLR

SEQ ID NO: 3928 - protein, 1222 aa, unidentified
  REGION 1..1222: note = Description of Unknown: Cas Enzyme sequence
MTKILGIDTGTNSLGWAIVEKNADDYHLLEKGVNIFQEGVKIEKGIESSKAAERTAHKAARVRNYRIKLRKIRLLRILSDAHLCPPLSKAELSAWRLKKEYPKNELFMQWQATDDDSEKTPYAYRHICLHENLDFCSMTDRYILGRAFYHMIQRRGFLSNRKDQNGDETGKVNESISSLTQQMHDAGYEYLGDYFFFLYNKGEKIRNHYTARNEHYLAEFKAICEKQDLDKNLGPEVVRQIEKAIFDQRPLKSQKGQVGKCVFEKNKTKCPSSHPMYEEFRMLSFINNIKIQTPNDDALRPLTTEERELIMPLFYRKSKKQFDFEDIAKKLAPKKQYGFYKKSTDVAMPYLFNYPMDTSVSGSPVTASLKDIFGEDWINGLCETYTLAEGKTRLDVVNDIWHALSFYTDNAKLAEFAKNRLQLNDDEAKKFCDISLPGDYAALSLKAICKILPYLRRGLIYSHAVFLGNLCEVMPQYEWNIEEMRNAAIDNIIHEMNQIDSKDARTFEVYIKEYLKEQYHVSDEKLKKLYHPSMMEMYPKVQHTNNHGVYQLGSPRIDSVRNPMAMRSMFRLRKLVNRLLEEGKIDQDTEIHIEFARELNDANKRNAIAAYTKENQNKNDEARKKIKSLFKDETGKDIEPSDIDVLKYVLWEEQKHICLYTGKQICISDFIGSNPKFDIEHTIPRSVGGDSTKMNLTLCDSHFNRDIKKTQLPTELSNHDEIMARINDWKEKYESLDGQIRRQKKLSKGASSKEQKDGIIRKRHLLKLQRDYWRGKYLRFTMESVPEGFSRRQGTDISVISKYARLYLKSLFKHVYTVKGIATSDFRKIWGIQSIYSKKERVNHVHHCIDAIVIACIGLDEYNKLGAYYHDEENHEWYGKSKAYFKKPWSTFVEDIERVQDEILVYHYTPDNMPKQGRRRILLDVEINGRKKKKKVLCKGDAARGSLHNDTYYGAIEDDGVVKYVKRINLSTMKESDVKNIVDETVRGIIEAAIKEKGFKEAMAGTIWMNEEKQIPIKKVRCYTPSVTKPLNIRKQRDVSPKEYKQQYHVVNDSNYMLALYIGKDKKGKEKREFEIVNMLQTAQYFRTSNDKEAAGGNIVPVKSEHDYPFAYSLKIGTMVLLYEKSPDEIWDASLTEINKRLYKVVGLSAMRMKGRNVDYATIKLKQHEDARLSTELKAKNGAFKQGEELRPSIIMLHTQLNALVQGYDFEINELGEIKRLK

SEQ ID NO: 3929 - protein, 1212 aa, unidentified
  REGION 1..1212: note = Description of Unknown: Cas Enzyme sequence
MTKILGIDTGTNSLGWAIVDKTADNYNLLDKGVNIFQEGVKIEKGIESSKAAERTEHRATRVRYYRIKLRKIRLLRILSDNHLCPPLSQEELSTWRLKKVYPKNELFMQWQRTDDDTEKTPYAYRHKCIHEKLDLSDVTDRYILGRAFYHIIQRRGFLSNRKEQGGEDSGKVKEGISTLTHEMNEAGYEYLGDYFYALYNKGEKIRKHYTARNEHFLSEFKAICEKQDLEKELGSEVVRNIEKAIFDQRPLKSQKGQVGKCVFEKNKTKCPSSHPMYEEFRMLTFINNIKIKTPNDDVLRPLNTGEREKIMPLFFRKSKKQFDFEDITKKLAPKKMYGFYKKEEDAEMPFLFNYPMDTSVSGCPVTAALKDVFGDDWITAICETYTLGEGKSRFDIVNDIWHALYFYSDKDKLAEFAINRLQLSEDEAKIFSEISLPADYASLSLKAICKILPYLRRGLIYSHAVFLGNLCEVMPKYEWSIKEMRETIIDNIIMEMDRCDTKDKRTFEVCIKDYLKGQYNVSDNSLKKLYHPSMIETYPRVQYTNEHGVYQLGSPRIDSVRNPMAMRSMFRLRKLVNRLLVEGKIDQNTEVHIEFARELNDANKRNAIALFVKENQSANDEARKQIITLFKKETGTDIEPTDKDILKYVLWEEQNHICLYTGKQIRISDFIGANPKFDIEHTIPRSVGGDSTKMNLTLCDSRFNREVKKTKLPVELPNHDEIMERIKEWKKKYELLDIQIRKNKKLSKGATTKEQKDTIIRKRHLLELRRDYWRGKYERFTMESVPEGFSRRQGTDISVISKYARLYLKSLFNRVYTVKGIATSDFRKIWGIQDIYSKKERINHVHHCIDAIVIACIGLDEYNKLGAYYHDEENNKWYGMSKASFKKPWATFVEDIKKIQDEILVYHYTPDNMPKQGRRRIKIDGKKILCKGDAARGSLHNDTYYGAIENDGAVKYVKRIDLASLEEKDVKNIVDDTVRSIIEAAIKEKGFKDAMASTIWMNEEKQIPIKKVRCFTPSIAKPLNIRKQRDVSTKEYKQQYHVANDSNYLLALYIGTDNKGKEKREFEIVNMLQAAQYYRTSNDKEVVDRHIVPIKSEHDYPFAYTLKIGTMVLLYEKSPNEVWDATIKERNRRLYKVTGMSTSTIGNCVYARITMVYNEEARPSKDIKAKNGAYKQGEELRPAIIMLHTQLNALVQGYDFEINELGEIRRLR

SEQ ID NO: 3930 - protein, 1214 aa, unidentified
  REGION 1..1214: note = Description of Unknown: Cas Enzyme sequence
MTKILGIDTGTNSLGWAIVEKTAGDYNLLDKGVNIFQEGVKIEKGIESSKAAERTEHRATRVRYYRIKLRKIRLLRILSDNHLCPPLSHEELSAWRLKKVYPKNELFMQWQRTDDDTEKTPYAYRHKCLHEKLDLSDITDRYILGRAFYHIIQRRGFLSNRKEQGGEDSGKVKEGISTLTQEMNEAGYEYLGDYFYALYNKGEKIRKHYTARNEHFLSEFKAICEKQDLERELGVEVVRNIEKAIFDQRPLKSQKGQVGKCVFEKNKTKCSSSHPMYEEFRMLTFINNIKVKTPNDDALRPLNMEERESIMPLFFRKSKKQFDFEDIAKKLAPKKMHGFYKKDEDAEMPYLFNYPLDTSVSGCPVTAALKDVFGADWIDAICETYTLGEGKSRFDIVNDVWHALYFYSDKDKLAEFAINRLQLSEDEAKRFSEISLPSDYASLSLKAICKILPYLRRGLIYSHAVFLGNLCEVMPKYEWSIKEMRETIIDNIIMEMNRYDTKDKRTFEVCIKEYLKEQYAVSDDSLKKLYHPSMIETYPRVQYTNEHGVYQLGSPRIDSVRNPMAMRSMFRLRKLVNRLLAEGKIDQDTEVHLEFARELNDANKRNAIALFVKENQSANDEARKQIITLFKKETGTDIEPTDKDILKYVLWEEQNHICLYTGKQIRISDFIGANPKFDIEHTIPRSVGGDSTKMNLTICDSRFNREVKKTKLPIELPNHDEIMERINDWKKKYELLDIQIRKLKKQSKGATTKEQKDTIIRKRHLLELRRDYWRGKYERFTMESVPEGFSRRQGTDISVISKYARLYLMSLFNRVYTVKGIATSDFRKIWGIQDIYSKKERINHVHHCIDAIVIACIGLDEYNKLGAYYHDEENNKWYGLSKASFKKPWATFVEDIKKIQDEILVYHYTPDNMPKQGRRRIKIDGKKILCKGDAARGSLHNDTYYGAIENDGAVKYVKRIDLASMKESDVKNIVDDTVRGIIEAAIKEKGFKDAMASTIWMNEEKQIPIKKVRCFTPSITKPLNIRKQRDVSTKEYKQQYHVANDSNYLLALYIGTDNKGKEKREFEIVNMLQAAQYYRTSNDKEVVDRHIVPIKSEHDYPFAYTLKIGTMVLLYEKSPNEVWKATIKERNRRLYKVTGMSAMRMKGRNVDYATIKLLHNEEARQSKDIKAKNGEYKQGEELRPAIIMLHTQLNALVQGYDFEINELGEIKRLR

SEQ ID NO: 3931 - protein, 1212 aa, unidentified
  REGION 1..1212: note = Description of Unknown: Cas Enzyme sequence
MQIQEKVLGLDLGTNSIGWALIGRKEDHSCVLLDKGVHIFQDGVAHDKSGEKPAVQERTVARASRRHYFRRRLRKIELLKVLIDNGLCPHLTQEQLKQWKEKKVYPLTEDFMRWQRSDDTEEGNPYHDRYVALTRKLDMSDIRDRYILGRALYHINQRRGFLSNRKDSGGDAEDGKVKTGITQLSGLMDEAGCRYLGEYFFKLFRDGEKIRCRYTAREEHYRAEFNAVCEKQGLDGALKRSLERAIFYQRPLKSQKGSVGTCSFEKGKPRCPVSHPRYEAFRMEQLISSVKVRRPFEETFTSLNEGEKETIRPLFFRKSKPDFEFEDIAKKIAGKGNYAFRDEGREDQYCFNYRMSASVSACPVTAAILQALELDPSEDWETVLSSVYTKAEGKTPDQILNDIWHALYSFEDESLLSKWLQSSLQLTEERAGILSKIRIPQGYASLSLKAINKILPWLKKGFVYSDAVFYANLPAALPSGISGDAGKFDNVVENIGILLEDFSKDPTSRESSKIKSISDYLLGVAEGVHPERLYHPSMIEAYQAALPDGKGRIRLGSPRIDAVRNPMAMRSLFRLRALLNSLLDEGVIDADTKVNIEFARELNDTNMRKAIADWQKEQENLRKKYYEQIRGIFGADYEPTEDDLLKYRLYEEQKHICLYTGRQITPRMFLGNAIEFDIEHTVPRSRGGDDSLANKTLCDSRFNREVKKAQLPSALEGHEQILQRIGDWKETIESLEIQISKQRRNSKTAASKEQKDAAIRRLHYLRMKRDYWKGKYDRFTMTEVPEGFSNRQGVDIGIIGRYARMYLKTVFRRIYVVKGATTADFRKAWGLQKEYEKKERVSHSHHCIDAVTIACIGKNEYDRWALYMRMEEDYRFGKGPKPHFDKPWPTFTEDVLAIPSSLIAAHYTPDNLPKLSRKKLRVRGAIQRNNGGEPKYAQGHTARALLHKDTFYGAINKDGEIRYVVRKALDALDEKDIPKIVDDAVREKVQEAVALHGNLKKAVAETIWMNREKNVPIRKVRVYTPTITSPIALKAHRDSSDKEYKRSYYVSNDGNYCMAIYGEKKPSFKLFNALSAVNHFNGKPVDWIEPVDAKGLPLRCVVRTGMMVLFYEKTPDELYSCSQEELSRRLYEVTGLSSMTIQGKYHYGILTLKHHLEARSSTDLKEKKGLWKRDEALRPVIGINHNQALFLVENQDFVLSVSGRIRFLRGRT

SEQ ID NO: 3932 - protein, 1204 aa, unidentified
  REGION 1..1204: note = Description of Unknown: Cas Enzyme sequence
VDKILGLDTGTNSLGWAIVTKHDNGEYSLHEHGVNIFQEGVKIEKGIESSRAAERTEHRSLRKHYWRRKVRKTRLLTVLSQENLCPPVNKEEVRLWRCKGIYPQNDAFRLWQRTDDDKDVNPYHFRYICLTRKLDLTDVAQRYILGRAFYHINQRRGFKSNRKDSSQESDGAVKTGITTLSEDMVNAGCNYLGEYFYKLYQSGEKIRNHYTDREEHYLREFRAICSMQQLDDELVDKLERVIFSQRPLKSQKQSIGKCLFEPRKARCSTSHPLYEEYRMYAFINNIKIKTPADLDLRRLTTAEKQSIMPLFYRKSKSTFTFEDIAKKLSSGKNSYCYAGDEVKKPYVFNYHLDTQVSGCPVIAQLREIFGDDWVAGVRETYVLGENKSDADVINDIWHVLFSYDDKNCLKEFARNRLQLSDSDAEKFSDIRMPHDYASLSLKAINNILPYLKEYGMIYSYAVFFGKLRDIVPSYVAEDDKQFGELINDLLEYLNSEPEEEGATLEHRIKGYLKERYCFDNDDVKALYHPSMIELYPRQRPNAAGIYQLGSPRINSVRNPMAMHALFRLRKVVNQLLASGKVDENTVIHIEFARELNDANRRKAILDNERNNEKQRAKYRDSLMEVYREQGIERAPSDIDILKYQLWEEQNHICVYTGETISFTDLFGSNPKYDIEHTVPRSVGGDSTKMNLTLCNSRFNRDVKKAQLPSQLANHADVLQRVAPWKKTYEDLDRQIRKLRGSSATDKAQKDAIIQKKHRLSLQRDYWRGKYQRFTMTEVPEGFSRRQGTDISVISRYARLYLRSVFRKVFIVKGIATSDFRKLWGIQNEYEKKQRVNHAHHCIDAITVACIGPDEYGKLAHYYHQLEDSEMYGKDKPKFDKPWTTFTTDIEHIPDELIVAHYTCDNMPKSARRRIVTPEGRVLAKGDVARGSLHLDTFYGAIARDGNIKYVVRRDLATMAESDIQKIVDDSVRECVAEAVAKHKTLKAAVEADDVWMNREKGVRIKRVRVYADSVARPIDIRHQRDMSRHEYKRQYHLQNDRNYMMAIYIGKDAKGKEKREFELVRNIDAANHYRRSNATDIPLVPEKSRSGYTLAYQLKPGTKVLLYENSVDEILACDRKDLCKRLYTVIGLSSMVISRYTYGTICLEHHQEARQGKDLKAKNGVFKSNEEYRPRILFYHTQIKALVEGVDFEINELGEITLLR

SEQ ID NO: 3933 - protein, 1204 aa, unidentified
  REGION 1..1204: note = Description of Unknown: Cas Enzyme sequence
MSRILGIDTGTNSLGWAVLDKEGDEYCLVHKGTNIFTEGVKIEKGIESSRAAERTEHHAVRRHYWRRKVRKIRLLTILADNHLCPPLAKEDLREWRLKKVYPQEEGFMGWLLTEDKTGVNPYHFRYLCLTQKLDLSNVTQRYILGRALYHLNQRRGFLSNRKENTKVSEGDVSKGISDLTQEIEQAGCTYLGEYFYHLYERGEKIRKHYTARKEHYLKEFHAICQKQELDAALIKKLEDAIFTQRPLKSQKGLVGTCTFEKGKPRCPVSHPLHEEYCMYHFLNNVKIQTPSDTALRPLTRQEIDCLIPLFKRKSKRSFNFDDIAKKLAPKNSYCFYKDKEQKPYRFNHPMDTSVSGSIVSAQLEDIFGPQWLDAVCEVYTLGNGKSRFEILNDIWHALFFFDDEDKLKEFAKSRLQLSDDDATRFSKISLPQDYASLSLKAIRKILPYMRDYGLIYSHAVFLGNLKEVLPSHVWGVPQVREAAIEKVIEVLLSVQQTSDARTQEQCVKDFLKERYQVDDKALDKLYHPSMIDLYPRVKPNDNGIYQLGSPRISSVRNPMAMHSLFRLRKVVNLLLEKGYIDEETTIHIEFSRDLNDANRRWAIQQWQRQNEKERERCKKEIEKLFQEATGKQIVEVSDRDILKYQLWEEQHHKCLYTGEEISLTDFLGQHPKYDIEHTIPRSAGGDSTKMNLTLCSSAYNREVKKTHLPTELAEHEAILQRIEEWKERYEDLDRQIRKTKGVFAATKEEKDKKIRRLHLLSLERDYWRGKYQRFTMTEVPEGFSRRQGTDISVISRYARLFLKSVFRHVYIVKGIATSDFRKIWGIQEEYTKKERVNHVHHCIDAITIACIGPDEYAKLAQYYHDEENHEWYGKSKGQFTPPWPTFVEDIRKIQDELLVAHYSEDRMQKRAKKKIKKSDGSVLKDSQGRVQYAQGDTARGILHKDTFYGAIIHQGELKYVGRTELTKISEKDVENIVDDVVRKKVQEAIQIHGGLKEAIAAKIWMNKEKGIEIKKVRIFVKQTKPIPIKLHRDLSRHEYKQQYLAWNDSNYLLAIYEGKDKKGNIARAYNEIKIIDAAKLYKQSHSSQLISAISDEGFALKYELKIGTMILLYDYSPDEIWNGTLQTKKDRLYVITGMSLTNGRIVVVHHQDARQAKDLKQEAAAYDYDGKLKPMLRISLSKFKALIQGFDFEINDLGEIHRLR

SEQ ID NO: 3934 - protein, 1195 aa, unidentified
  REGION 1..1195: note = Description of Unknown: Cas Enzyme sequence
MERILGIDTGTNSLGWAIVEKNDSGYKLLEKGTNIFAEGVKIEKGIESSKAAERTEHRSVRKHYWRRKVRKIRLLAVLIDNDLCPPLSQNDLRLWRLKKKYPMNDDFMAWQRTDDKECVNPYRFRYICLTQKLDLSDQTQRYILGRALYHLNQRRGFLSNRKEAAKESEGAVKEGISDLTAAMEEAGCTYLGEYFYQLYNRGEKIRSHYTSRKDHYLKEFHAICKKQELDAPLVEKLERAIFTQRPLKSQKGTVGVCTFEKGKARCPVSHPLYEDFRMLSFLNSIKMQTPQDFQLRYLTKEEKSLVIPLFKRKSKKTFLFEDIAKKLAGKNNYCYDGDEANKPYRFNYQMDVSVSGSIVNAQLEDIFGPDWLDAVCEVYTLADGKSRTDILNDIWHALFFFDDEEKLKAFAKSRLQLDDTQAEKFSKITLPSDYAALSLKAIKKILPYLKDYGLIYSQAVFLANLVEVLPSHVWGIRETREAAIENVINVMLSYDKRTDSRTLEGCIKDYLRERYHVEEQKLRKLYHPSMIDLYPHVQPDDDGVYQLGSPRISSVRNPMAMHSMFRLRKVVNLLLKEGKIDENTVVHIEFSRYLNDANRRKAIQDYQRENERDREACRKKIEEFGRKEVSDTDILKYQLWEEQNHKCLYTGEEIKLADFLGANPKYDIEHTVPQSAGGDSTKANLTLCNSKFNREVKKAQLPSDLANHEEILQRIAAWKETYEELDRRIRRLKGSRASSKEEKDSIIRRRHLLSLQRDYWRGKYQRFTMTQVPEGFSRRQGTDISVISRYARLYLKSVFKHVYIVKGIATSDFRQIWGIQEEYSKKERVNHVHHCIDAITIACIGKSEYDRLAQYYHQDEAHRWGQSIDKAQFPKPWPTFVSDIKNIQNELLIAHYSKDNMKKHTRKRGDNGYMQGDTARASLHNDTYYGAIDVDGEVKYVVRKNLDILGEKDVKNIVDEAVRQKVEDAILKHGNLKKALEHTIWMNEELQIPIRKVRIFTGSVTRPIHIRQQRDLSRHEYKRQFHVQNDRNYMMAIYIGRDKKGKEKREFEIVNNIDAAKFFKRSTGTTDGLIPQKSVKNGYPLAYCLKIGTMVLLYENSPEEVWELDRQNLVKRLYKVTGLSSMIVSGNPYGTIALVFQQDARQSTEIKLKNGAYNANEELRPGIKMLHTQFKALVQGVDFELNDLGEIRRLI

SEQ ID NO: 3935 - protein, 1225 aa, unidentified
  REGION 1..1225: note = Description of Unknown: Cas Enzyme sequence
MSKVLGLDLGTNSLGWAIVEETGCGYSLLDKGVDIFQEGVAREKNNEKPAVQDRTDARALRRHYFRRRLRKIEVLKILIENDLCPRLSEELLTEWRRNKKYPLDEAFIRWQRTDDNIDKNPYHDRYRALTETLDLNKEDDRHALGRALYHLAQRRGFISNRKDAGKESEDGQVKQGIKNLTADMENAGCRYLGEYFHMLYLQKEKIRKKYTSRNEHYLAEFRAICAKQHLPELLEQALYRAIFFQRPLKSQKGAVGKCTFEKRKSRCPVSHPHFEEFRMHSFINNIRIAAPEDNDFRPLTQAEAETIVPLFLRKSKPHFDFEEIARKIAGKGRYACKGDRNEAAYRFNYARIATVSGCPVTASLVAVFGDEWLTEICRRYTLASGKSEQQILNDVWHALISFDDEERLRAWAREKLRLEEEQAANFASIRMPQEYAALSLNAIEKMLPYLRAGYRYDEAVFIANLKAALPQTIYEDETHRHEIEQDIVRLLLDYKRNPYDKYDSKERRIEAYFSDNGLDVSRLHRLYHPSMIESYHVQRPDSNGLLQLGSPRTPSVRNPMAMRALFRLRILINRLLRDGKIDPATKINIEFSRGLNDANKRKAIEQYQREREAEHRRFADEIRKQYAAETGTEIEPTETDILKYRLWEEQKHVCPYTGNQIRISDFIGSATDYDIEHTVPRSRGGDNSQMNNTLCENRFNREVKRAKLPSELSGHAEIMAHIEGFGWQEKIESLQKMVEAQVRKSKSAATKTEKDNAIQRRHYLQMQLAYWRGKIERFTMTEVPDGFSNRQGVDIGIIGRYARLYLKTVFERIYTVKGATTAEFRKMWGLQTEYAKKERVNHVHHCIDAITIACIGRSEYDHWARYVGDEERYLRNEGTRPQFEKPWPTFTEDVKAIADELLVSHHTPDNLPKQSRKRLRIRGKVQVDGQGKPIYMQGDTARGALHQQTFYGAIMRNDEIKHVVRKSLDQLQPADVEKIVDDAVKQKVKDAIECVGFKTAMNPAEHTIWMNREKAVPIRKVRIFTPSVTKPIHLKPQRDASAKAYKQDYLVTNDGNYCMAVYEGTDKRGKTRRSFEIVSNLEAAKYFKASADRTARPDLVPITDANGDPLKCLLKTGSMVLFYENSPEELHECTQKELAKRLYKVTGMSTLVLQQKYFYGTLTLKHHQEARPAGELKAKNGVWKIGEEYRPIIAIYHTQLNAYVEGYDFDMTVTGEIEFKHHPSC

SEQ ID NO: 3936 - protein, 1226 aa, unidentified
  REGION 1..1226: note = Description of Unknown: Cas Enzyme sequence
MQRVLGLDTGTNSLGWAVVDRNANEQGDYALIDKGVVIFEEGVNIEKGKESSKAADRTAHQALRTHYFRRRWRKVETLKVLIAHQLCPVLSDEDLHRWRTKKIYPLTKDFMAWQSTNEHEGRNPYACRHRCLHEQLNLEDTADRFVLGRALYHLSQRRGFLSNRLDSTPEKESGAVKEGIKDLSAEMQKAGMEYLGDYFYHLYATKGNTVRLRARYTHREEHYYKEFQAICRKQQLPQSLCKALERALYFQRPLRSQRQTVGKCPFEPNKSRCALSHPAYEEFRMLQFVNNIKVVDIDAATDPLGEQKKLPMRPLNPEERALAISRFTLKSHASKSTIDFEDIAKAIAGRGQYQHISDPGERAYRFNYRMKQGFAPSRTTIALRQLFGEDYRAGIAECYTQNTHRDNTPKTLDEMVTDVWNILYSVEEDKHVVRWAKRYLQLSDKEAEQFSEIRLISGFASLSLSAIQKMLPFLREGYLYSHAAFLANVPTIVGSQTWTAHQDEILHDIRCIFSDESIRGNDGVSQVIKDYLKDNWPDEPGAPDRLYHPSQLEVYPDAKRNAQGILQLGSPRTSAIRNPMAMRSLHKVRKLVNTLLCEGTITADTEVHIEYARELNDFNKRTAIGRWQKDQESLRADAVKEVSKFLNGATPTPMDILKYQLWEEQGGYCLYTGDQIALSDFLCANPLYDIEHTIPRSVGGDSTKENLTLCNRRFNREVKQAKLPTELANYEDIKERLKPWRQKAARLRDTLDKIRTFQGMEKAAKDATIQKRHKLKMELDYWEGKLQRFNMKEVPEGFSLRQGIGIGLISKYAGLFLKSLFKSEHLDRNGKKVPNVRVIKSPLTAEFRRLWGLQEDYEKKSRDNHVHHCIDAITIACIGAAEARDMAEFYRAEEAMRWGRSGKPHFRKPWATFTEDVKAIAQDLLVVHHTADNLNKAARRRVKGSDGKLHLSISDSARASLHNDTYYGAIQQGDIVRYVQRRPLSGMKETDIKNIIDDAVREKVETAIQKWGSLAKALEQGIFMNEKKGIRIQKVRCYAPSKYSNLAHIRTHRDESRHDYKRTFHVAPEGNYMLAIYEGKVGRRVERSAKILSNLEATRKFKQGTTRHTLFPETHEGFNLKYTLIKGQMVLLLNEGEEHLDFNNKKLLAQRLFEVVRITYEVAKKRGFITLKHHQEAKPSGELQFQKGSFSSESWRSTYIQAHTQFRALIEGADFLISNDGKISPR

SEQ ID NO: 3937 - protein, 1226 aa, unidentified
  REGION 1..1226: note = Description of Unknown: Cas Enzyme sequence
MQRVLGIDTGTNSLGWAVVDRNANEQGDYALIDKGVVIFEEGVNKGKESSKATERTRHHALRTGYFRRRLRKIETLKVLIAHELCPALSEEDLHRWKVKKVYPLMQDFMAWQRTDEHEGKNPYACRHRCLHEQLDLEDTADRFVLGRALYHLSQRRGFLSNRLESTPEKDTGDVKKGIKDLSAEMQKAGMEYLGDYFYHLYATKGNTVRLRARYTHREEHYYKEFQAICRKQQLPQSLCKALERALYFQRPLRSQRQTVGKCPFEPNKSRCALSHPAYEEFRMLQFVNNIKVVDIDAVVSPLGDRKKGKAPMRPLTTEERATAFKRFTLKSHASKSTIDFEDIAKAIAGRGQYQHISDPGERAYRFNYRMTQGFAPCRTMIALRQLFGEDYHSGIAECYTKHAHRDGSPKTQDEMVADVWNILYSVEEDKHVERWAKRYLQLSDKEAEKFAKIRLASGFANLSLTAIQKILPFLREGYLYAHAAFLANVPTIVGAQVWEEHRDTILHDINCIFSDESIRGSDGISQAIKDYLKDNWTDRPGATDCLYHPSQIEVYPDAQPNKQGVLQLGSPRTSAIRNPMAMRSLHEVRKLINFLLREGLITPQTEVHIEYARELNDSNKRAAIGRWQKVQEKLRAKAVKEVSAVLKGGTPTEMDILKYQLWEEQGGYCLYTGHQIKPLDFLCPNPLYDIEHTIPRSVGGDSTKENLTLCDRRFNREVKQTKLPTELANYEDIKERLEPWREKVEKLRKALDKARTFQGMTKKAKDDTIQKRHKLKMELDYWEGKLRRFEMTEVPEGFSLRQGIGIGLISKYAGLFLKSLFKSEHLDRNGKKVPNVRVIKSPLTAEFRRLWELQEDYEKKSRDNHVHHCIDAITIACIGAAEARDMAEFYRAEEAMRWGRSGKPHFRKPWATFTEDVKAIAQDLLVVHHTADNLNKAARRRVKGSDGKLHLSISDSARASLHNDTYYGAIQQGDIVRYVQRRPLSGMKETDIKNIIDDAVREKVETAIQKWGSLAKALEQGIFMNEKKGIRIQKVRCYAPSKYSNLAHIRTHRDESRHDYKRTFHVAPEGNYMLAIYEGKVGRRVERSAKILSNLEATRKFKQGTTRHTLFPETHEGFNLKYTLIKGQMVLLLNEGEEHLDFNNKKLLAQRLFEVVRITYEVAKKRGFITLKHHQEAKPSGELQFQKGSFSSESWRSTYIQAHTQFRALIEGADFLISNDGKISPR

SEQ ID NO: 3938 - protein, 1222 aa, unidentified
  REGION 1..1222: note = Description of Unknown: Cas Enzyme sequence
MKKRILGLDTGTNSLGWAVVDRDENDEYSLVDRGSVIFQEGVKIEKGNESSKASERTGYRASRKHYFRRRLRKIETLKALIKYGLCPPLSDEALDLWHKKKIYPLDDDFMLWQRTSENEEKNPYYYRHVCLHETLDLSKQSDRYMLGRALYHLAQRRGFLSNRLDSTSEDERGKVSQSISSLNEEMRKAGFEFLGDYFHHLYSTKRNTVRLRARYTDREGHYLKEFDEICRVQRLDDDMVDDLRRALYFQRPLKSQRSGVGHCTFEPKKPRCAASHPEFEEFRMLSFVNAIKIQTPKDEALRGLNDEERANIEPLFYRKSSPNFDFEEIAKKLAGKNGYMYFKDQGDKPYKFNYRMTQGVAGCATIAQLKAIFGDDWRQGIAETYVRMGGGKRIDEAVNDVWNVLYSFSSEEKLMEFAKTRLQLDDERAEKFSKIRLTSGFASLSLKAIRKILPFLRQGMIYSEAVFFANIPTIISRELWERDKEAIMDEFARIIRNTNAADRRMQGTMDFMIKDYLRNNYDLKPGAADTLYHPSMIETYPDAKMEDGVYQLGSPRTNAVRNPMAMRSLHQVRRLVNALLRNGIIDNTAEVHVEYSRDLNNANVRKAIATYNKEQEKLHKKYRDEIKKLYKEETGLEIEPTKEEILKFQLWEEQGRLCLYTGRQIGIADFIGANPEFDIEHTIPRSVGGDSTMENLTLCEKRFNRDVKRAKLPTQLANHEEIMARLDGWLEKIDGLEKKISDKSLKTFTGMEKDIKDKRLQKRHLLKMEKEYLLGKYKRFTMTDVPEGFARRQGVGIGLISKYAGLYLKSLFHKPDDRNKSNVYVVKGPTTAEFRKLWGLQDEYEKKERVNHVHHCIDAITIACIGKKEYDEMARYFREYEAFERSEANRPTFKQPWPTFAADLNRLEKELLVVHSTKDNLPKKAKKVVKTAKGKVVATGDSARGSLHLDTYYGAIERDGEIRYVVRKALTDATFFDSPKKLDLIVDEAVRERVKQAVEGKNFKEAMAEPIYMNKEKGILIKKVRCYMNGVKNPLDIRKHRDMSTKEYKRQFHVANDSNYLMAIYEGRVKGKVKRDFEIVNMLDAAKHFKTSMSKEEFPTLVPQRSANGLEMKSRLFIGTMVLLYEKSPDEINFYDMRDISKRLYKVTGLSSMFVGNYYGVIKLRHHEEARPSSDVKFKNGAYKNNEQLRSGITMLHTQLNALVEGEDFTIDELGKINLINR

SEQ ID NO: 3939 - protein, 1368 aa, unidentified
  REGION 1..1368: note = Description of Unknown: Cas Enzyme sequence
MNNRTILGIDLGTNSLGWSVLEKESNQFKLKDKGVVLFDEGVITEKGNEKSKAAERTVYRSARRLVFRRKLRKYETLKVLAKHQMVPLSLEEVKAWQLSNFSGYPKSQAFFEWLRTDDKILKNPYFLRAKAVNEKLNKQDLGRVFYHLAQRRGFLSNRLEKAKNEKETGVVKENIAEISKKIESSGAKSLGEYFWQLYQKDRSATENKIRKQYLGRKEHYLKEFELICKTQELPEELCLALKKAIFYQRPLKSQKGLVGKCVFEPRKNRIPVSHPTFEAFRMWSFINNIKIKTPYDEDMRPLTDFEKQKIIPLFESSPSTKHFKFEKIAKKLIAPEFKKAKIAYQKSKEVGLAHYLFNYDLKTSVSGSPVTALFKKYLGDDWTERVFTYEITKPSGQKLIKTADFHDIWHVLFTFEDDDKIKEYFTLKLGLDEETVEKFVNFNLPQGYASVSFKAARKILDFLIEGFTYDKAVILARIPDIVGMELWGVPENRKKIIDKVQQIFENNSQKQKIDSSVNKTLYELYQNKISNSLALENLLKTNIYKVFGKKTFENLPENEKLLQTAFRILMERLQYEKLEDQFIKQQTIEEQVKDYLKKTFNVTDKELKLLYHPSMTDIYPKPPLAKDGKRYLGSPIINSIKNPVMMRAMHLLRRLVNELIRKEIVNNETVVHIELARDLNDANMRAAIKKHQREREKEHQKYVEEIRKTFLENGINREPNAEDIRRYRLWKEQGEISIYTGEPIPLHLLFDGNRYDFEHTVPRSQSYDNSLANLTIAESYINRDIKKNKLPSSLDNFEEIQQRLEPWKAKLSKLESDINTEITRTRMATTKEEKDRHIQNRHYLKIQKDYWEKKVNNFELAEIKDGFKYSQLNDTRLITKYARAYLKSVFPVVHIVNGNITAEFRKLWGIQEKDEKKSRSNHIHHAIDATVVAAITRYAYNKLAEAWKKKEENLEKEAKKLIEETKPWETFTTDILNLHKETFIFHDFKDNLPKHTKKKKRKRDVIEYRCVKTLPLWFQKLVEKGVYKPDKDYKIIDDNGVISYKIPKYLEGDTARGVLHRESIYGAIAQKDDKGHIIKDKNGEVQVDYVIRKAIDNISVSDAEKIVDPVVRKIVLNDLKTKTELIKKKDEINKALRNTTEEKEAELLKEKEQLETELAKLFRLPTNKGGFVPIRKVRIKTRVKEPLPEFKKHRDLSAKPYKQWIHVENKENYAMAVYEGMDRKGKLQRDFEIIKNIEAVEYFKRSNVQYRQNHELVPETKKGLTLKYILKKGMSVLFYKDTPDELKELSKEELVKRLFVIINLEKDGRFYFLPQQLAGEMKDVKENTSSQIVFNNISLLRLRKSKWNFIVNNIDFKISIDGKIDFKF

SEQ ID NO: 3940 - protein, 1154 aa, unidentified
  REGION 1..1154: note = Description of Unknown: Cas Enzyme sequence
LNEENRKTVNYFLLNFQNSLKRQIIMAKILGLDLGTNSIGWALIDDKLNKILGIGSRIFPMGVENLGDGDNEMSKNASRTGARGVRRQFFRRRLRKKVLLKSLSENNMCPMSLKDFEDWKQTKQFPSEKLATWFAMNPYELRQKALNEKLSLEEIGRIFYHLIQRRGFLSNSRKGGSDDGAIFKGNAKEGKIGIDDTLESIEGKTLGSYLYEIYPKENQPFQDGLERIRNRYTTRKMYIDEFELIWDKQSQFHSVLNYDLKTTFGGRKQDGYKEDGIIFHQRPLRSQKHLVGNCSFEPTKTKCPLSAIPNEKRRAWEWVNTVEYNGKKISQGEKEKMIEILYSIPLGKEKVDFKVLRKAIGKESAEFKFNYKDDDKIVGTHTISNLSNKKFFGKKWFDFSEKEQEDIWHVLYFFDSKSNLKDYAIKNWSFTEEQAIAISKFNVKDGYASLSRKAIGNILPFLQQGYTYDVAVVMGGIKNSFGDKWQNDTAENNQKQLDLIDNVYDIVRAKISGGFIDTVKDLLRKEFQFNNKQLKKLYHHSATIDVTALLEKLPIGKEADKEIQAIRNPIVITALFELRKLVNELIEEHGQLDEIKVEMARDLKISKSQRNKIRRDQKRLERENDRVKTEVEKYTRVSHDNILKFKLWEECKQTCPYTGVSIPVSKLFTGEIQIEHIHPWSRSLNDSFNNKTLCYADENRRKGDKTPFEFYGNDELDWIARKERALKLFSDTKEYPNAYQKFKRFVQQKFDDDFSSRQLNDTRFISKEASTYLTQICKKVNVSPGQMTANLRQKWGLNTVLNDENAKTREDHRHHAIDALVMACGKTSYLQELSKWNRYNRNYDLKDFPMPWETFRFDAEKAVDKILISHKRISNDITIRYTKVEKNGKTHINKGVAARGQLHKEFVYGKRTAPFSDEAYHIRKSIDSLTTEKQLEKVVDEVIKKLIHKRIQELGGFVKGTIPVNTFFIVDENGVKQPQILLPNKNGSPVPILKVRMKENFSGAEKLKDDVNQWVNPRNNHHVLIYKDEKGNLKEEVVTFWTVVERKSKGFPTYQLPAEGKEIVTALHINDMFLLGLNEDEINWVNPDYEILRDSLYRVQKLTSGDYFFRKHKSSTVTDDDYKQIRGFGDGKTGWFTFNPIKVKVSVSGKISRI

SEQ ID NO: 3941 - protein, 1135 aa, unidentified
  REGION 1..1135: note = Description of Unknown: Cas Enzyme sequence
MSKILGLDLGTNSIGWALIENTTILGMGSRVFPEGVINLGEGEGREISKNASRTDIRGKRRQFFRKRLRKRYLLKELAKHSLCPIPASLIRDWNGIEIFKNELLQEWLRRNPYELRAKAVSEKITLLELGRIFYHMIQRRGFLSNSRSAGSEVKESSTLFKGDTKIGKIGINETLQSIEKKKTLGSYLHSIFPKENEPFSGELERIRNRYTTRQMYIDEFEAIWEFQKNHHSELTNNLKTIIGGRKKDGYKEDGVLFHQRPLRSQKHLVGHCSFETKKTKCQLSAIPFEMFRVYQWVNTVSYDLNGERQKITPQEKEKIVALLLSKEKIKFKEIRQKINRLEAYYQFNYKDNEQIIGTHTINKLSNKMFFGKEWFNFSDTEQENIWHILSFFDDRDKLKEYAIKNWNFDEEKAIKISRFNLKEGYANLSRKAINNILPFLKLGFMYDIAVGLAGVKNVLGNSYKEHEQFVFDNVPEIVRSNLKGGYIEPLKQMMKNEFSCTEIQLKKLYHHSRSITTNDVLDRLPLGPEADKEIQKIKNPVVITALFEIRKLVNEIIDAYGKPNEIKVELARDLKASKKNRNDTRRKQQVLEKENDRVKGEIEKLGMRLNHTNILKYKLWEECNHTCPYTGQTITISQLFTSEIEIEHIFPWSRSLNDSFNNKTLCFTNENRAKENKTPYEFYSSQGDKKWEIIKLQALNCFKTKAKYPNCYTKFKHFVKKKHDEDFISRQLNDTRYISKEAKNYLSKICTKVLVAPGQMTATLRHHWGLNSILNKEDNTKTRDDHRHHAIDALVMACSTRSHLHELTKRNRYRKNHELKDFPDPWFNFRRDAEKAVEQILVSHKKTKNILTIRTRTTIKKGVKHRNIGVAARGQLHKESVYGKRKDVFTKELNYHIRKPLILLSAAEIPKIVDLEIKKIIYKAIEEIGLNIDDNRKPIVKTREDKKLFEQLLSKPFFLPNKNGNPVPIKKIRIQKKFSNAKPLKESKNQWVDLGKNHHVLIYKDFNGNLKEDVVTFWTAVNRKRKGKEVFQLPKDGKEMVTTLQKNELFLLGLKDDDIDWKNLNYNLLKKHLFKVQTLSSFYYEFRLSTDSTQNKDTKSKVFRRITSFSDGKAGWKTHNPIKVKVNSIGKIEKM

SEQ ID NO: 3942 - protein, 1460 aa, unidentified
  REGION 1..1460: note = Description of Unknown: Cas Enzyme sequence
MAKILGLDLGTNSIGWAIVDKEGNDFSLVDKGVRIFSEGVKSEKGIESSRAAERTAFRSARKIKFRRKLRKYETLKVLSINGMCPLSIEEVEEWKKSGFKKYPLNPEFLKWLRTDEDENINPYVFRDRASKQKVSLFELGRALYHIAQRRGFLSNRLDQSAEGILEEHCPQINSLIEDSNSNTEILIELKDYFFNVGILDETNKGGFKKELDEGEAKLKTLYNALLGIVKRNENKFIAAKEEIITRLNRKEDLGKVKGKIKDISQAMIDGNFKTLGQYFFSLYNKSKIRNQYTSREEHYLEEFNVICKTQGIGEITADELLPEKKYNGLAKDLYKAIFFQRPLKSQKGLIGKCSFEKSKTRCAISHPDFEEYRMWTYLNTIKIGTQSEKTLRFLSLEEKQSLISKFLRKKDNFNFEDLAKELVPKGAISGFYKSSKINEFHYLFNYKPYDTVTASPVSASLKNIFGDDWKTKTISYKTKNSKGIEVNRTVDYKDLWHLLSVSTSDIYLFQYAKEKLGLDDKDAKAFSKIRLKKDFASLSLNAITKILPYVREGLLYSHAVFMANIESVVDESIWNDSDQRKFIQDKIAEIIENHTFENGKLEAINSLIKECKTVGAFYSKEAESIYKSDLDKKLIPFVKFNKIEPDKEAILNELFPVLIEQLKKYEYIKINRLDEKVLDFIKGKNDDGEIFCTNEKRINKLYHPSDIEVFKKKIIKDEFGNEKVVLGSPLTSSIKNPMAMRALHQLRKVLNTLIFEGQIDEKTIIHIEMARELNDANKRKGIQDYQNENKKNREEYAKDIRKLYFEECKKEIEPTEDDLLRYQLWLEQNRQEIYEDGRNISICDIIGTDPKYDFEHTIPRSRSQDNSQMNKTLCSQKFNRDIKGNQMPVELNNYLEILPRIAHWKEESDNLTREIEIISRSIKAAATKELKDKKIRRRHYLILKRDYLKGKYDRFIWEEPKVGFKNSQIPDTGIITKYSQAYLKSYFKRVESVKGGMVAEFRKIWGIQESYQENDKKYFHEKDRSKHTHHTIDAITIACMTKEKYDALANAWTHEDKGQLREARKLLADSKPWKTFKEDLKKIEEEILVSHYTPDNVKKQSKKIVRIRGKKQYVAETIKDLNGKAIVQKDANQKVIFKLDNDGKKLPRLQQGDTIRGSLHQDSIYGAIKNPLNTDEIRYVIRKDLESIKASDVENIVDEMVKMKVKEAIVNKVLLISSNAQQKNKLDGTVWMKEPDEENDIVGIPINKVRLYANSVKNPLEIKTHSDLSKSRHEHKQKVYGQNDENYCMAIYELDGKRDFELINNFNLAKLIKQGQGNYPSSKEKEVKGKKVQIPIAKSNNRDVVLKRGLQVIFYDKEIEKLKDITEIIDFKGRIYIIEGLSIQRIPSVSGSVNEYGVITLRYFKEARKSDEIKKDNFKPDGIYKLGEIKPTRKMNHSQFSAFVEGIDFRVLPSGKFEKI

SEQ ID NO: 3943 - protein, 1135 aa, unidentified
  REGION 1..1135: note = Description of Unknown: Cas Enzyme sequence
MSKILGLDLGTNSIGWALIENNTILGMGSRIFPEGVVNLGEGEGRETSKNASRTEARGVRRQIFRRRLRKRYLLKELAKYNLCPISPALIKDWNGTEIFNNNELQEWLKLNPYKLRAKAVSKKITLLELGRIFYHMIQRRGFLSNSRSAGSEVNESSTIFKGDAKIGKIGISETLQSIEKNKTLGSYLHSIFPKENEPFSGELERIRNRYTTRQMYIDEFEIIWEFQKQYHSELSFILKTVLGGRKKDGYKEDGVLFHQRPLRSQKYLVGYCSFEPKKTKCPISAIPFELFRIHQWLNTLSYDINGVKQKITTQEREKIVALLLSKEKPSFKEIRKTIDKLDRHYQFNYKDDDKIVGTYTISNLSNKKFFGKQWFDFSDEEQENIWHVLSFFDDRDKLKEYAIKNWDFDEEKAAKISKFNLKDGYSNLSRKAINIILPFLQKGFMYDIAVGLAGVKNVLGNSYKEHEQFVLDNVPEIVRSSLKGGYIEPLKNTMRNEFNCTDKQLEKLYHHSSAIETEKILERLPVNLHADREIQKIKNPVVIAALFEIRKLVNEIIHTYGKPNEIKVELARDLKASKSNRLDSRKKQKELEKQNDRVKVELEKLNQRINHINILKYKLWEECNHTCPFTGQTITISQLFTGEVQIEHIFPWSRSLNDSFNNKTLCFSDENRAKGNKTPYEFYNKQGDKKWEAIKLQALSCFKTKANYPNSYNKFKHFVKKKHDEDFISRQLNDTRYISKEAKNYLSKICNNVLVAPGQMTAILRHHWGLNSILNTEDNNKTRDDHRHHAVDALVMACSTRSHLQELSKRNRYHKNHELKDFPDPWLNFRSDADKAVEQILVSHKKQKSLLTVRTHKTKKNGIVYKNLGVAARGQLHKESVYGKRKDVFTKELNYHVRKPLSSLTAAEIPKIVDIEIKKLFYKSIEELGLIINNKDRKPIVKTKEEKKLFEQLLNKSFFLPNKNSNPVPIKKIRIKKNFSNAEPLKENMNQWVDLGKNHHVLIYMDSKGALKEDVITFWTAVERKRIGDSVYKIPLDGKGIIEILQINDMFLLGYKENEIDWNNLCYDLLKDNLYKAQSLSTGYYNFKKHIDSRPDKDSKKNYITIRNFGKGKTGWNTFNPIKVKVNSIGKIEKV

SEQ ID NO: 3944 - protein, 1287 aa, unidentified
  REGION 1..1287: note = Description of Unknown: Cas Enzyme sequence
MTKILGLDLGTNSIGWAVRDSNLDKKNQILHSGVLIFPQGVGEEKGVEFSLASERTKHRASRKLYRRRKWRKVDTLKILIENKMCPLSIEELNLWALYTKGKKNKYPTENEDFRAWLKLNPYKARKKASEGNATKQELGRALYHICQRRGFKSGRKDADAGKDMEVYIKEKEKRGDQTLGAYLSDQLDAGIEVRKTKYQADDQEVNSSRISYIEEFDRIVEKQNLDKELASQLFEAIFFQRPLKSQKGTIGKCTLEPSKSRCAISRPLYEEFRMHQFLNSIKIKNTYGNDSQFQFLTEFSHYFQIVKQLFFRKSKPTFKFGDISKAINREAKKRNEFFECNYKDKYPIVGSPTMSQFVSLFDAEDWENCKEKISKNYKLKDNKTVDELIDELWHTLFFASDFVNDITSKKIKEFIKARYNVTEEQIDAYEDINLKQGYASLSRKAIKNVLPFLKAHIIYSHAVFFANVDAIVGKTIWENNKEFIQDTIIDIIECFKDDNLKVDIVNGLVSDFIKEFDNADSDYVLDETDKKNVKEKIVSFYGVSKWENLSASRKESLQTEIETMFQQQLKKRRTGGYYLTKARLDEKIKQFLIDEYKVGETEANKLYHPSAIDIYQDSLSGELESPFTNSVRNPMAMRTLFQLKTLVNTLLEEDKIDTDTKVIIELARELNDKNKRLAIERYQREREAENKNYRVKLEPHAKKAKSKVTEQDIIKYRLWIEQNGKCLYTNNTISIEDLFGSNPKFDIEHTFPRSKSFDNSLANKTLSEKKFNQIKGNKIPQQLENKYLQNALMNIRHWKENIEALREKIEQQKYFSKVASTVEQKNRAIQQKHYLRLQYDYWKDKYKRFTDEEIHFRFKNSQLVDTGIVTKYAKLYLQTLFKNVFPAKGTMVADVRKSWGLKEKDRNLHYHHAIDAMVLTCMTKDIREKLAQSFLEAETLNKREKFLVEKPWDTFTKDVLSLQDEILVVHKHPDNLLKQTKRKLRKRGKIQYNKNGNVIYEQGQGLRSSLHKDTFYGAIERENEKDEKEIWYVIRKPVDSSFSETDVKNIVDEGIKERIYKHGLKNIRTEQGWIELPKENGKKPMLIKRIRLKTRLNNLPKIKKQSHISQKSKKPHKEYYYATLENIFAMAVYKAVNSKGKKIMAYQTISAFDAAKHNQGNKKMEIPVESNMIKNKGKASEILLPLSYVLKVNQMVLFYEKSKEELKKLKNKDLSNRLYKITQFESDGRIQLRHHIQGGADKDLKKESSLDFNKPAQKLRISLSNVKAGFEGKDFVLHPSGKIDFVN

SEQ ID NO: 3945 - protein, 1128 aa, unidentified
  REGION 1..1128: note = Description of Unknown: Cas Enzyme sequence
MARILGLDLGTNSIGWALIDDVQNKILGIGSRIFPMGVENLGEGEGREMSKNAGRTGARGVRRQFFRRRLRKKILLKALSENNMCPMVASDFEDWKKTKEFPSDKLASWFALNPYELRQKALNEKLSLEEIGRIFYHLIQRRGFLSNSRKGGTDDGTIFKGNPKEGKIGITETQESIHDKTLGSYLFEIYPKENQPFQDGLERIRNRYTTRKMYVDEFELIWNKQSQYHPNLNEDLKTLFGGRKLDGYKEDGILFHQRPLRSQKHLVGNCAFETTKTKCPISAIPFEQFRVWQWVNTVECNGEKISEEEKEKIVDFLYANEKPEFKKIRKAIGKEGAEFKFNYKDEDKIVGTHTISNLSNKKYFGKKWFEFSEKEQEDIWHVLYFFESKSNLKEYAIKNWNFTNEQAELISNFNTSDKNKKNGFASLSRKAISNILPFLKLGFTYDVAVVLGGIKNVFGSDWEKLSDEKRNFFYDNVYEIIRSKNKGGFIDIIKDILRNDYNISDHQLRKLYHHSATIEVSELVEKLPLGSEADKEIQQIKNPIVITALFELRKLVNELIEDHGTIGEIKVEMARDLKVSKSERYKTRRNQQRLERENDRVKAEVLKYTNLSHDNILKFKLWEECKRTCPYTGLSIPINELFTNKWQIEHIHPWSKSLNDSFSNKTLCLGTENIKKGNKTPFEYYGNDEANWSAIKERALKLFSFTKEYPDSYNKFKRFVKQSFDDDFTSRQLNDTRYISKEAKNYLSKICKNVMVSPGQATSNLRQKWGLNHILNDENAKTREDHRHHAIDALVMACTKLSYVQELSKWNRYNRTYDLKQFPLPWETFNFDAEKAVEKILISHKKVSNDITVRYKTVEKNGKKHTNKGVSARGQLHKETVFGKRNFNGEEAYHVRKSIESLETAKQIDKVVDETTRLLILKRVHELGGFIKDKVPANTFFVVDENGIKQPQIFLPNKNGAPVPILKVRLKENIGGAEKLKENVNQWVNPRNNHHVLIYKDEKGNLKEEVVTFWTVVERKRTGQSAYQLPFDGKKIVTTLHINDMFLLGLNEDEINWENPDYDLLKENLYRVQKFTSGDYYFRIAKTSTINNDIERIYIKNFLNGKTGWFTYNPIKVKISVSGKIEKA

SEQ ID NO: 3946 - protein, 1285 aa, unidentified
  REGION 1..1285: note = Description of Unknown: Cas Enzyme sequence
MAKILGLDLGTNSIGWAIRDNNIDNKNQILDSGVIIFPQGVGEEKGVEFSLASERTKKRASRKLYSRRKQRKSDLLKLLIENGMCPLTIDELNNWAIYTKGKSCVYPTENFEFREWLKINPYEARSKASNDSISNFEFGRALYHICQRRGFKSGRKDADAGKDLVVYLREKEKRGDKTLGEYLYEQLEEGESVRKVKCAGDDNEVNSSRISYIEEFNVLVKNKKITTELADKLFKAIFFQRPLKSQKGSVGKCTLEPSKTRCAVSHPLFEEFRMYQFLNSIKVKERSQDKFLFLSNYPEYFSLVKELFFRKSKPSFKFLEISKAVNTKAKKNNLYFEFNYNDKYPIVGNPTMSLLKDVFDANGWEDCKEIICSKYKLSDKKTTDDLIDELWHTLFFSGDFVNDVTSEKVKHFIRSRYDVNEEQVERYEKINFKQGYASLSKKTIVNILPFLEQNIIYSHAVFYANIPQIIGKEKWQENKQYIQDNISNIIDGYKDQILKIDIVNSLLEDFIKEYDNSDAEYVLDETDKKNVTEKIIAFYGKDRCSKLGEALGYELQSEIEFNFQNQLRKRRFGGYHLVKPRLDEIIKQFLIDEFKVSSTQSDKLYHPSAIETYQESSDGLLGSPFTASVRNPMAMRTLHYLRKLVNSLLKEKKISSDTTIIIELARELNDKNKRLAIERWQRERENENKKIREKLEEFTVGNNNIVTEIDIIKYRLCQEQNNVCLYTNKTIDCEKLLGSNPQFEIEHTFPRSKSFDNSLVNKTLADKAFNQIKGNKIPQELDEKYIHTVINNISHWKEKIEDLKEKIEQQRYFSKVASTVEQKDRAIQQRHYLSLEFNYWNEKYKRFTDKEINPKFKNSQLVDTGIITKYSKLFLGSLFNNVFPAKGTMVADIRQSWGLPKKDRTLHYHHAIDAVVLSCMDKSIRDSLAQAFNESESLGKIEKFKVPKPWSTFKEDVDKITESILVIHNHKDNLLKQTKRKLKIRNKIQYDKSGNVIYEKGQGIRSSLHLDTFYGAIERVNEKDEKEIWFVKRDWASNLNEASIENIVDEAIKQRIKKHGLKNIRTDEGFILLPEEDNLKSMLIKKVRIKTNFKQLPTIKKQSHVSQKSKKPHKENYYAKLENIFAMAVYETLNEKGKTERIHKTMSAFETAKYNQGKQRMELPIEENIIKNKGKKSEILIPLAYVLKVNQMVLFYENSKEEIKSLSNSELSRRLYKITQFEGDDGRIQLRHHKQGGADKDLVKESSLDFDKPAQKLRMSLSNFKACVENIDFKISPSGNITFLF

SEQ ID NO: 3947 - protein, 1158 aa, unidentified
  REGION 1..1158: note = Description of Unknown: Cas Enzyme sequence
MSKVLGLDLGTNSIGWAIVEDDTKEILGIGSRIFPEGVVNLGEGEGREASKNASRTDDRGTRRQFFRRRLRKRYLLRELAKNNMCPVDYTSVKIWNQKEIFSDKNLQAWLKLNPYELRAQAIREKISLLELGRVFYHIIQRRGFQSNSRSAGAENNEKSVIFKGDLKSGKIGISETAESIKESKTLGSYLNNIYPKEHTPFSGETERIRNRYTTRQMYIDEFETIWEQQKAFHEELTDELKTIFGGRKKDGYPEDGVLFHQRPLRTQKHLVGNCTFEPKKTKCQISAIPNEQRRVYEWLNTLKCDLSGEPVEITKKDREDIVNLLFSKEKVNFKEIRKAINKLDGYYQFNYKDDDKIYGSHTISNLSNKKLFGQQWFTYSDKEQEDIWHVLYSFDDRDKLKKYALEKWGFSEDKADKISKFNLKDGYAQLSRKAIHNILPFLKLGFTYDVAVAFGGVKNALGQQWDEHKQFMLDNVPEIVRYNLKGGYIKPLKTMLKAECQVNDKQLLKLYHHSSAIEASKLLDKLPVDSEADKEIQRIKNPVVTTALFEIRKLVNEIIDDYGKPEEIKVELARDLKISKSKRYDIRREQQRLERENDRVKAELDYIGQRPTHVNLLKYKLWEECNKICPYTGRNIEVNQLFGGEVQIEHIYPWSRSLNDSFMNKTLCFADENRAKGDLTPYEFYSKQGEQKWNDIKLQALSCFKNKANYPNAYYKFKQFVKQKHDSDFITRQLNDTRYISKEAKNYLSKICNNVLVAPGQMTSNLRHHWGLNTILNQEDDIKTREDHRHHAIDALVMACSTRSHLQELSKWNRYDRTYDLDNFPKPWKNFREDAEQAVKQILVSHKKSKSILTVRTHTTHKNGEKHKNIGVAARGQLHHQTVYGTNKNCKTDEYVYRVAINSLSFSQLNNIIDQNLKKVIVDDILKSFEYEEKAFFNKMISKEKNLDKKDQKRIKDRVDKILKEQSFFMPNEGKRYQRLNKNEPNNIERKPVPIYKVRVRKVLGKAERLKDNIKQFVDPQNNHHVLIYKDEKENLKEEVVTFWTVVERKRKGFPVYQLPADGIGIVTTLQINDMFLLGLNEDEIDWEKPNYNLLKSHLYRVQKFTSGDYYFRLAKTASIQNKEEKQQINSFGFGKNGWSNHNPIKVKISISGKIEKK

SEQ ID NO: 3948 - protein, 1124 aa, unidentified
  REGION 1..1124: note = Description of Unknown: Cas Enzyme sequence
MAKILGLDLGTNSIGWALIDDKLNNIIGIGSRVFPMGVENLGDGDNEMSKNASRTGARGVRRQFFRRRLRKKVLLKSLSGNNMCPMSTKDFEDWKQTKQFPSEKLATWFAVNPYELRQKALNEKLSLEEIGRIFYHLIQRRGFLSNSRKGGSDDGAIFKGNAKEGKIGIDDTLESIEGKTLGSYLYEIYPKESQPFQDGLERIRNRYTTRKMYIDEFELIWEKQSQFHTVLNYDLKTVFGGRKQDNYAVDGILFHQRPLRSQKHLVGNCSFESTKTKCPISAIPVEMFRIWQWVNTVEYNGNKISQEEKTKLIEKLLLSDKMDFKKLRKAIGKESAEFKFNYKDDDKIVGTHTISNLSNKKFFGKKWFEFSEKEQENIWHVLYFFDSKSNLKDYAIKNWNFAEEQAIAISKFNVKEGYASLSRKAIANILPFLQQGYTYDVAVIMGGIKNSFGDKWQNNTVENNQKQLDLIDNVEAIVRAKISGGFIDTIKDLLREEFQFNDKQLKKLYHHSVTIDVTELLEKLPVGKEADKEIQAIRNPIVITALFELRKLVNELIDKHGQLDEIKVEMARDLKISKSQRNKIRRDQKRLERENDRVKSEVEKYTRVSQDNILKFKLWEECKQTCPYTGGTIPVSKLFTGEVQIEHIHPWSRSLNDSFNNKTLCYADENRRKGDKTPFEFYGNDELDWISRKERALKLFSDTKEYPNAYQKFKRFVQQKFDDDFSSRQLNDTRFISKEASSYLTQVCKKVNVSPGQMTANLRQKWGLNTVLNDENAKTREDHRHHAIDALVMACGKTSYLQELSKWNRYNRNYDLKDFPMPWETFRFDAEKAVDKILISHKRISNDITIRYTKVEKNGKTHINKGVAARGQLHKETVFGKRNFNGDEAYHVKKAIDSLTTEKQLEKVVDESIRKLVHKRIQELGGFVKGSIPANTFFIVDENGVKQPQIFLPNKNGSPVPVLKIRMKENISGAEKLKDNVNQWVNPRNNHHVLIYKDEKGNLKEEVVTFWTVVERKSKGFPTYQLPVDGKEIVATLHINDMFLLGLNEDEINWENPDYEILRDNLYRVQKLTSGDYFFRKHKSSTVTDDDYKQIRGFGEGKTGWYTFNPIKVKISVSGKISRM

SEQ ID NO: 3949 - protein, 917 aa, unidentified
  REGION 1..917: note = Description of Unknown: Cas Enzyme sequence
TTRKMYIDEFELIWNKQAQFHSNLNDELKTLFGGRKLDGYKEDGILFHQRPLRSQKHLVGNCSFEPTKTKCPISAIPFEMFRIYQWVNTVEYNGKKISQEEKDKIIEQLLVSDKIEFKKLRKTIGKESAEFKFNYKDDDKIVGTYTISNLSNKKFFGKKWFEFTEKEQEDIWHILYFFESKSNLKEYAIKKWNFTEDQAITISKFNVKDGYANLSRKAIGNILPFLQQGYTYDIAVVMGGIRNSFGDKWQNDTAENNQKELDLIYNIEGIVRSKISGGFIDTIKDLLRKEFGFSDKQLKKLYHHSTTIDVVSLLEKLPVGKEADKEIQAVRNPIVITALFELRKLVNELIDEHGQLDEIKVEMARDLKISKTQRNKIRRDQKRLERENDRVKAEVERYARVSHDNILKFKLWEECRQTCPYTGFAIPIAKLFTGEVQIEHIHPWSRSLNDSFSNKTLCYADENRRKGDKTPFEFYGNDELDWSARKERALKLFSDTKEYPNAYQKFKRFVQLKFDDDFSSRQLNDTRFISKEAKNYLAKICNKVTVSPGQMTANLRQKWGLNTVLNDANAKTREDHRHHAIDALVMACGKTSYLQELSKWNRYDRSYDLKDFPMPWETFRFDAEKAIEKILISHKRLNNVITLRTHKVEKNGIVHKNIGIAARGQLHKETVFGKRNFNGEEAFHVRKAIDSLATEKQLEKVVDQTIKELIHKRIQELGGFIKGTIPINTFFIVDEKGVKQPQIFLPNKNGEPVPILKVRTKENIGGAEQLKHELNQWVNPRNNHHVLIYKDEKGNLKEEVVTFWTVVERKRQGFPIYLLPSDGKEIVATLHINDMFLLGLNEEEINWDDLDYEILKEHLYRVQKLTSGDYFFRKHKSSTVTDNDYRQIRGFGEGKTGWFTFNPIKVKVSISGKIQKI

SEQ ID NO: 3950 - protein, 1129 aa, unidentified
  REGION 1..1129: note = Description of Unknown: Cas Enzyme sequence
MAKILGLDLGTNSIGWALIDDVQNKILGIGSRIFPMGVENLGDGDGEISKNASRTGARGTRRQFFRRRLRKKILLKALSAHKMCPLNNSDFEDWKRTKQFPSEKLVSWFALNPYELRNKALNEKLSLEEIGRIFYHLIQRRGFLSNSRKGGSDDGAIFKGNAKEGKIGINETQDSIQNKTLGSYLFEIYPKENQPFQNGLERIRNRYTTRKMYVDEFELIWNKQAQFHSNLNEELKELFGGRKLDGYKQDGILFHQRPLRSQKHLVGNCSFEPTKTKCPISAIPFEQFRVWQWVNTVEYNGKKISQEEKEKIVDFLYANEKPEFKKIRKVIGKESAEFKFNYKDDDKIVGTHTISNLSNKKYFGKKWFEFSEKEQEDIWHVLYFFDSKSNLKEYAIKNWNFDEDQAEAISKFNVKDGYSSLSRKAIGNILPFLKLGFTYDVAVVLGGIKNVFGADWEKLSDEKRNFLIDNVEGIVRSKTRGGFIDIIKDILRNDYTISDSQLRKLYHHSADIDVKELLQKLPVGKEADKEIQSIRNPIVITALFELRKLVNELIDDFGKIDEIKVEMARDLKISKSQRNKIRREQKRLERENDRVKDRLVENNVRITHDNILLYKLWEECKKTCPYTGKPISVTQLFSGEVQIEHIHPWSRSLNDSFSNKTLCYADENRKKGDKTPFEFYGNDEANWSAIKERALKLFSDTKEYPNAYQKFKRFVQQNFDDDFSSRQLNDTRYISREAKEYLSKICKNIVVSPGQATSNLRQKWGLNNILNTDNEAKSREDHRHHAIDALVMACTKVSYVQELAKWNRYNRGYDLKQFPLPWETFRSDSEKAVEKILVSHKRVSNDITVRTHITEKNGKKYKNVGVSARGQLHKEFVYGKRKAPFKDEAYHIRKTIESLLTEKHIEKVVDTTIRNLILKRVNELGGFEKDKIPANTFFVIDEKGVKQPQIFLPNKNGAPVPILKVRIQETINKAKQLKNNLNQFVNPRNNDHVLIYETIEGKLEKDVVSFWEVVERKKQGLSKIQIPLNGKKVVETFRENDMFILFKNEDEINWNDTNDLSENLYKVQKIAGADYFMEICFRKHNDSRDDKNAKGDYVYIKGFGEGKTGWFTFNPIKVKISVSGKIVRI

SEQ ID NO: 3951 - protein, 1129 aa, unidentified
  REGION 1..1129: note = Description of Unknown: Cas Enzyme sequence
MAKILGLDLGTNSIGWALIDDKLNKIIGMGSRIFPVGVDNLGDGEGELSKNASRTGARGTRRQFFRRRLRKKVLLKELASLKMCPLTDSDFENWKTTKKFPTQELASWFALNPYELRHRALKEKLSFEEIGRIFYHLIQRRGFLSNSRSAGKDDGAIFKGNAKEGKIGIDETREQIENKTLGSYFYEIAPKENQPFVDGLERIRNRYTTRQMYVDEFEQIWEHQKKYHSNLTHEIKEKIGGRKSDEGFKEDGILFHQRPLRSQKHLVGNCTFESDKTKCQLSAIPFELYRLHQWINTVEYNGHKLHANERKLVFNFLIEKEKPSFKDIRKAINKLDTIYKFNYKDEDKIVGTHTISNLCSKKYFGKKWFDFTEKEQEDIWHVLYFFDSKDKVKQYAIKNWGFDETQAEAISKFNLKDKYASLSRKAINNILPFLEMGFQYDIAVVLGGIKNVYGQNWEALAVDKKSFIIDNVPDIVRSNLKGGFIDPLKHFLKTELHLNEKQLAKLYHHSANIDETVLLEKLPVNANADKEIQAIRNPVVITALFEIRKLVNEIVDEYGKPDEIKVELARNLKASKSGRNEERKRQQKLERENDRVKVELNNLGKHISHDNLLLYKLWEECKHTCPYTGRSISVTQLFSGEVQIEHIHPWSKSLNDSFMNKTLCFADENRAKGDRTPFEFYSLQGENKWHEVKERALKLFADTPQYPNSYQKFKRFVQQKFDDDFASKNLNDTRYISKEAKNYMSKICDNVSVSPGQMTANLRQKWGLNAVLNPEDKTKTREDHRHHAIDALVMACGTVKHLQKLSEWNRYDRRPENKNFPLPWDGFVKDAEVAVDKILVSHKKLNNIITVRTHKTEKNGQVHRNVGVAARGQLHKETVFGKRNFNGEEAYHVRKPIESLTTSKQIDKVVDESTRLLILKRVQELGGFVKDKVPANTFFVVDENGINQPQIFLPNKNGAPVPIKKVRMKENIGGAERLKEYINQYVNPRNNHHVIIYKDEKGNLKEDVVTFWTVVERKRQRQEVFQIPADGKEIITTLQINDMFLLGLNEEEINWESPNYEELKESLFKVQTLSQMFYEFRLSPDATQNKDTNSVVFKRIQSFGYGKTGWRNHNPIKVKISVSGKIEKL

SEQ ID NO: 3952 - protein, 1124 aa, unidentified
  REGION 1..1124: note = Description of Unknown: Cas Enzyme sequence
MAKILGLDLGTNSIGWALIDDRVNKILGIGSRIFPMGVENLGDGDNEISKNASRTGARGVRRQFFRRRLRKKFLLKALSENQMCPITSIDLDNWKQTKQFPSEKLAKWFALNPYELRSKAITEKLSLVEIGRVFYHLIQRRGFLSNSRKGGSDDGAIFKGNLKEGKIGITETQESIEDKTLGSYLFEIYPKENQPFQDGLERIRNRYTTRKMYVDEFEMIWEKQKQLYTVLNDDLKQFLGGRKLDGYKEDGILFHQRPLRSQKHLVGNCSFEPTKTKCPLSAIPFEQFRVWQWVNTVEYNGKKISQEEKEKIALFLNANGKPEFKKIRKHIGKESAEFKFNYKDDDKIVGSYTISNLSNKKYFGSKWFEFSEKEQEDIWHVLYFFDSKSNLKEYAIKNWNFSEDQAIAISKFNVKEGYSSLSRKAILNILPFLKMGFTYDVAVVLGGVKNTFGTDWEKLSDEKRNYLTDNIEGIVRSKTKGGFIEVIKVILRDDYGVSDNQMRKLYHHSSTIDVAELLKKLPVGKEADKQIQSIRNPIVITALFELRKLVNELIDEHGALDEIKVEMARDLKISKSQRNIIRRDQKRLERENDKVKERLLENDIRITHDNLLLYKLWEECKKTCPYTGKAISVTQLFSGEVQIEHIHPWSRSLNDSFANKTLCYADENRKKGDKTPFECYGSDELNWSGIKERALKLFSDTAAYPKAYQKFKRFVQVKFDDDFSSRQLNDTRYISKEAKDYLALICKKVIVSPGQMTANLRQKWGLNHILNTEDDFKSREDHRHHAIDALVMACGKTSYLQELSRWNRYNKKPELKNFPLPWEGFNFDAEKAVEKILVSHKRIANDITVRTHKCEKSGKTQVNVGVAARGQLHKETVFGKRDFNGEEAYHVRKAIDSLATLKQIEKVVDESTRTLILKRIQELGGFVKDKVPANTFFIGDENGVKQPQIFLPNKNGNPVPILKVRMKENFSGAEKLKENVNQWVNPRNNHHVLIYKDEKGNQKEEVVTFWTVAERKRTGESVYKLPIDGKEIVTTVHINDMFLLGLNEEEINWENLDYENLKEHLYRVQKFTSGDYYFRIAKTASIQNIEEKQQINSFGLGKNGWMTHNPIKVKISVSGKISKV

SEQ ID NO: 3953 - protein, 1620 aa, unidentified
  REGION 1..1620: note = Description of Unknown: Cas Enzyme sequence
MSKVLGLDLGTNSIGWALLDNDKEEKKLQDKGVLIFSEGVKKEKGQEKSKAAERTGFRSARRIKFRRKIRKYQTLLVLAKHNMCPLTVEEVAAWRKSNFKKYPTKPEFLEWLRTDEEQNINPYYYRDKASREKISKYDLGRALYHIAQRRGFLSNRLDQSDDNLIKSKKDEIQSIIDNDFNKIDLIDAIEAVFETYEFKDKSKKDCDNATEEKLWSIRKYILNVIENKIKGKDYSKNEDVRKEIDRYINKPENLGAVQGNISELNTAITETNCKTLGQYFWKLYQQDRNDAKNKIRNNYTSREDHYLYEFEVICKTQGLDGINEVKKDPSERYSGIVKELYKAIFYQRPLKSQKGLIGKCSLEPNRVRCSVSRPEYELFRMYSFINTIKLKEPTAEKFRFLTQKERADIKSAFLRKSKPTFEFNDIKKILGLDNHYNYKDKSTVSGCPTISNLRIVFGDEWDEMEFKYETKNAKGEIVRRTVDYEDIWHVLSTFTSDEKLVDFAKNKLQLSQKDAEKFSKIHLKKDYASLSLYAIKKILPYLEKGLLYSHAVFMANMDKIIKSERWKNKEDRELIEKEVGEIIDTHQEENKMLFAVKSVLTHCFDNNQTYSKEAEELYKGDIEKQLKKEFGQKTWENKLNKETLFSEAFDIFIKHLKERKHPAIKRIDEKVMEFLSDNDLLIPNTFNKLYHPSDIEKFRSVKLKDKDGNVIKIDGKEAIGLGSPDVGSIKNPMAMKALHQLKKLINTLILEGQIDENTKVNIELSRQLNNANKRKAIEKWQNDRKELFQEYEKKIKELYKIETGNELKEVTDEDIEKFTYALEQRKDKKLVSKEDVMKYALWEEQNHICIYTGKTISLSSFLGANPQFDIEHTLPRSRSWDNSQMNKTLCDKTYNQQTKKERMPIELSEKDYSEILPRIQHWKDKYEALANEIEKKKRSTRGATDKEQKDKLIQQRHYLQMEYNYWKGKYDRFVMKEIKEGFKNSQAVDIGIISKYATAYLKSVFKKVYSVKGEMVSEYRKAWGLHDTFKDKWGRTQYKPKDRSNHIHHCIDAVTIACMNKNKYDKLAHAWGLEDKGEFDKAKKELENEKPWETFTQDIRNLENEVFIVHQNKDVLPIQTKKKFRKRGKAQPKVIYKKDENGKYVFDTNGKKIVEKYIYKKDDLGNLIPVNGKKLNIDLVKDKKEGKDYFKIESENGTKFYEYLKDKENKIVYQKDYMIEQGDGTRGSLHKLNYIGVIAKPELENGKPKTENGAFILQKDDEGKVSKFYVKRNPVTKDFSESDVKKIVDEGIKRRIEKHGLKNVKTPDGFILLPAEKKGINGSEKDLKEMLIKKIRLFEKDKPIEIKKQNEINLQTEKALRKKHKHHFYAQNDENYCMAIYEGRNEKGKTERAYELVNNIDASEFFKLSKRKDRKDGNINLVPEKHIELGYQLKFQNSKPCIIKKGISCILLNEEDENVEWDNQDWLKNRVYVLTGIDGDGIKLNHNQNARSGTDAIKYMNDEVNLQKFESVLPDLEKINDIDINSIKADFFDSGIKTKDVFDSIQKQINNYYKENNTLDSKGKLKKIKLKESGLTTPKGGGVIDNYKSFPYVKFKVSGFYAKIENIDFKITPTGKIEQI

SEQ ID NO: 3954 - protein, 1428 aa, unidentified
  REGION 1..1428: note = Description of Unknown: Cas Enzyme sequence
MRKIKLGLDLGTNSIGWTVLEKQDGIYDFLKVEDEKGDLIPSKGSYIFSKSVDANENSKASERRGFRGARRRIDRIRLRKITTLKVLDEFGMCPKFSQGELNRWKNNKIYPCENVDFIDWQRTGQKNGNSQTEKLKQPYYLRHLAATKQGMMENEAGRLQLGRAFYHLSQRRGYLSNSEDEQSDDKIDLFKTDVVNLLENCTGSGDFKQPYDVIFNLYKSDDKVKRLNSKISKVLKNEQILENIKSFVKTEFDKPENLGKVMAGIGELSKEMKDFPTMGCYFYSIYNTVNKNSGLVNKIRGKYTHREDHYLTEFEYICKIQNITGDLKDKLHYAIFYQRPLKSQKGLVAKCTLEPKRKRIALSHPLFEEFRMWESINRIKIKREFEDKLDFLNNDEKKLIKNEFLQISDFEFGKIANKLSSGLPYNYIKRPEEVYIKGKLDKEFETKAVISFNFPMDKKFSACPTTASLKRIIGVESYNAMQLLNTGYKDEKGKKKLSVEDVWHCLYLDSFGLKDKKTVREEFAKKHLNLDKKGIEIFLKIKLVKGYGSLSKSAITKIIPYLERGEIYTNAVFLANVSSVLGRRISEEEKKEVARIIKKALENFKNEKQNKGIVNNYISKFKENKDALGNNIFSIEEHKKGLDIEMINWIGEIQLNALDKNELDKITDTCWKLFFDATCDKLPKDINYLSVKTISKFIEEGLKEVFPKDTIDTSKLYHPSAMETYPKADKKLGNPEITSIKNPVFDRAIHQVKRLCNELIRKGLVDKDTEVNLEVAGEINSASYRRALTQWQKEQEEIRTWAKEKIIECYPEEERKNKKPTQREIAKYILYSEQNGRCLYTSETISPRNFLNEHTVYDIEHTIPRSKNNDNSLKNKTLANYDFNRNYKKATLPGLLNVNFKSVQVNKETILSNRNEHLKSYSFVGKKPNMNITWNVSLDDLKFEYKKFKNAAKAITDAAAHDEVMTKAHYTKMKLDYLRDKYRNFEIEEINNQFTNANLVDTRIITKYARAYLNSYFNKVNVVNGKITDTLRKIWGLQGEEDIKDRSNHIHHCIDAIVVACVEKGTANRISELYHKYENDYFRGNSNPRISAKEPMKNFVERMKNLHKEVLVYHKQTDRIKSLLINAQKENAKKLNLRGRLNSQNPYAHIKKNDELIFAQREKVSNLTIKDIEENIIDEGIKKRILNFAKDVGLEAFLKESNKMGYMILPKYYDEEKGKDINEMIIKRLRLKSSKSNLKDYKEIRKTDRNLNKDKDGKLKFGHKFDFYFDKDSYTNYEARIFGDLIPNEGGKFKNREYNVINHYNIVKNVFEIESKEAILRLHKDDMFLVFNLNPKDEIDWNNIIDLQNRLFKIVKFDENGIIVLVRHNFAGGSVDKALPIKSENDLTDISQVVLRRSPSTLRVIPTKINTLGKIDVDYCKKIIDLNS

SEQ ID NO: 3955 - protein, 1453 aa, unidentified
  REGION 1..1453: note = Description of Unknown: Cas Enzyme sequence
MARILGLDLGTNSIGWAIVEKDGDGFSLIDKGARIFSEGVKSEKGIESSRAAERTGYRSARKIKFRRKLRKYETLKVLTKNKMCPLTLEEVEKWRQSGFKDYPLNEAFLKWLRTDDDKNINPYFFRDKASKVKASLYEIGRALYHIAQRRGFLSNRLDQSAEGIFEEHSPKIEDILDNTTTIAELRTEITDYFDGLDIFDKNEKTGFKKDLDEGEKKLKSLFIALEKIIKTNEKDYEKAILELKERLNRKEDLGAVKQKISEISQAMIDGDFKTLGQYFYSLYNAEVELENKTTNEIEKFNRAKIRNQYTSREEHYLKEFEIICKAQNIEGIKDAELLPEKKYSGLAKDLYKAIFFQRPLKSQKGLIGKCSFEKSKSRCAVSHPDYEEYRMWAFINNIKIKTPEDDTLRFLMQEERQKLVSKFFRKKDNFNFEDLAKVLIPKGATFDFYKSFNAKSAHYLFNYKPKDSVSGCVVSASLKNVFGEDWKTKTFSYKTKNAKGESVKRNVDYKDLWHLISVSNNDIYLQEYAKENLNLDEKRAKSFGKIKLKKDFGSLSLNAINKILPYLQEGSLYSHAVFMANIENIVDKKIWNNETHRKFIQNKIAKIIETNTYDNGLLDVVNGLIKEYKKESVYHSKEAETTFKKDLQKKLISFYKYHKIEDDQEQIFTELFPVFMEQLIKYEFKPVKRLDEKVLEFLSGENEDGEIFCTDEKQLKKLYHPSDIEVFKKKIHKDENGNEQLVLGSPLTSSIKNPMVMRALHQLRKVLNALILDGQIDPKTRIHIEMARELNDSNKRKGIQDFQNENKKARETYRAEIKKLFFEETKKEIEPTEDDVLRYQLWIEQDKKEIYEEGKSIGISQIIGNNPDYDIEHTIPRSISQDNSLMNKTLCSKHFNREIKKTKMPVELTNHEQILLRVNHWRIEAGKLTWEIEQIVRSTKAMATKEAKDRKIRKRHFLTLKRNYLQGKYDRFTLKEPKSGFKNSQIPDIGIITKYSQAYLKSYFNRVESVKGGMVAEFRKIWGVQESYQENGKKYYEKKDRSKHTHHTIDAITIACMTKDKYDALASAWTLEDKEQIGAARKILADSKPWRTFTEDLKKTEEEILVSHYTPNNLKKQSKKILRIRGKKQYVAEIEKDQNGKNISKKDANGKIIFQIDENGEKTHRLQQGDTVRGSLHQDSIYGKIRNPLKFEDIRCVIRKDLESIKATDIENIVDETVKEKVSTAKENKILVFSSNAQQKNKMNGTVWMNEEKGIPIKKVRLYANSVKNALEIKEHAVLSKSRHKHKQKVYAQNDENYAMAIYEGIDKNGKLKRSFQTITNKEAGAYYKLSNKDYNQAYDIVTNPDDKTNLPFKYLLKKGLMVLFYQESAEEILELDEKDLFNRLYKLAKFDAQGRLTFRTHFEARQASGLKEVYNIDFEKPFEQIRLQVSKLNILVEGYEFIISPAGKIVLL

SEQ ID NO: 3956 - protein, 1424 aa, unidentified
  REGION 1..1424: note = Description of Unknown: Cas Enzyme sequence
MAKILGLDLGTNSIGWAIVEKEKNKKEYTLIDKGVRIFTEGVNIEAKTSSESSKAAQRTAYRSGRKLKYRRKLRKLQLLKILSDNNLCPKLADEELKLWRYKKIYPNNDEFRLWLSTDNQDDKVERKKQTKNPYAFRFRASTQKLDLNQIANRYLLGRALYHIAQRRGFLSNRLDTSDNSIIEDKNSDIEEIIQQSNSSETLLKMYNEFLGSYDKTEANSKALLTLGRAFKSIVKENANEEFDTVKEKLVERLNRKEFLGKVKSAINELSAKIEEANCNTLGEYFYGLHKEGQRIRNNYTHRDFHYLDEFNRICDKQNISIPLKTSIKKAIFYQRPLKSQKGLVAKCPLENDKARVPISHPDFELFRMYSFINSIKIKPVEEDKLRFLNPEEKAIIESLFYRKSKPNFDFDEIIKKLTPKHLKAGYYKDKKAKEFDVLFNFGGYTNVSGCPTIASLRSVFGDDWKNHLIQNFNKKNKDNSNKTEHQIIDAIWHVLFRFDKAEKLKQFVINYIGCDEEPATKFSKIKLKQDYGSLSLKAIRNILPYLEKGLLYSHAVFLANMEKVLPQDIWNSEDNRKVINNEVFSIIENYNTYRNIIDIVNGLIKNVKDKKETWNTNNTFVVEAYKKDIDKSVQDYFGTKRWDSFSEEKKEALLKESFALFSTQMKLNSGRGEFLKKETLEERVKDFLRDNFNVSEDNLKKLYHPSAIEVYKKAKRNDKDGKLYLGSPLISSIKNPMAMRALHQLRKVINQLVKDDAITENTIVRIEMARELKSANERTAIRQWQNDLQKNRKNYVDEIKKLYKEECKIDIEPSPDEVLKYQLWVEQNRICLYTGKSIGICDFIGANPKFDIEHTIPRSKSLDNSQTNKTLCCSVYNRDVKKDKIPTECNNHEDILPRIKHWYAGYKSLEKQIRDITKKVRAATTKENRDSYIQKRTKLRFEHKYLKSKYEAFTMTEIPKGFKNSQSVDIGIISKYGNLFLKSLFTKVYPVKGKTTSNLRDIWGLDKKERINHAHHAKDAVVVACCSKDINDALATYYHNYDDYKYYGKPKPSFKHRIPWKGFNTDVKNFDDNTLISHHTPDVLHIQSKKAIRKRGIIQRNKKGEIKYKQGDTVRGALHKEKFYGAIKREITNKKGEVEEVIKYVFRKPLEKFSDTDLKHIVDDKIKEIVTNGRQQEKQFKKEIEALKKQINIVNDVEEANIKTQIEALTNKIENELYVLPNKNGKPIPIKKIRYFTTDVKAPLEIKKHRDVSRHEHKQHYFAKNDGNYCYAIYEGINKKGKDLKEFRVVNNFKAGKYFTSNESNIRQPLELNIIDKNKNILTLKFLLKTGTLVLFYENDKNEVHNMDDSELSKRLYKTVAIESDGRVQFRLHTVAKPDGELKKSSSVNFETPNEKLRISKSGLNILVEGYDFKITASGKIEKL

SEQ ID NO: 3957 - protein, 1125 aa, unidentified
  REGION 1..1125: note = Description of Unknown: Cas Enzyme sequence
MAKILGLDLGTNSIGWALIDDQQNKILGIGSRIFPMGVENLGDGDKEMSKNASRTEARGVRRQFFRRRLRKKILLSALSKNNMCPLNVADFKEWKNTKQFPANKLINWFALNPYELRQKALKEELELQEIGRIFYHLIQRRGFLSNSRKGGTEDSAIFKGNPKEGKIGISETTESIKDRTLGSYLYGIYPKDNQPFQDGLERIRNRYTTRKMYVDEFELIWDKQSQFHSILNNDLKTLFGGRKIDGYKEDGVLFHQRPLRSQKHLVGNCSFEPTKTKCPASAVVFEQFRVWQWVNTVECNGVKISQEEKEKIVDFLYSIEKPIFKRIRKIIEKESAVFKFNYKDDDRIVGTHTISNLSNKKFFGKRWFEFTNKEQDDIWHVLYFFDSKSNLKEYAIKNWSFTQEQAEAISKFNVKDGYASLSRKSISNILPFLQQGYTYDVAVVMGGIKNVFGDKWQNDTAENNQKQLELIDNIEGIIRSKIKGGFIDTIKGLLRKDFNLNDKQLKKLYHHSAAIDSGTLLEKLPINKEADKEIQSIRNPIVITALFELRKLVNELIKEHGQLDEIKVEMARDLKISKSQRNQIRRNQKRLERENDRVKSEVLKYTNLSHDNILKFKLWEECKKTCPYTGKAISITDLFSGEVQIEHIHPWSRSLNDSFGNKTLCWADENRKKGNQTPFEFYGNDETNWSAIKERALKLFSDTKEYPKSYLKFKRFVQQKFDDDFTSRQLNDTRYISKEAKNFLSKICNKVTVSPGQATSELRYKWGLNHILNNENSKSREDHRHHAIDALVMACTKVAYVQELSKWNRYNKTPEMKNFPLPWKTFNYDAEKAVENILVSHKQVAKDVTVRMHVTDKNGKKYKNKGVAARGQLHKETVFGKRKAPFSEEAFHVRKPIDSLTTVKHIDKIVDETIRLLILKKVQELGGFVKDKIPTNTFFKVDENGTKQPQIFLPNKNGDPVPILKVRMKENFSGAEKLKDKVNQWVNPRNNHHVLIYKDEQDALKEEVITFWTVVERKRQGLPVYQIPSGGVELITTLHINDMFLLGLKEDEVNWENSDYQVFSEHLYRVQKLTSGDYFFRRNTSSTITDIYYKQIRGFGEGKTGWYTFNPIKVKISVSGKIIKV

SEQ ID NO: 3958 - protein, 1469 aa, unidentified
  REGION 1..1469: note = Description of Unknown: Cas Enzyme sequence
MRKILKSINNFSVALKLLSNTLIMAKILGLDLGTNSIGWAIVDKGGDDFTLLDKGVRIFSEGVKTEKGIESSKAAERTSYRSARKIKFRRKLRKYETLKVLSMNGMCPLSTEEVEEWRKSGFKKYPLNPEFLKWLRTDDDQNINPYFFRDKASKQKVSLFEIGRAFYHIAQRRGFLSNRLDQSADGIIEQHAPNIESRIEEAHTINEVMLEVKDYFDRLDILDKNSKDLDEGEKKLKSLFNALEKIIKANDFDKTKIDLIDRLNRKEDQGVVKQEIGAISQAMEEGGFATLGQYFSSLYNKGKIRNHYTAREEHYLKEFEIICNRQGITGINENEKLPEKKYSGLAKELYRAIFYQRPLKSQKGLIGKCSLEKSKTRCAVSHPDYEAYRMWSYLNTIKVKSPQDETLRFLTAEEKQTLLPKFLRKKDNFNFEDLAKELVPKGNTFEFYKSTNAKSSQYLFNYKPKDSVSGCVVSASLKNVFGEDWNTKQWEYQTKNAKGETVSRKVNYIDIWHLLSVSTSDIYLEEYAKEKLGLDDKRANSFSKIRLKKDFASLSLNAITKITPYLKQGLLYSHAVFMANIENIVDEHIWKNPEQRLYIQNKIAELIDNNTFENSKLEIINGLIKDCKVDNCYYSKEAEATYKTDLEKKVATVFKSREDQAAIANELYPIFIEQLKKYEFITIKRLDEKVIEFLKGENEDGEIYCSNQNRLNKLYHPSDIEVFKKKIIKDDFGNEKVVLGSPIISSIKNPMAMRALHQLRKVLNALIVEGLVDERTKVHIELARELNDANKRKGIQDFQNENKKKREDFRKEIIDLYLAECKKEIEPTEDDLLRYQLWIEQDRKEIYEEGRNISICDIIGENPKYDIEHTIPRSISQDNSLMNKTLCSQRFNREVKKNKMPVELVNHDEILLRVDHWRKEADKLSWEIEQILKSTKVAATKEAKDKKIRRRHYLTLKRDYLEGKYDRFIWTEPKVGFKNSQIPDTGIITKYARAYLNSYFGRVESVKGGMVAEFRKIWGIQPSYEKDGKKYYEIKDRSKHTHHTIDAITIACMTKDKYDVMARAWDLEDDTEKENYKQVKSILEQSKPWKTFTEDLKKLEEEILVSHHTPDNVKKQSKKIIRIRGKKQYVAEVENDANGKTIAQKDANGKVIYKLTDKGERIPRLQQGDTVRGSLHQDSIYGAIKNPLNTEEIRYVIRKDIESIKATDVESIVDEVVKGKVKEAIANKVLLISSNAQQKNKLDGTVWMNEEKGIPINKVRLYANSVKNPLHIKEHSTLSKSRHEHKQHVYGQNDENYCMAIYELDGKRDFELINNFNLAKLLKQGQGHYPLYKEKEVKGKKVQIPIAKSNNRDVVLKKGQQVILYDKNIETPKDLTEIIDFKGRIYIIEGLSINRVKSGKLFFEYGVITLRYYKEARTGEEIKKDNFKPDGDFKLGEYKPTRKMSPGQFNAFVEGIDFKVLSSGKFEKI

SEQ ID NO: 3959 - protein, 1523 aa, unidentified
  REGION 1..1523: note = Description of Unknown: Cas Enzyme sequence
MNKIKLGLDVGTNSIGWTVVEKQDGIYDFLKREDGNGELIPSRGSYIFSKSVDANENSKASERRGFRGARRRIDRIRLRKIATLKILNEFGLCPKFNIGELNKWKNKKIYPCNNEKFIDWQRTGKKDGNSKTEKLRQPYYLRHLAATKPNMMETENGKLELGRAFYHLSQRRGYLSNSEEEQSDDKIDLFKSDVLNLLENSVGSGDFKIPFEVIFDLYKSDDKVKRLNSKISKELKKEQLLENIKSFIITEFNKPENLGKVMQGIGELSKEMKDFPTMGCYFYSIYKTVNKKSGLINKIRGRYTHREDHYLAEFNYICKIQNITGDLKDKIENAIFYQRPLKSQKGLVANCTLEIKRKRIALSHPLFEEFRMWESINRIKIKRESEDRLDFLNKEEIDLIKNEFLQITDFEFGKIAKKLSKGLSYNYIKQPNEVYIKGEIVKDSNSEAVISFNFPIDKKFSASPTIASLKRAIGESYNNMQFLNSGYGDEKGKKQLSIEDVWHNLQMDNFGSKDKKTIRTEFAKKHLKLDDKGLENFVKIKLVKGYGSLSKSAIKKIIPFLEKGEIYTNAVFLANVTEVLGRKISETEQNKIAGIIKEALENFRIEKQNKGIVNNYISKFKDQNNKENSLGNNEYSINAFKKELDYEIANWIGEVQLGKMKKEAVSEITETCWELFYEAACDKLPKTVAYLSTETIPEFIYDGLKVVYPNDKIDVTKLYHPSAMEAYAKADKKLGNPEITSIKNPVFDRAMHQVKRLCNELIRKGLVDKDTEVNLEVAGEINSASYRRALSQWQKEQEEIRSWAKSKIIDCYTKEFSSNKIPTETEISKYILYSEQNGICLYTSETITPRNFLNRQTIYDIEHTIPRSKNNDNSLKNKTLANYDFNRNYKKAILPALLNLNFAGNDIDVEVILNNRNKHLKSYTFIGKQPNMNIAWNVSLNDLRFEYKKFKNAAKAITDAASHDEVMTKAHYTKMKLDYLQEKYRNFEIEEINNQFTNANLVDTRIITKYARAYLNSYFTKVNVVNGKITDTLRKIWGIQGEEETKDRSNHIHHCIDAIVVACVEKGTANKISELYHIYENDYFRGNSNPRIHAKEPMNNFVERLKNLQKEVLIYHKQTDRIKPLLINAQKENAKKLNLRGKLNSQNPYAHIKKNDKLIFAQRKPIASIGGNDIENIIDEGIKKRLVAFADMKGWEKLMEIQNSEDDEAVEKRIILKKTLVFRLYEKLKKDKNNKSFIKTNVVKESVDFDFFDFDTLIDSVYKSSVLENLDDSKKGLFKNKIVKETNNLIRSKGLETLLKESEGVIVLPEYNDEKTQKVISKMILKRIRLKSSKSNLKDYKKIREIDRKQSDDNKFDHKHDYYFDKESYTNYEARIYGDLIPNDKGKFKNREYKVINHHNIVKNIFEKERSSSLLQLHQDDMFLVFDMKPHDEILWENNIDVQNRLFRIVKFDENGIIVLTRHNYATGNVDSAVAVTSENDLSISSQVVLRRRSSTLRVIPARLDALGKIDIEFSKDFIRLNS

SEQ ID NO: 3960 - protein, 1128 aa, unidentified
  REGION 1..1128: note = Description of Unknown: Cas Enzyme sequence
MAKILGLDLGTNSIGWALIDDKLNKIIGMGSRIFPVGVDNLGDGEGELSKNAGRTGARGTRRQFFRRRLRKKVLLKELASLNMCPLSNEDFDNWKITKKFPTQELATWFALNPYELRHRALSEKLSFEEIGRVFYHLIQRRGFLSNSRSAGKDDGAIFKGNAKEGKIGIDETREQIENKTLGSYFYEIAPKENQPFVDGLERIRNRYTTRQMYVDEFEQIWEHQKKYHSNLTHETKEKIGGRKNDEGFKGDGILFHQRPLRSQKHLVGNCTFETGKTKCQLSAIPFELYRIHQWINTVEYNGHKLHADERKLVFNFLIEKEKPSFKDIRKAINKLDTIYKFNYKDEDKIVGTHTISNLCSKKFFGKKWFNFTEKEQEDIWHVLYFFDSKDKVKEYAIKNWGFDKTQAEAISKFNLKDKYASLSRKAINNILPFLEMGFQYDIAVVLGGIKNAYGQNWETLNSDDKGLILDNVYEIVRSNFKGGFIEPLKHFLKTDLHLTDKHLTKLYHHSANIEETVLLDKLLVNANADKEIQAIRNPVVITALFEIRKLVNEIVDEYGKPEEIKVELARNLKASKSGRREERNRQQKLERENDRVKVELNNLEKHISHDNLLLYKLWEECKHTCPYTGRSISVTQLFSGEVQIEHIHPWSKSLNDSFMNKTLCFADENRAKGDKTPFEFYSLQGENKWHEVKERALKLFSDTAQYPNSYQKFKRFVQQKFDDDFASKNLNDTRYISKEAKNYMSKICENVSVSPGQMTANLRQKWGLNAILNPEDKTKTREDHRHHSIDALVMACGTKNHLDKLSEWNRYDRKPENKNFPLPWDGFVKDAEVAVDKILVSHKKLNNIITVRTHKTEKNGQVHRNVGVAARGQLHKETVFGKRNFNGEEAYHVRKPIESLTTEKQIDKVVDESIRLLILKRVQELGGFVKDKVPANTFFVVDENGINQPQIFLPNKNGAPVPIKKVRMKESIGRAERLKEDINQYVNPRNNHHVIIYKDEKGNLKEEVVAFWTVVERKRQKQEVFQIPADGIEIITTLQINDMFLLGLKEEEINWEKPNYEVLKEHLYRVQKLSSKFYEFRLSKEASIQNNFQPYYVRIQSFGEGKTGWNTFSPIKVKISVSGKIAKL

SEQ ID NO: 3961 - protein, 1448 aa, unidentified
  REGION 1..1448: note = Description of Unknown: Cas Enzyme sequence
MARILGLDLGTNSIGWAIVDREGVDFSLVEKGVRIFSEGVKSEKGIESSRAAERTGYRSARKIKYRRKLRKYETLKVLSANGMCPLSIEEVEEWKKSSFKNYPLKPEFIKWLRTSEDENINPYFFRDKASKQKVALYELGRALYHIAQRRGFLSNRLDQTAEGVFEEHNPQIQILIEDLDNSSSILNDLKDYFINLGIIDETEKGGFKKELDEGEKKLKSLYNSLVAIAKKNESDIVNCKEELITRLNKKEDLGKVKGEIKDISQAMLDGNFKTLGQYFFSLYNKGKIRNQYTSREEHYLSEFIAICKVQGIQRIDENEKLPEKKFTGLAKDLYRAIFFQRPLKSQKGLIGKCSFETSKSRCAISHPDFEEYRMWTYLNTIKIGTQSEKTLRFLTQEEKLKLVPKFYRKNDFNFEVLAKELIEKGASFGFYKSSKKSDYFYWFNYKPTDTVSACQVSASLKNVTGEDWKTKTFTYKTLNAKKEEIIKSVDYKDLWHLLSVATSDDYLYEYAKGKLGFDDKNAKAFSKIKLKKDFASLSLSAINKILPYIKEGLLYSHAVFMANIENIVDEDIWNDKLQRKYIQTQIAEIVENYTFEKSQLEIINGLIKDCKLKEEYYSKEAESIYKSDLASKLVLFYKNQTIENESEQKAILDEVFPIFIEQLKKQEFIKVKRLDEKVLEFLSGENQDGEVFCSNPKRLKKLYHPSDIEVFKRKIIKDEFGNEKVVLGSPLTNSIKNPMAMRALHQLRKVLNTLIFDGHVDENTRIHIEMARELNDANKRKGIQDYQNENKKFREEAIKEIKKLYFEECKKEVEPTEDDILRYQLWIEQGKCEIYEQGKNISICDIIGSNPAYDIEHTIPRSISQDNSQMNKTLCSPHFNREIKKQKMPIELSNHSEILQRVKHWENQAKEIDNLIEGLSRSIKSASTKEDKDRKIRKRHFLSLKRDYLQGKYDRFIWTEPKVGFKNSQIPDTGIITKYSQAYLKSYFKRVESVKGGMVAEFRKIWGIQESYQDENGFKHYKNKDRSKHTHHTIDAITIACMTKDKYDVLAHAWTLEDKEQIPEAKKILAASKPWKTFKEDLEKIEEEILVSHYTPDNVKKQSKKILRVRGKKQYVAEIERDEKGKAIPKKDANGKVIYKLNEKGEKIPRFQQGDTIRGSLHQDSIYGAIKNPLNTEEIRYVIRKDLESLKANDIESIVDETVKEKVKEAVANKVLLLSSNAQQKNKIDGIVWMNEEKQVPINKVRIYANSVKNPLEIKEHSLLSKSRHEHKQKIYGQNDGNYCMALYEGNDSKGKVKRSHLLINMMGAADYFKLSNSDKDMYPIAPEKDNKNLPLKYILTKGKMVLIYNKSKDELIDMSSKMLLERLFQITQIDVEKSAEIKLLHHIEAREKKEITEAMGLKTGMKGGKNIGNHKEYPWIKVGVNSFDCLVQDYDFTISASGKIILK

SEQ ID NO: 3962 - protein, 1521 aa, unidentified
  REGION 1..1521: note = Description of Unknown: Cas Enzyme sequence
MSKIKLGLDIGTNSIGWTVVEKEEGIYDFINKKDEDGNLIPSKGSYIFSKSVDANENSKASERRGFRGARRRIDRIRLRKIAALKVLDEFGLCPKFVAGELNRWKNKKIYPCENNKFIDWQRTGKKNGNNRTEKLKQPYYLRHLAATKAGMMETEKGKLELGRAFYHLSQRRGYLSNSEEEQSDDKIDLFKSDVLNLLEISIGSGDFKVPYEVIFDLYKSDDKVKRLNSKISKELKKEIVFENIKSFIITEFDKPENLGKVMQGIGELSKEMKDFPTMGSYFYSIYNTVNKKSGLINKIRGRYTHREEHYLAEFNYICKIQNITRDLKDRLQNAIFYQRPLKSQKGLVAKCTLEPKRKRIAISHPLFEEFRMWESINRIKIKREIGGKLDFLNKEEKDLIKNEFLQITDFEFGKIANKLSEGQPYDYVKRPDEVYLKGKKIETESDAVISFNFPMDKKFSACPTIASLKRTIGEERYNNIPLLNTGYGDEKGKKQISLEDVWHCLQMDILGSKDKKTIRTEFAKKHLKLDEKGIENFVKIKLVKGYGSLSKSAIKKIIPFLEKGEIYTNAVFLANVTEVLGRKISDAEQKRIAEIIKAALENFRIEKQNKGIVNNYISKFKDNKENSLGNNEFSIDVYKKELDYEIANWIGEIQLEAMKKEAVSEITETCWKLFFDATCDKLPKEVTYLSSKTVPEFIYDGLKVGYPNDKIDLTKLYHPSAMEAYKPAKEKLGNPEITSIKNPVFDRAMHQVKRLCNELIRKGLVDKDTEVNIEVAGEINSASYRRALSQWQKEQEDIRDWAKNKIIECYPEDYRDNKKPTEVEIVKYILYREQNSTCLYTSETITPREFLNKQTIFDIEHTIPRSKNNDNSLKNKTLANYDFNRNFKKAILPGLLNINFKNVQIDKESVIINRNKYLKSYSFIGKKPNVNIEWNVSLNDLKFEYKKFKNAAKAITDPIKHDEVMTKAHYTKMKLDYLREKYRNFEIEEINNQFTNANLVDTRIITKYARAYLNSYFNKVNVVNGKITDTLRKIWGIQGEEESKDRSNHIHHCIDAIVVACVEKGTANKIAELYHKYENDYFRGNLNPRINAKEPMKNFAQRLRNLHQEVLVYHKQTDRIKPLLINAQKKNAKKLNLRGRLNSQNPYAHIKKNEELIFAQRKPITSISGNDIDNIIDEGIKKRLLAFADMKGWEKLMEVQNADRDEFDKKQNELKKLVIFRLYEKLKKDKKNESLIKRSIVKEGIDVDFFDSNSLIDIVFNSSVLENLDVTKKGVLKGKIIKEVNNLIRSKGLETLLKESEGVIVLPEYKDEKSNKIILKMILKRIRLKSSKLNLKDYKKIREIDRKQTDDNKFDHKHDYYFDKESYTNYEARIYGDLIPNDKGKFKNRDYKVINHHNIVKNIFEKEDNNSILQLHQDDMFLVFDLIPNEDIIWDDIFDLQSRLFKIVKFDENGIIVLVRHNYAGGSADTAPAIKGENDLTDTSQVVLRRSPSTLRVIPAKVDALGKIDIEFSKVFIVMNS

SEQ ID NO: 3963 - protein, 1133 aa, unidentified
  REGION 1..1133: note = Description of Unknown: Cas Enzyme sequence
MTKILGLDLGTNSIGWAVVDDQQNEIADIGTRIFPMGVENLGDGDREMSKNAARTGARGIRRQFFRRRLRKKILLKALSENRMCPMTDADFEDWKKTKQFPSEKLTDWFVLNPYELRQKAVNEKISLEELGRILYHLIQRRGFLSNSRKGGSDDGAIFKGNVKEGKIGIEDTLESIEGKTLGGYLYEIYPKENQPFQYGLERIRNRYTTRKMYVDEFELIWNKQAQFHTDLNEDLKTLFGGRKQEGYKEDGILFHQRPLRSQKHLVGNCSFEPAKTKCPLSAVPVEQFRVWQWVNTIEYNGKKITQQEKEKIVTFLYANEKPEFKKIRKVIEKESAEFKFNYKDDDKIAGTHTISNLSNKKFFGKKWFEFSDKEQEDIWHVLYFFDSKSNLKEYAIKNWKFTEEQANNISRFNVKDGYASLSRKAINNILPFLQQGYTYDVAVVMAGIKNVFGAKWQNDTPENNVKQLTLIDNIEGIIRAKISGGFIDTVKDLLRKDFGLGDNELKKLYHHSAAITVTQILEKLPVGKAADKAIQAVRNPIVITALFELRKLVNELIDKHGAIDAIKIEMARDLKISKSQRNKIRREQKRLERENDRIRQEVEKYTRVTQDNILKFKLWEECKKTCPYTGVTIPVNKLFTGEIQIEHIHPWSRSLNDSFNNKTLCWADENRKKGDRSPYEFYGNDEANWSAIKERALKLFSDTKEYPNAYQKFKRFVQQKFDDDFTSRQLNDTRYISKEAKNYLAQICKNVMVSPGQMTANLRQKWGLNTVLNDANAKTREDHRHHAIDALVMACSKISYLQELSKWNRHNRNYDLKDFPLPWETFRYDAEKAIEKILVSHKKTSNAITVRTHKVEKNGKTYKNVGVAARGQLHKETVFGKRKFNGEEAFHVRKPIDNLETAKQIDKVVDETIRSLILKRINELGGFVKDKIPANTFFIADEKGVKQPQIFLPNKNGNPVPVLKVRMKETINKAKQLKKDENQYVNPRNNDHVLIYENYEGKLDKDVISFWEVVERKRQGTNHIQLPFDGKRIVQTFKENEMFILFKNEKDIDWNNVEINDLADYIYKVQKIAGADYFMEICFRKHNDSREDKYAKSDYTYLKGFGEGKTGWHTLNPIKIVISVTGNIKRYNY

SEQ ID NO: 3964 - protein, 1151 aa, unidentified
  REGION 1..1151: note = Description of Unknown: Cas Enzyme sequence
NHTYLFLGKSLPLDFLIKKLKAMSKILGLDLGTNSIGWALVDNQKNQILGMGSRIFPEGVVNLGEGEGRETSKNASRTDARGTRRQFYRRRLRKRYLLKELAKKNLCPIDYRIIKDWNGKEIFNNQVLQNWFKLNPYELRAKAIKEKISLKELGRIFYHLIQRRGFQSNSRSAGKDNNEKSIIFKGDSKIGKIGISETRESIKENKTLGSYLHAIYPKNKTPYTSNLERIRNRYTTRQMYIDEFEAIWEFQKNYHDALTNELKTRIGGRKKDGYVDDGVLFHQRPLRSQKHLVGYCSFEPKKTKIQLSAIPFELFRIYQWVNTVEYNGQKLNKEERGKIINVLLSKDKVKFKLLRKAIGKLDGQYQFNYKNDDNIVGTYTISNLSNKKFFGNKWFEFTDKEQDDIWHVLYFFDDREKLKKYAINNWNFNEEKATKISKFNLKEGYSNLSRKAINNILPFLKKGFTYDVAVALGGVKNVLKEKWDENEQFILDNVPEIVHSNRKGGYIQPLKKMLVKEFNISEKFLKKLYHHSSVIEKTKILDRLPVNSNSDKELQGIRNPVVITALFEIRKLVNALIDEYGKPDKINVELARDLKASKSKRNDTRREQKRLEKENDRVKFELAALDQRPTHDAILKYKLWEECDKRCPYTGKNIEVNQLFSGEVQIEHIFPWSRSLNDSFMNKTLCFADENRAKGNLTPYEFYSKQGEERWEEIKLQALSCFKNKPNYPRAYNKFKQFIRIKHDDDFISRQLNDTRYISKEAKNYLSKICDDIIVASGQMTAKLRHHWGLNTILNKEDDIKSRDDHRHHAIDALVMACSTRGHLQELTKWNRYNRKPELKEFTMPWDSFRVDAEVSVEQILVSHKKANNLLTIRKHKVKKNGNIFTNIGVAARGQLHKETVYGKRRAPSSNEAYHVRKPIDSLTTKKHLDKIVDETIRLLILKRVDELGGFVKGKIPDNTFFETDENGIKQPKIFLPNKNGNPVPIKKIRIKENIGGAEQLKSDLNQHVNPRKNHHVLIYKDVDDNLQEDVVTFWTAVERKRQKQPVFQLPEEGSEMVTTLQINDMFLLGLKEEEINWDKPNNKILKQYLYRVQKLSSKFYEFRLVSESRLDKKVIPFYRRITGFGEGVGGWKTHIPIKIKISSSGKISRV

SEQ ID NO: 3965 - protein, 1419 aa, unidentified
  REGION 1..1419: note = Description of Unknown: Cas Enzyme sequence
MAKILGLDLGTNSLGWAIVENEYEDKKELFALKDKGVIIFSEGVKIEKGNEKSRAAERTAFRSARKLKFRRKLRKYETLLVLAKNGMCPLTENEVKAWRKSNFKKYPLNEEFLNWLKTDDKINKNPYALRDKASRTKINKLDLGRAFYHIAQRRGFLSNRLDQSDKGIIELHKPNLLDILAESNTITALIISINAYFESIEIANKKKKDLDAGQQKLLTLYNDFKFILKEKEDLQTLKDKIKVRLNKKENLGAVAKGITELDEKMKGFKTLGQYFNTIYGKSNQKIRGQYTAREDHYLKEFEVISRVQGLGKIIETEKETNKKYKGIVLDLYKAIFYQRPLKSQKGLVGKCTLEPTKYRCPVSRPEFEEYRMYQYLNNFKIKTPNDEKLRALTKDEKEKVKPLFFRKKVSFDFEDVVKKLIPKGEKAVYFKSKESSSARYVVNYKLNTSLSNCPTIFHLKNVFGEDWKSLHYTYKTTDKKGIAQTRTIEYQDIWHIWTTFTSEDKLYEFAKNRLQLEDKEATKFAKVNLKKDYAALSLKAINNILPYLKKGLIYSHAVFMANMKNVVKAENWNNEAERKIIQTEIKNIIDNHQLENRFLYVMNGCIHNNFKNSYSQKADDIYRKELNEAFEKEFGKKKWQALNVNNLFESKYQLFVAKFKEKAYFKIKRIDEKVLEFLDDNDLLKDKNKLYHPADIEKFRTVKETNKDGELLEVLGSSLSNSIKNPMAMKVLHKVRKLINTLILEGKIDKKTKIHIELARELNDANKRKAIQKWQKDKEEEYKVYRKKIIELYEKETNRTDFEPNTADVLKYKLWEEQQHICLYTGKTISLTDFLSENPNYDIEHTIPRSVSVDDSQMNKTLCENEFNRKIKKNQIPSELNNHNEILTRISHWKTKYEKLDNEIKGLVRASKTAVTKDAKDRIIQKRHYLKMERDYWKGKYKRFEIEEVKAGFKNSQLVDTGIITKYAQQYLKSYFDKVYTVKGTMVDQFKQAWGIKKTVTDANGVERKDRTNHIHHCQDAITIACMTKNKYNVLAKAWGLEEKRNFKEAKDKLKNSKPWKTFTEDVKNIQNEVLIVHSHKDKVPVQSKKKLRIRGKIQYIPETKIPKYQQGDTVRGSLHKDTFYGAILEKSKEGKKGFNKDKEGDNIVNYVVRKSLDGIKKTDVDKIVDEAVKGIVIKAIKDKILVPKKDVYKIETEQTVWMNEAKQIPIHKVRVFTPSVKKPLQDFKKHAVKDKSKHPHKRKYHVQNDENYCMAIYEGHNKAGKIKRSSELINMLDASKLLKFKRETNSKDEIVAAFDKKTNYPLKYILTKGKMVLLYENDPNEIWELSDKEKLERLFEITQLDVEGGAGIKLLFHQEAREKKKITAFMGLKSGMKGGKNIGKHEQYPWLKIGHNAFDSLVEDYDFTITTLGKIVKI

SEQ ID NO: 3966 - protein, 1462 aa, unidentified
  REGION 1..1462: note = Description of Unknown: Cas Enzyme sequence
MHKILGLDLGTNSLGWAIIENDRINNKETFELNAKGVIIFSEGVKKVKGNEISRAAERTGFRSARRLKFRRKLRKYETLLVLSKNGMCPLAEEEVIAWKKSGFKEYPVNEAFLIWLTTDDKVNKNPYYFRDKASRGGINKLELGRAFYHIAQRRGFLSNRLDQSDKGIIEIHKPILLDILEESKTITELTIAITEYFENIEIANKKKKDLDAGGQKLYSLYYSFQKFLKDKEDLKTLKDKIEEGLNKKENLGKVKQGIDDLNQEIKNGKFKTLGQYFYSIYGKSNQRIRNQYTAREEHYLEEFEQICKVQDLGEIIAKENEPSKRYKDITFALYKAIFYQRPLKSQKGLVGKCTLEPTKYRCPVSRPEFEEYRMYQYLNNFKIKTPENEKLRELTEDEKEKIKPLFFRKKVHFDFEEVVKKIIPKNEKAVYYKSKEASSSKYVVNFRLNTSLSNCPTIAHFRTIFGEDWKTLNYSYKTTDKKGIEKVRTINYQDIWHVWTTFTTNEKLYNFAFTKLGLSEKQAIQFSKVTLKKDYASLSLKAINSILPYLEGGLIYSHAVFMANMKIVVKEENWKNEKDRELIQSEIKEIIDNHQIENKLLFVINGYIKTNIKSSYSKEADAIYRKELEQSFEFEFGKKKWSEINKNDLFVKNYALFVENFSKSEGRFLKIKRIDEKVIEFLSDNDLLSNENKLYHPSDIEKFKLEKAKNNDGVEFTVLGSPLSNSIKNPMAMKSLHKVRKLINTLILEERIDENTKIHIELARDLNDANKRKAIQKWQKYREDEREIYRKKIQELYQPDFEPTLVDIEKFRMVLEQREDKKLVSNVDVSKYKLWEEQRHICLYTGNTIGLADFLNKSPKYDIEHTIPRSVSIDDSQMNKTLCENKFNRDVKKNQIPFQLVNHSEIMNRISHWKDRFEKLETEIKGLVRASKTAVDKDAKDRIIQKRHYLKMEYNYWRGKYARFEKEEINAGFKNSQIVDIGIITKYAQQYLKSYFKKVYSVKGTMVDQFKKAWGIKKTIKDEDGIEKKDRSNHIHHCEDAITIACMTKNKYDVLAHAWGLEEKDNFNKAKKELEYSKPWKTFSEDVKNIYNEVLIVHSHKDKVPIQSKNKLRKRGKIQYRIVSELPTEFKNKKEGKDYFIVEKDKYKIPIYLQGDTVRGSLHKDTFYGAILQQNSENNKTFAQDKEGNGIVKYVVRKPLDGIKKTDIDKIVDETVKKKIKQAIKDKVLIAKKDAYKIDSDKIVWMNEDKQIPIRKVRVYTPSVRNPLKDFKEHALKDKSKHPHKREYYVQNEENYCMAIYEGKDKKGKVKRSSELINMLDAGKLLKLKRENNSTNEIVSKIDKKTNYPLKYVLTKGKMVLLYENTPEEIWEISDNERLERLFEITQLDRAKGAGIKLLYHQESREKKKITVFMGLKVGMKGGKNIGKHKQYPWIKIGHNSFDALVEGYDFNITPTGRIEKL

SEQ ID NO: 3967 - protein, 1130 aa, unidentified
  REGION 1..1130: note = Description of Unknown: Cas Enzyme sequence
MSKVLGLDLGTNSIGWAIVDDKSNEIKRMGSRIFPMGVENLGDGEGKEISKNASRTGARGVRRQLFRRRLRKKILLKALSENKMCPLTDDDFNEWKVNKYFPENKLKLWFTLNPYELRKKALTQKISLEEFGRILYHIGQRRGFLSNSRSAGKDDGAIFKGKPKEGKIGIDKTKESIEGKSLGHYLFEIYPKENEPYRSGLERIRNRYTTRQMYIDEFELIWTKQSEYYNELTEKLKISLGGRKSDGYKEDGILFHQRPLRSQKHLVGNCSFEPSKTKCPISAIPFEQFRIYQWVNTVDCNGEKINKEERLKIVNALLRKDKLSFKELRKIIGKLEAHFKFNFKDDDKIVGSYTISNLSNKKYFGEKWFDFSEKEQEDIWHILYFFDSKDKVKEYALNNWGFNEKQASNISNFNLKDGYSNLSRKAIHNILPFLRMGFVYDIAVVLGGVKNAFGLDWKLLDQKQKDFIIDNIPAIVRTKIKGGFIETLKEVLKTEFNLTDKRLSKLYHHSAAIQAKTILNKLPIGKDADKAIQAIKNPIVITALFEIRKLVNELVDEYGKFDEIKVEMARDLKASKSQRNRIRKEQKRLERENDRVKARLEEEGQRVTHESILKYKLWEECKKTCPYTGATIPLHKLFTGEIQIEHIHPWSRSLNDSFSNKTLCYADENRLKGDKTPYEFYGNDKANWFVIKERALKLFSDTKEYPNAYQKFKRFVQQKFDDDFSSRQLNDTRYISKEAKNYLTQICKKVTVAPGQMTATLRHLWGLNYILNKEDGGKTREDHSHHAIDALVMANSKVNYLQELSRRNRYIPNYDLKDFPMPWEGFNADAEKAVENILVSHKRLNKIVTIRSHTTEKNGKVYKNVGVAARGQLHKETVFGKRKAPDCNEKHYHIRKPIESLTTQKQIDKVVDATIRGLILKRIQVLGGFIKGKLPDNTFFIVDENGVKQPQIFLPNKNGNPVPVLKVRLKETIGGAEKLKENVNQWVNPRNNHHVLIYKDEKENLKEDVVTFWTVVERKRQQQPVYQLPGNGKEIVTTLHINEMFLLGLNEDEIDWENPNNNVLKSHLFKVQTLSSIFYEFRLCSDATQNKDTNSKVFKRIQSFGSGKTGWKKFNPIKVKVSVTGKVEKI

SEQ ID NO: 3968 - protein, 1548 aa, unidentified
  REGION 1..1548: note = Description of Unknown: Cas Enzyme sequence
MTKILGLDLGTNSIGWAIVENDKILGMGSRIFPEGVVAKTIGTGDREESKNASRRNSRQQRRQFYRKRLRKVKLLRTLIDLQMCPLTNEELDKWVKWDKVLKSEGRKAPNSNAYEKWHRMNPYLLREKGLNEDLTLCEMGRVLYHLIQRRGFLSNRKGKDDGKIYKGKEGMTGITETQKYLNENTLGSFLYSISPKEGEPFKLITDESGNELRARARYTLRSMYIEEFEKVWNRQARQLGLNNKTATKNKILFLKGSLTENNRNKTKIEKLKNKYGIDNVKIEEIKDKSKKGLFYKVSVSTQVPLKLFLGGEIENDEDGNLKFKSNESVLFWQRPLRSQKGLLAKCRFEPDVKDKKGNYLQKGKTPCHLSHPLYERFRAWQFINNIKYGKNQKLEDSQRLQILELIDSKDSNFNFSEIPKKLKMIYEKWNYGSEQKIAGNYTIKNLKPLFNEEIWNKKYEIETKNGDFLTEYGYEKIWHCFHFFEDNENLLKKLKIDFGLVEKYFEKASKINIKEGYSNVSLKAINNILPYLKEGFQMSDATLLGGVRNAFGSRWRYFKDDHEQIKKDIIKINREKSNREGESIAKIKSYLIENKYGFVKNDIQFIKLYHHSQEIDKKTIKDKLDPIENLRNPIVQQGVNETRRLVNQLIKKYGKFDKIQVELGRNIKNSKKGRQEQSSRISENTTKNDSARKLLTEYGLKHSRDNIQKVLLYKEMQDKGVVTICPYTNKSINIDDVLGPDNKIQIEHIIPKSVSLNDSFANKTLCESKFNSLKRSLTPYQFYLKNGDSKLWGGAISWEEIEQRVYKVLPYYKAKRFTSKIKIEEADVKSSFIERQLNDTRYISKKVKEIMSQVCEDVRVLPGQLTSELRHLWGLNNILQPVMLVDLPNYKLEKGKSTPHYVVLDEANKPISVIPIYKEKPLLKANETTITGKVDKGVFKVNDNFIKLNVNTPELINGEYWLKLKLSKPKEIIRIFKERPITTENEIVLRGKIEKGKFSNQSISRIIATNFDNGSYWAKLPVTNIKFETPEKGKQPKKTGKQILLYGEVKEGIFKSYIFECSTSEQNGKYWVIIDINTENVSFERAINEKPAVSDKRIIIEGSVNDIGVFVSEIDTEHQFETDQKKGKYWFVFDIIDNLNDFNAIKNTKPSPEKEQTLVEGNVWVDKYTGEIKFDPKKNRDDHRHHAIDALVIALSKQRYFQELSVYNAQRDARKKGLVFDKEQLNFPDPWNDFHRDAKKEIEKILISHKQNKNILTKVTKKITKNGKTYTSVGDAVRGQLHKEYIYGERQAPLKTTKGYHRRIKISELSDSQIVKIVDGEIRKIIINAKKEEIVLKKEIIHLEKIKKQYKTEEEENSINEQIEIIKNKIHALYTLKNKNGVPVPIKKVRIRTEMSNAQQLKDANQFVDLQNNHHIIIYKNEKEELKEDIISFWEVVERLRDNQKIYQLPSVDRNGTIITTLQENDIFILGLTDDEFRDNKNNYTFLTKHLYRVQKTSKMDISFRHHLASTLEKKEQVIRVASLKKYESLNPKKVRINELGEIKKFNL

SEQ ID NO: 3969 - protein, 1493 aa, unidentified
  REGION 1..1493: note = Description of Unknown: Cas Enzyme sequence
MAKILGLDLGTNSIGWAIVEKENDEFSLVDKGVRIFSEGVKSEKGIESSRAAERTGYRSARRLKYRRKLRKYETLKVLSLNNMCPLSLKDVEEWKKSGFKKYPLNPEFLKWLRTNDDENINPYAFRDSASKEKVKLYDFGRALYHIAQRRGFLSNRLDQSADGILEEHCPKIQSLIEDLDTTEELLTEIKEYFIEIGIIDENIKGGYAKDLDEGDKKLVSLYKALFAIIKKNENNFEKTKEGVVERLNRKEDLGAVKSGIGEISYEMKVGNFTTLGQYFFSLYSKDKIRNKYTAREEHYLKEFEILCKTQEILGIYEKEQLPEKRYFSLVKELYRAIFFQRPLKSQKGLIGKCSFEKSKSRCAISHPDFEEYRMWTYLNTIRYGTQEDKTLRFLSQEEKLNLIPKFYRKKDNFNFEDLSKELIPKGATFGFYKSSKKNNYHYLFNYKPTDTVSGCLVSASLKNVIGEDWKTKVYTYATLNSKGDEVTSTVDYRDLWHLLSVSSTDIYLQEYAKQKLKLDDKNSKVFSKIRLKKDFGNLSLSAITRILPYLKQGLLYSHAVFMANIEQIVDKDIWEDTNLRIEIQKKIAEIIENHTYENGLLEVVNSLIKECIKPHKDGNQQFYSKQAEGLYKKDLNKKLAIFFKYNNIDNENQKASILNNLFLVFIEQLKAFEFAKIKRLDEKVIEFLKGENNDGTIYCTDEKRIKKLYHPSDIEVFKKKIIKDELGNEKIVLGSPLTPSIKNPMAMRALHQLRKVLNTLIFEGQIDQKTRIHIEMARELNDANKRKGIQDYQNEIKNEREKYIIEIKKLYFEECKKEIEPNQDDLLRYQLWLEQNKAEIYEEGKNISISDIIGSNPKYDIEHTIPRSISQDNSQMNKTLCSQLFNRDVKGVKMPTELSNYLEILPRIAHWKETADNLSREIEIISRSIKSAVTKEQKDKKIRRRHYLNLKRNYLQGKYDRFIWEEPKVGFKNSQIPDTGIITKYSQAYLKSYFKRVESVKGGMVAEFRKIWGIQESYQENGKKYFNEKDRSKHTHHTLDAITIACMTKDKYDILAHAWTQEDQGKIKEARILLADSKPWKTFKEDLAKIEEEILVSHYTPDNVKKQSKKIIRVRGKKQFIAEIERNENGKAIPKKDTNGKIIYKLNKQGGKIPRVQQGDTIRGSLHQDSIYGAIKQPEIDDATKKPKHTSKGTFVIKKDIKGEDIIHYVIRKELNKLSESDVTNIVDNVVREKIIKAIDDGIVTFKTIQSKKVAVIKEGVKIWMREPDEEKELVGIPINKVRIFANSVKNPLEIKEHSLLSKSRHEHKQKVYGQNDENYAMAIYELNGKREFELINNFNLAKLLKQNQGLYPLFKEKEVKGKKVQIPIAKSNNRDIVLKRGQQIIFYDNNIEKPKDINEITNLEGRIYIVEGLSIQRIVRPSGKIDEYGVVMFRYFKEARKADDIKKDKFKPDGAFKLGENKPTRKMNHNQFSAFVEGIDFKVLPTGKIEKI

SEQ ID NO: 3970 - protein, 1369 aa, unidentified
  REGION 1..1369: note = Description of Unknown: Cas Enzyme sequence
MTKILGLDLGTNSIGWAIRDTHKEGNQIVDTNVIVFPQGVGEEKGVEFSLASERTKHRASRKLYRRRKKRKTDLLNLLIDNGFCPLTTDELLIWSVYKKGQEMKYPTENYEFSEWLKINPYEVRSKAVSSIISKLELGRALYHICQRRGFKSGRKDADAGKDLEQFKKEQIILSENGFKTLGEYYNDLLQKNQKVRKTKFSADDQEVNSSRISYVEEFNFLMKSQNVTKDLADKFFDAIFFQRPLKSQKGAVGKCTLEKTKSRLAINHPLFEEFRMFQYLNSIKVKERNDDKFVFLSEFPDYYKIAEDKFYRKVKNFKFVDISKSINNQAKKNNLFFEFNYNDKYPIVGSPTISQLIEVFDAENWKNCKTIITATYKKQGTKSTDDLVDELWHTLFFAGDFVNDETSKKVKTFIRDRFSITEEKVNYYENINLKQGYSSLSKKAIGKILPFLEEKIIYPYAVFFANIDTVIGKEKWNENKQFIQDTIIDIISGYKDKTLKIDIVNGLVGDFIKEYDNSNYDYILDETDKKHVLDKIKIFYGKYLFEKIAEHEKIALQKEIEITFQKQLQKRRVGGYYLTKPRIDEIIKDFLIQEFKVTKEQADKLYHPSAMDAYPQSQDGFLGLPFTNAVKNPMAMRTLFYLRKLVNTLLKENKIAPDTEIIIELARELNDKNKRLAIERWQRERENENKKFREKLEEFAKDTNSKVTETDIIKYRLCQEQNNKCLYTNETINIENLLGANPQFDIEHTFPRSKSFDNSLVNKTLADKKFNQIKGNQIPQDLDDKYKLNFINNTKHWKDSIEGLEEKIEQQRYFSKVASTVEQKNRAIQQRHYLKLQLDYWKQKLYRFTATEIKPNFKNSQLVDTGIITKYAQLFLKSLFQRVFPAKGTMVADVRKSWGLDAKDRNYHYHHAIDAVVLSCMDKSIRDGLAEAFKESEENRYSDKFKVKKPWKTFTEDVNQLKDNIIVVHNHKDNIDKQTVKKLRKRNKIQPKVDYKSKADGSYVLDEKGRKIIKKYYYQKDKNGKLIPQEGNKISELKIKDRIEGTDYFKVEDKEYTNYYEYVRNKKNEIVYKKDYIYEKGQGIRASLHKDTFYGAIERENENNEKEIWFVIRKPVTSAFTEREVNAIVDEGIKSRILKYGLKNIKTEEGWILLPSEKDAQGKEIKEMLIKKIRVKTRNTDLPKIKAQSHVTQGKRKEYKESYYATLENIFAMAIYETINDKGKREQAFNTISAFDLAKHNRGNSKLEMPVEENIIKNKGKKSEILLPLSKVLKVNQMAIFYENDPEELKTISKQDLSKRLFKITVFEGDSRIRFRHHAQGGADKDLKGKSSLDFDKSAQKLRISLSNIKAIYEDIDFKITSSGRIIFR

SEQ ID NO: 3971 - protein, 1514 aa, unidentified
  REGION 1..1514: note = Description of Unknown: Cas Enzyme sequence
MRKIKLGLDLGTNSIGWAVLEKEDGKYDFLKCNDKNGNLIPTKGSYIFPKGVNADENSKAAERRGFRGARRRLERLILRKIATLKVLNEFELCPKFDENELGNWKNKKIYPCENEKFIEWQRTGKKNGNSENEKLKQPYYLRHLAATIDGLMESEQGKLLLGRAFYHLAQRRGYLSNGEEEQSEDKLDLFKTEVTKLLEEINDSGAFKEPFQVLFDNRKGDKDVVKLGNKIFKELKNKIEFEKIRTFIITEFSKPENLGKVMKSIGELSEAIQKSGQPTMGSYFYSIYAKTDKKTGLITKIRGRYTHREEHYLKEFNYICDKQNIKGNLRDKLHHAIFYQRPLKSQKGLVAMCPLEPKRKRIAVSHPLFEEYRMWESINRIKIGRYKTRLDFLTKEEKELIKPLFLQKTDFEFSKIAEKLSGDKTYCYVKLPEKVFFKKSDKPIEGGVAELFFNFPLDKKFSACPTISALTKLFGKDKYNEILFLNTGYKDEKNKTQISVEDIWHCLFIDDYGKKDRNTIRKEFAQKHLSLDEKGVEDFQKIKLIKGYGSLSKSALKKIVPFLEKGEIYSNAVFLANISKVLNRKINDEEQKIIAKKINEALNIHKVEKQNIGIVNNYISKLKDSKNESLGNNSFSKEVHKKGLISEIINWIGESEYHNLKENEKYQLENNCWNKFSEAALDKSAKEIVYLSTKTIPEFICDKLTEAFPNDTIDVTKLYHPSAMEVYKPAEKKLGNPEISSIKNPVFNRSMHQIKRLCNKLINEGIVDKDTEVNVEVAGEINSASYRKAIAQWQKEQEIIRDWAKNEIINTYPKECQHEISPTDTDIIKFVLWKEQNHQCLYTEAQISICDFLGGKTTYDIEHTIPRSKLHDNSLTNKTLANAEFNRKIKKDILPGLLNENYKKKLITNESIIKNRNANLKSYSLKNNVPTWGVSLKSLKEELKKFKNAAKVIADPVSHDEVMTKAHYTKIKLDYLSKKYKNFECEEITRQFTNANLVDTRIIAKYARAYLNSYFNKVNVVNGKITETLRKMWGLESEYAVKDRSNHIHHCIDAITVACVERGTANWISEAFHTYEKDYFKGNDNPKYQLKKPMENFAERMHNLHQEVFIFHKQIDRVKPLLDAVEKGNDTKLNLRGKLNSQNPYAHIKKNEELIFAQRKPITKISGGDIEYIIDEGIKSRLLKLADEKGWEKLLEFSVKENEDAIEKEKEHKNSIAFKIFEKIKKDDKKKEIVLQSVTKQNLISEFSDINGLITMLFNTIIRLDIDEKKRESYKEKITKEVTNLSRTKGLELLLKESEGVIILPEYYDENRKKRIGRMVLKNIRLESSKTNLKDYKKIRTVDKSKFEHKRDYYFDKDSYTNYEARIFGDLIPDKNGKLKNRKYKLINHYNIVKNIFEVENELPILKLHQDDMFLVFDKSPNDEISWDDKKDIQNRLFKIVKFDENGIIVLVRHNYAKGNVDSSKAIKSEINLSDLSEVILRRSPSTLRVIPAKIDALGNIDVEFSKKFIELNS

SEQ ID NO: 3972 - protein, 1125 aa, unidentified
  REGION 1..1125: note = Description of Unknown: Cas Enzyme sequence
MTKILGLDLGTNSIGWAVVDDKENKILGIGSRIFPEGVDNLGDGEGELSKNASRTAARGARRQFFRRRIRKYLLLKLLSDLKMCPLVKADFEEWKKTRKFPQHQLLHWIALNPYEFRNKALTEKLTNEELGRVFYHLIQRRGFLSNSRSAGKDDGAIYKGNPKDGKIGIDQTKQEIADKTLGAYLYEISPKEGQPFVDELERIRNRYTTRQMYVDEFEKIWEIQAKFNQSLTLDLKEKIGGRKKDGYNSDGVLFHQRPLRSQKHLVGNCTFELNKTKCPISAIPFELFRIHQWINTIEYNGKLLNAEERKKAFDFLILKDKPSFKDIRKAIDKLDAAFKFNYKDEDKIVGTFTISNLSNKKFFGAKWFDFSEKEQEDIWHILYFFEDKSNLKEYAIKNWGFDDEKADVISKFNLKDGYASLSRKAINNILPFLELGEQYDVAVVLGGIKNAFGKSWDNLTDDKKSLILDNVPAIVRSNFKGGFIEHLKKFLVDEFSFSEKQLKKLYHHSINLNTAEILKKLPVNAEADNEIQAIRNPVVITALFEIRKLVNEIIDIYGKPDEIKVELARSLKASKSGRNEERRRQQKLEKENDRVKNEVNYLGKHLSHDNILLYKLWEECKKTCPYTGKSINVTQLFSGEVQIEHIHPWSRSLNDSFMNKTLCFADENRAKGDRTPFEFYGKQGEEKWSEVKNRALKLFSDTAQYPNAYQKFKRFVQQKFDDDFASKNLNDTRYISKEAKNYLTKVCEKVNVAPGQMTANLRMKWGLNSILNLEDNTKTRDDHRHHAVDALVMACSKVSYLQELSKWNRYNRTSELKDFPMPWENFRNDADKAIDAILVSHKKTNNILTVRTHKTEKNGKVYKNVGVAARGQLHKETVFGKRTAPFSEEAFHVRKPIESLTTEKQVVKVVDEAIRKLIFKRVNELGGYDKGKIPANTFFLVDENGVKHLQLFLPNKNGAPVPILKVRMKENFSGAEQLKSEVNQWVNPRNNHHVLIYKDENDNLKEDVVTFWTVVERKRKGFPVYQLPIGGKEIITTLHINDMFLLGLNEEAIDWENPNNEALKESLYRVQKLTSSDYFFRKHKSSTITDDDYKQIRGFGEGKTGWLNFNPIKVKVSVSGKIKKL

SEQ ID NO: 3973 - protein, 1137 aa, unidentified
  REGION 1..1137: note = Description of Unknown: Cas Enzyme sequence
MSKILGLDLGTNSIGWAVVDDDKHQIIGMGSRIFPEGVVNLGEGEGRESSKNASRTEARGTRKQFFRRRLRKRYLLKESAKNNLCPISSNLIKDWNGIEIFKNEELQDWFKLNPYNLRAKAIKEEISLYELGRIFYHLIQRRGFLSNSRSAGAEVKESSAIFKGDAKIGKIGISKTQESIEQSKTLGSYLKTIQPVENEPYSGELERIRNRYTTRQMYIDEFETIWEFQKKYHSELTEHLKSLFGGRKKDGYKEDGVLFHQRPLRSQKHLVGYCSFEPKKTKCPISAIPFELFRIYQWLNTLSYDVNGKKQEITLEEREKIVDLLLSKEKPSFKEIRKAIDKVDGIYKFNYEDKDKIVGSYTISKLSSNKFFGEKWFDFSEKQQEDIWHVLTFFDDSDKLKEYAIKNWGFDAKKAVDISKFNLKDGYANLSRKAINIILPFLKQGFMYDVAVGLAGAKNALGNNWEQHQQFVLDNVPYIVRSNLKGGYIDPLKNMMKVEFNCSEKQLKKLYHHSSAIEITKVLGKLPVNKEADNEIQKIKNPVVITALFEIRKLVNEIIDVYGKPDEIKVELARDLKSSKKNRYETRRKQQFLEKENERVKKELEKLGQRINHTNILKYKLWEECNSTCPFTGRVITISQLFTGEIQIEHIFPYSRSLNDSFNNKTLCFVNENIAKGNKTPYEFYSQQGEEKWEAIKLQALSCFNDKYPNYPNAYRKFQHFVKQKHDEDFISRQLNDTRYISKEAKNYLSKICTNVMVAPGQMTAILRHYWGLNTILNKEDDTKTREDHRHHAIDALVMACATRSHLQELSKRNRYNKNHELKDFPDPWFNFRIDAENAVEQILVSHKKKKNLLTVRTHKTKKNGVEHKNVGVAARGQLHKESVYGKREAPNSNTAFHIRKPLENLTTERHLEKIVDVTIKFLILKKINELGGFVKGKIPNETFFKVDENGVKQPQIFLPNKNGNKVPIKKIRIKENIGGAEQLKETINQHVNPRSNHHLVVYLNKENKYKSRVVTFWEAVERKRNEMNVIQIPLECKLLMSIQKNDMFLLGNHMDEINWNNNSLLKNTLYKVQKISKKPDLSMKEVCFRKAIDSRSDKEAQKDYIYIKGFGTGKTGWQAFNPIKVKISVTGKIEKL

SEQ ID NO: 3974 - protein, 1367 aa, unidentified
  REGION 1..1367: note = Description of Unknown: Cas Enzyme sequence
MTKILGLDLGTNSIGWAIVEKENSEFSLLDKGARIFSEGVKSEKGVESSRAAERTSFRSARKLKFRRKLRKYETLKILAENKMCPLSIEDVEKWRKSGFKDYPLNDEFLKWLRTDDDKNINPYLFRDKASRSKANLYEIGRALYHIAQRRGFLSNRLDQSAEGIFEEHCPKIEDAIEDVLTIEELKNEISDYFEGTDIIDKTEKSGFKKDLDEGEKKLKSLLTALEKILKSNENDFEKAKEEIILRLNRKDDLGVVKQKIHEISQAMADGNFKTLGQYFYSLYNKEVEKKNINTQEIEKFNRAKIRNQYTAREEHYLAEFEIICKAQNIEGVIEKELLPEKRFTGLAKNLYKAIFFQRPLKSQKGLIGKCSFEKSKSRCAISHPDFEEYRMWTYINTIKIKTPEDETLRFLTAEERQKLVSKFLRKKDNFNFEDLAKELIPKGASFDFYKSFNAKAAHYLFNYKSKDSVSGCAVSASLKNIFGEDWKTKIFSYQTKNGKGQTVNRNVDYKDLWHLLTVSTSDIYLQEYAREKLGLDEKQAKSFSKIKLKKDFASLSLNAINKILPYVREGLLYSHAVFMANIENIVDEKIWDDERQRKNIQNKIAEIIESNTYDNGLLEIVNGLIKDCKREDAYYSKEAEETYKSDLQKKLSSFYKFHKIEENKEQVLNELFPVFIEQLKKYEFIKIKRLDEKVLEFLDGKNEDGEVFCTNEKLLKKLYHPSDIEVFKKKIIKDEFGNEKVVLGSPLTSSIKNPMAMRALHQLRKVLNALILEGQIDSKTRIHIEMARELNDANKRKGIQDFQNENKKARASYREEIKKLYFEETKKEIEPTEDDVLRYQLWIEQDKKEIYEEGKCISISQIIGNNPDYDIEHTIPRSISQDNSLMNKTLCSQRFNREVKKTKMPIELANYEEILLRVDHWRKEAEKLSWEIDQIVKTTKGAATKEAKDKKIRRRHYLTIKRNYLKGKYDRFIWEEPKVGFKNSQIPDIGIITKYSQAYLKSYFNRVESVKGGMVAEFRKIWGIQESYQENGKKYYEIKDRSKHTHHTIDAITMACMTKDKYDILANAWTLEDKEQIGDARKLLADSKPWKTFTEDLKQIEEEILISHYTPDNVKKQSKKIVRIRGKKQYVAEVENDSNGKAIPQKDANGKIIYKLNEKGERIPRVQQGDTIRGSLHQDSIYGAIKNPLNKEEIRYVIRKDLESIKATDIENIVDEVVKEKVKVAKENKILIFSSNAQQKNKLNGTVWMNEEKGIPINKVRLYANSVKNPLEIKEHTALSKSRHVHKQKVYAQNDENYAMAIYELDGKREFELINNFDLAKMLKQGEGYYPLFKEKVFKGKIIQIPITKRNNRHLVLKRGQQVIFYD

SEQ ID NO: 3975 - protein, 1470 aa, unidentified
  REGION 1..1470: note = Description of Unknown: Cas Enzyme sequence
MSKILGLDLGTNSIGWAVVEKDRGENEETFKLKDKGVVIFSEGVKLEKGSEISRAAERTEFRSARRLKFRRKLRKYETLLVLSKNGMCPLTEEEVIAWKKSGFKKYPTNEYFLSWLQTNEDKQKHPYFHRDKACREKINKLDLGRAFYHIAQRRGFLSNRLDQSDKGIIERYQPDIFEIIGKSTSKTELILKIDDFFKEQSVIDFKLKGIRDLDAGGTELLKLYRSFKRIFKENDDFKELKIGITERLNKKENLGAVKQGISNLDEKIKEGDFKTLGQYFYSIYGKSNQRIRNQYTAREEHYLKEFEQICKVQKLGEIIAKENEPNKRYKRLTLDLYKAIFYQRPLKSQKGLVGKCTLEPAKYRCPISRPEFEEYRMYQYLNNFKIKTPDDEKLRVLTEDEKENIKPLFFRKSKVSFDFEDVVKKLIPKNEMGVYYKSKESYISKYVVNFKLNTSLNNCPTIAHFKNIFGEDWKNKTYTYKIINKKGVEKERTVNYQDIWHVWTTFTTNEKLYNFAFAKLGLTEKQATQFSKVTLKKDYASLSLKAINNILPYLKNGLIYSHAVFMANMKNAVKEENWNNETDRELIQSEIKKIIDKHQIENKLLFMINGYIKTNIESSYSKEADGIYRKELNEVFEYEFGKKKWAAINTNNLFENNYALFVEKFKKSKNRFLKIKRIDEKVIDFLSDNDLLSNENKLYHPSDIEKFKLEKFRNKDGEEFTILGSPLSNSIKNPMAMKSLHKVRKLINTLILEEKINENTKIHIELARELNDANKRKAIQKWQNDREEERKVYRKKIQELYKSDFEPSLNDLEKFKMVLEQREDKKIVSKEDVSKYKLWKEQRHICLYTGNTISISSFLNKNPDYDIEHTIPRSVSIDDSLMNKTLCNSKFNRDKKKNQIPFQLANYSEIMSRISHWKDRYEKLEAEIKNLVKASKTAADKDAKDRIIQKRHYLKMEYNYWKGKYTRFEQEEIKAGFKNSQITDIGIITKYAQQYLKSYFNRVHSVKGTMVDQFKKAWGIKKTIIDEDGIEKKDRSNHIHHCEDAITIACMTKNKYDTLAHAWGLEEKGNFDKAKKELECSKPWKTFTEDVKNIKNEVLIVHSYKDKVPIQSKKKLRKRGKIQYRVVSILPAEFKTKKEGEDYFIVKKDKYKIPIYLQGDTVRGSLHKDTFYGAILEQNQVNKKEFYKDKEGNGIIKYVVRKHIDGIKKTDINKIVDEVVKEKIKKAIENKVLISRGDSYKIDSDRTVWMNEKKQIPIHKVRVYTPSVKNPLKDFKKHSIKDKSKHPHKQEYYVQNEENYCMAIYEGRNKKGNIKRAFELLNMLEAGNYYKLSNKSNAKENEIVPIKDIKTNFPLKYLLIKNTQVLFYQNNPEEIWELDVIEKQKRLYKIIGFEGDGRIQLRFHQIAMQQSSMNKGELTIVKYMKDNNLKNSVINFTNPVPWLRITGNNLNFIVDGVDFKITPTGKIEKL

SEQ ID NO: 3976 - protein, 1128 aa, unidentified
  REGION 1..1128: note = Description of Unknown: Cas Enzyme sequence
MAKILGLDLGTNSMGWALIDDKQNKILGIGSRIFPMGVENLGDGDGELSKNASRTGARGVRRQFFRRRLRKKILLKALSEHKMCPIDANDFENWKKTKKFPSDKLAAWFALNPYELRQKALKEKLSLDEIGRILYHLIQRRGFLSNSRKGGSDDGAIFKGNPKEGKIGIDETLESIEGKTLGSYLFDIYPKENEPFKAGLERIRNRYTTRKMYVDEFELIWNKQSQFNSVLDEDLKELFGGRKLDGYKEDGILFHQRPLRSQKHLVGNCSFEPSKTKCPISAIPVELFRIYQWVNTVEYNGSKITQQEKEKIIEQLLSHDKIEFKKLRKTIGKESSEFKFNYKDDDKIVGTHTISNLSNKKYFGKKWFDFSEKEQEDIWHVLYFFDSKSNLKEYAIKNWSFTDEQAEAISKFNVKDGYASLSRKAIENILPFLKQGYTYDVAVVMGGIKNVFGDKWQDDTLENNQKQFDLIDNVEGIVRTKIAGGFIDTIKELLIKDFALNDKQLKKLYHHSTTIDANAIVNKLPLGLVADKEIQAIRNPIVITALFELRKLVNELIEEHGSLDEIKVEMARDLKMSKTQRNKIRRDQKRLERENDRVKAEVEKYTRVTNDNILKFKLWEECKQTCPYTGLAIPVSKLFTGEIQIEHIHPWSRSLNDSFNNKTLCWADENRRKGDKTPFEYYGKDESNWSAIKERALKLFSDTREYPNAYQKFKRFVQIKFDDDFSSRQLNDTRYISKEAKDYLSKVCKKVAVSPGQMTANLRQKWGLNTVLNDENAKTREDHRHHAIDALVMACGKASYLQELSKWNRYNRNYDLKEFPMPWETFRFDAEKAVDKILISHKRISNTITVRTHTTEKNGVKYKNVGVAARGQLHKETVFGKRDFNGEEAFHIRKSIDSLTTEKQLEKVVDETIKKLILKRIQELGGFVKGAIPANTFFIVDANGIKQPQIFLPNKNGAPVPILKIRMKESIGRAEQLKDNVNQWVNPRNNHHVLIYKDKNENLKEEVVTFWTVVERKRQGLPVYQLPNDGAAIITTLHINDMFLLGVKEEEINWENPDYDVLKEQLFKVQTLSSIFYEFRLSTDSTQNKDTNSNVFRRIQSFGDGKTGWRNLNPIKVKISVSGNISKI

SEQ ID NO: 3977 - protein, 1465 aa, unidentified
  REGION 1..1465: note = Description of Unknown: Cas Enzyme sequence
MSKILGLDLGTNSIGWAIVENDDDGFSLIDKGARIFSEGVKSEKGIESSRAAERTGFRSARKIKFRRKLRKYETLKVLAENKMCPLSIEDVEQWRTSGFKDYPLNDEFIKWLRTDDDKNINPYFFRDKASRGKANLYEIGRAFYHIAQRRGFLSNRLDQSAEGILEEHCPKIEDIIEECLTIEELKTEIHQYFEVLDILDKNSKDLDEGEKKLKSFFNSLDKIINTNLKDFEKAKNEIIEKLNKKENLGAVKQKISEISQAMADGGFITLGQYFYKLYNKEAEIKNINTQEIERFNRSKIRNQYTAREEHYLKEFEIICKAQNIEGVIEKELLPEKRFTGLTKELYKAIFFQRPLKSQKGLIGKCSFEKSKSRCAVSHPDFEEYRMWTYINTIKIKTPEDETLRFLTVEERQKIVPKFFRKKDSFNFEDIAKDLIPKGASFDFYKSFNAKSAHYLFNYKPKDSVSCCVVSASLKNIFGEDWKTKAFSYQTKNSKGEIVNRNVDYKDLWHLLSVSTSDIYLQEYAKENLGLDQKRAKSFSKIKLKKDFASLSLNAINKILPYLKEGLLYSHAVFMANIENIVDKEIWKDEKQRKYIQQKIAILIETNTYENGLLEIVNGLIKECKSDDAYYSKEAEETYKNDLKNKLNSFYKYNKIEENREQIFNELFPVFMDQLKKQEFIKIKRLDEKVLEFLDGKNEDGEVFCSNEKRLNKLYHPSDIEVFKKKIIKDEFGNEKIVLGSPLTSSIKNPMAMRALHQLRKVLNALILEGQIDSKTRIHIEMARELNDANKRKGIQDFQNENKKARESYREEIKKLYLAETKNEIEPTEDDVLRYQLWIEQNKMEIYEEGKSIGISQIIGDNPDYDIEHTIPRSISQDNSLMNKTLCSQRFNREVKKTKMPFELTNHEEIKLRVDHWRKEADKLNWEIEQIVKSTKGAATKEAKDRKIRRRHYLTIKSKYLQGKYDRFIWEEPKVGFKNSQIPDIGIITKYSQAYLKSYFNRVESVKGGMVAEFRKIWGIQESYQENGKKYYEIKDRSKHTHHTIDAITMACMTKDKYDILASAWTLEDKEQISDARNLLANSKPWKTFTEDLKQIETEILVSHYTPDNVKKQSKKIVRIRGKKQYVAEVEKEENGKTVPKKDSNSRIIYKLNENGERTPRLQQGDTIRGSLHQDSIYGAIKNPLNHEEIRYVIRKDLESIKATDIENIVDETVKEKVREAKENKILVFSANAQQKNKLNGTVWMNEEKGIPINKVRLYANSVKNPLEIKEHVALSKSRHEHKQKVYAQNDENYAMAIYELDGKREFELINNFNLAKLMKLGEGDYPLFKEKVSKGKIIQMPIAKSNKRDMVLNKGQQVILYDIEVENPKDITEIVDFKGRVYIIEGLSINRVKSGKKNFEYGVIMLKYFKEARISDEIKKDNFKPDGDFKLGEDKPTRKMSPGQFTAFLEGIDFKVLSTGKIEKL

SEQ ID NO: 3978 - protein, 1291 aa, unidentified
  REGION 1..1291: note = Description of Unknown: Cas Enzyme sequence
MTKILGLDLGTNSIGWAIRDTNKEGNQIVDTNVIVFPQGVGEEKGVEFSLASERTKHRASRKLYKRRKKRKTDLLKLLIENGFCPLTNDELLIWSVYKKGQEMKYPTDNFEFSEWLKINPYEVRSKAVNSIVTKLELGRALYHMCQRRGFKSGRKDADAGKDFERYLVEKKELDLNGFKTLGEYYYDLLQKGLQVRKTKFSAEDETVNSSRISYVEEFNFLMKAQNISKELADAFFDAIFFQRPLKSQKGAVGKCTLEKSKARCPISHPLFEEFRMYQYLNSIKVKERNNEKFVFLSEYPEYYKIAMDKFYRVSAKNFKFLDISKSINTAAKKTSLLFEFNYNDKYPIVGSPTISKLIEVFDADDWKDCKKIIATKYKKQDNKTVDDLIDELWHTLFFSSDFVNDITSDKVKSFVRNRFDISEEKINYYEGINLKQGYSSLSKKAIGKILPFLENTIIYPYAVFFANIDAIIGKDKWNENKEFIQDTIIDIISNYKTQTLKIDIVNGLVGDFIKEYDNSNFDYILDETDKKNVAEKTKLFYGKYEWEKMSDESRYELLNEIEKEFQQQLQKRRIGGYYLQKPRVDEIIKDFLVQEYKISKEQADKLYHPSAMDAYPQSQDNLLGLPFTNSIKNPMAMRTLFYLRKLVNSLLKEGKIAPDTEIIIELARELNDKNKRLAIERWQRERENENKKYREKLEEFAKDTNSIVTETDVIKYRLCQEQNGICFYTNKTINCEKLLGSNPQFDIEHTFPRSKSFDNSLANKTLADKSFNQIKGNRIPQDLEVEYKQNFTHNIIDWKTKIEDLEEKIEQQKYFSKVASTIEQKNRAIQQRHYLKLELDYWKQKVYRFTATEIKPNFKNSQLVDTGIITKYSELFLKSLFQRVFPAKGTMVADVRKSWGLGEKDRNYHYHHAIDAVVLTCMDKSIREGLTKAFNDVEKLGDKEKFKVEKPWQTFTEDVNQLKENIIVVHNHKDKIEKQTIRKLRKRNKIQYDKQGNVIYEKGQGIRASLHKDTFYGAIERENENAEKEIWFVLRKPVNSNFTDADVNNIVDEGIKARILKHGLKNIRTPESWILLPSEKDDKGNEIKEMLIKKIRVKTRNNDLPKIKSQSHVSQGKRKEYKEYYYATLENIFAMAIYETVDNKGKRIQKHKTISAFDLAKYNQGKSKLEIPVEENIKIESKKETILVPLSKILRVNQMALFYENSPEELKKLSKKDINKRLFKITQFESDGRIQLRHHAQGGADKDLKKESAVNFEKPVQKLRISLSNVKAIFEGKDFVLYSTGKIDFKF

SEQ ID NO: 3979 - protein, 1125 aa, unidentified
  REGION 1..1125: note = Description of Unknown: Cas Enzyme sequence
MSKILGLDLGTNSIGWVVVDDKNEKILGMGSRIFPEGVVKLGEGEGRETSKNASRTDARGTRRQFFRRRLRKRYLLRELAKKGLCPINYTLVKEWNEKQIFKNKQLQEWFKLNPYELRSKAIQEKISLEELGRIFYHFIQRRGFQSNSRSAGVDNIEKSVIFKGDTKTGKIGISETLESIKNTETLGSYLQTIYPKQNKPYSGHKERIRNRYTTRQMYIDEFETIWEYQKQHHSQLTNELKTVLGGRKKDGYKEDGILFHQRPLRSQKHLVGYCSFEPKKTKCQISAIPFELFRIYQWVNTVDCNEAITKEDREKIVKLLLSKEKVSFKEIRKVINKSDGYYQFNYKNDDKIVGSYTISNLSNKKFFGEKWFDFSDKEQENIWHVLSFFDDRDKLKQYAIKYWGFNEEKAVKISKFNLKEGYSNLSRKAIHNILPFLQLGYMYDIAVGLGSVKNALADKWKENEQFILDNVPSIVRSNFKGGYIEPLKKMLKYEFDISDKQLLKLYHHSSTIETTELLKTLPVNSEADKEIQSIKNPVVITALFEIRKLVNEIIDTYGKFDEIKVELARDLKASKSKRYDTRREQQRLEKENDRIKIELENLGQRINHTSILKYKLWEECDKRCPFTGKNIEVNELFSGEVQIEHIFPWSRSLNDSFMNKTLCFADENRAKGNKTPYEFYSEQGEQKWEEIKIQALSCFKNKPNYPSAYHKFKQFVKKKHDEDFISRQLNDTRYISKEAKNYLSKICNNVQVAPGQMTATLRHRWGLNTILNKDGDTKTRDDHRHHAIDALVMACSTRSHLQELSKRNRYQKDYEFKDFPMPWQFFRQDAEKSVEQILVSHKKLNTILTVRTHKTKKKGVVYKNVGVAARGQLHKETVFGKRTAPDGIEAYHVRKPIESLSTHKHINKVVDETIRLLILKQVNKLGGFVKGKIPEGTFYNTDENGNKQPQIFLPNKNGNPVPIKKVRLRENIGGAEQLKSTNQYVNPRSNHHVLIYKDFDDNLKEKVVTFWTAVERKRQKQAVFQLPENGKEIVTTLQINDMFLLGLNEEDIDWEKPDFTLLKEHLYRVQKFTSGDYYFRKSTASRIDNIEEKQQVNSFGEGKNGWLTHNPIKVKVSVSGKIEKV

SEQ ID NO: 3980 - protein, 1155 aa, unidentified
  REGION 1..1155: note = Description of Unknown: Cas Enzyme sequence
MTKILGLDLGTNSIGWAIVDDTQNKILGIGSRIFPMGVENLGDGEGREMSKNASRTGARGMRRQIFRRRLRKKMLLKALSNVKMCPLQNEDFEEWKNTDRFPESKLKGWFSLNPYELRNKALIEKISLEELGRIFYHLIQRRGFLSNSRSAGKDDGAIYKGKPKEGKIGIDDTRESIKGKTLGSYLYEIYPKENEPYLRDIERIRNRYTTRQMYVDEFELIWDKQAHYHNELANDLKTILGGRKSDGYNEDGIIFHQRPLRSQKHLVGNCSFEPTKTKCPLSAIPFELFRIHQWVNTVEYNGNKLNEIDREKMVNVLLQKEKPSFKDLRKAIGKISTEFKFNYKDDDKIVGTYTISNLSSKKFFGDKWYDFTEKEKEDIWHILYFFDSKDKVKEYAIEKWSFNEEQATAISKFNLKDGYSNLSRKAINNILPFLKMGFVYDIAVVLGGVKNIFGEDWEPLEKNKKDFVIDNIPAIVRTKISGGFIETIKEVLKNEYNFSDAQLKKLYHHSATIEAKTILKKLPVDNTADKTIQAIKNPIVITALFEVRKLVNELIGQYGKLDEIKVEMARDLKASKSQRNNVRNEQKRLERENDRVKARIEEEGQRITHESLLKYKLWEECKKTCPYTGAVIPLHKLFTGEIQIEHIHPWSRSLNDSFANKTLCYADENRLKGDKTPFEFYGNDEANWSAIKERALKLFSDTKEYPKSYQKFKRFVQQKFDDDFSSRQLNDTRFISKEAKNYLSQICEKVTVAPGQMTANLRQKWGLNYILNEDDGEKTREDHRHHAVDALVMACSKTSYLQELSKWNRYNRNYELKNFPMPWEGFNSDAENMIHKILVSHKKVSNTITLRNHTTKKNGEIYKNTGVAARGQLHLDTIYGQNKNCQSDEYVYRVSVNNLSFSQLTSILDPKLREVIMNDIIKDFNEDEKDFFHKLISKEKNLDKKVQKLIKEKVDNILKESSFFMPNEGKRYKRLNKTEPQDFVRNPVPIKKVRVKKTLGNAERLNGNIKQFVDPNKNHHVLIYKDNNNLFNENVVTFWTAVERKRQKQEVYQLPINGKEIVTALHINDMFLLGLNDDEIDWENPDYENLKEHLFRVQKLSSKFYEFRLNTESSIQNNFQPYYIRIQGFGEGKTGWVNFNPIKVKISVSGKIKKV

SEQ ID NO: 3981 - protein, 1472 aa, unidentified
  REGION 1..1472: note = Description of Unknown: Cas Enzyme sequence
MTKILGLDLGTNSIGWAIVEKENDEFSLIDKGARIFSEGVKSEKGVESSRAAERTGFRSARKIKFRRKLRKYETLKVLTENKMCPLTIEDVEQWRKSGFKDYPLNDEFLKWLRTDDDKNINPYLFRDKASKGEANLYELGRAFYHIAQRRGFLSNRLDQSAEGIFEEHCPKIEDVIEDILTIEELKNEISDYFEGTDIIDKTEKFGFKKDLDEGEKKLKSLFSALEKIIKENEKDFEKAKEEIILRLNRKDDLGVVKKKIHEISQAMADGNFKTLGQYFYNLYNKEVEIKNTNTQEIEKFNRAKIRNQYTAREEHYLAEFEIICKAQNIEGVIEKELLPEKRFTGLAKNLYKAIFFQRPLKSQKGLIGKCPFEKSKSRCAVSHPDYEEYRMCAYINTIKIKTSEDEILRFLTAEERQKIVSKFYRKKDNFNFEDLAKELIPKGASFDFYKSFNAKAAHYLFNYKPKDSVSGCVVSTSLKNIFGENWKTKTFSYQTKNAKGEIVNRNVDYKDLWHLLAVSTSDIYLQEYAKENLGLDEKQAKSFSKIKLKKDFASLSLNAINKILPYLKEGLLYSHAVFMANIENIVDQEIWNNPAQRKYIQNKIAEIIETNTYDNGLLEIVNGLIKDCKSEDAYYSKEAETTYKNDLQKRLISFCKFHKIERNKGQILNDLFPVFIEQLKKYEFIKIKRLDEKVLEFLDGKNEDGEVFCSNEKRLNKLYHPSDIEVFKKKIIKDEFGNEKVVLGSPLTSSIKNPMAMRALHQLRKVLNALILEGEIDPKTRIHIEMARELNDANKRKGIQDFQNENKKARASYREEIKKLYFEETKKEIEPTEDDVLRYQLWIEQDKKEIYEDGKCISISQIIGNNPDYDIEHTVPRSRSQDNSLMNKTLCSQRFNREVKKNKMPIELANHEEIKLRVDHWRKEADKLTREIDDIVKSTKGAATKEAKDKKIRRRHYLSLKRDYLKGKYDRFIWEEAKVGFKNSQIPDIGIITKYSQAYLKSYFNRVESVKGGMVAEFRKIWGIQESYQENGKKYYEIKDRSKHTHHTIDAITMACMTKDKYDILASAWTLEDKEQISDARKLLANSKPWKTFTEDLKQIEEEILISHYTPDNVKKQSKKIVRIRGKKQYVAEVENDLNGKTIPKKDANGKIIYKLNEKGERIPRVQQGDTIRGSLHQDSIYGKIRNPLSFDDIRCVIRKDLESIKATEIENIVDEAVKEKVRMAKENKVLVFSVNAQQKNKLNGTVWMREPDIENNISGIPINKVRLYASVKNPLEIKEHVSLSKSRHEHKQKVYAVNDENYAMAIYEGIDRKGNIKRSFESVNYMDAGAYYKLSNKMNNDDSLVPMIHLKTQLPLKYEVKKGDLVLFYNENKAELNEIGINDLGKRLYKVIGFEGDGRIQFRHHKTAMQQSSSNKEELTIVKFMADNQLKNSQVDFENPVPWLRLTTGNFNFLLNKKEFEINSIGKISIF

SEQ ID NO: 3982 - protein, 1126 aa, unidentified
  REGION 1..1126: note = Description of Unknown: Cas Enzyme sequence
MSKVVGLDLGTNSIGWAIVENDKILGIGSRIFQEGVINLGEGEGRETSKNASRSEARGKRKQFFRKRLRKRYLLRVLAKHNMCPLNPSEIKDWNGSAIFSNSNLQDWLKLNPYELRARALYEKITLLELGRIYYHMIQRRGFQSNSRSAGADNNDKSVIYKGDSKVDKIGINDTEISIQKNKTLGNYLHSILPEENVPYKGELERIRNRYTTRQMYIEEFESIWKVQSQYHQELTRELKTIVGGRKKDGYSEDGVLFHQRPLRSQKHLVGYCSFEPKKTKCPVSAISFEQFRVYQWVNTVDCNEKISAEERDKICKLLFSKERVKFKEIRKCIDKLDNFYQFNYKDDDVIAGTHTISQLSHSKFFGKQWSVFSQKEQEDIWHVLYFFDDREKLKEYAQTKWKFTEEKALKISKFNLKQGYANLSRKAIENILPFLTLGFMYDIAVALGGVKNALGENFEKHEQIILDNIPEIVRFNAKGGYINHLKKFLTNECALSEVSLKKLYHHSSAIEKTALLAKLPMGPDADKEIQSIKNPVVITALFEIRKLVNELIDVYGKPDEVKIELARDLKASKSNRYNTRREQKRLENENNRIKKELEQLNQRITTTNLLKYKLWEECNRTCPYTGKIIELNQLFSGAVQIEHIHPWSRSLNDSFMNKTLCFADENRAKGNLTPYEFYSKQGSEKWENIKLQALSCFKNKAQYPNAYRKFKHFVSKRHNDDFISRQLNDTRYISKEAKNYVSKICDNVMVAPGQMTAKLRHHWGLNSILNEDNTKTRDDHRHHAIDALVMACATRSHLQELSKWNRYNRNYDLKDFSMPWEGFRQDAEKSVDQILVSHKKPKHLLTIRTHKTKRADVVYQNKGIAARGQLHKENVYGKRTAPNSDESFHIRKPIESLKTKKQLDKVVDESIRILILKRIQELGGFVNEKNIPENTFFTTDGEGNKIPQIYLPNKSGKPVPVKKVRMKENFGGAEQVKDDLNQYVNPRNNHHVLIYKDEAGNLKESIVTFWTAVERKRQGQAVVQLPEDGKEIVTTLQINDMFLLGLNEDEIDWDKPNNNLLRNHLYRVQKLSSKFYEFRLNSESLLNKNHSPFYNRIQSFGSGITGWNTFNPLKIKLSAIGKIDKF

SEQ ID NO: 3983 - protein, 1539 aa, unidentified
  REGION 1..1539: note = Description of Unknown: Cas Enzyme sequence
MSKILGLDLGTNSIGWAVVDNEKNEILGMGSRIFPEGVKSDTIGKGDKEESKNASRRNSRQTRRQFYRKRLRKIKLLRTLIDLEMCPLAHQELDIWAKWDKAKGKKGRRAPSSIEYENWHRINPYILRDKALHVDLTLYELGRVLYHLIQRRGFLSNRKGKDDGAIYKGKEGMIGIAKTQQQIENKTLGSFLNSIYPKQGEPFKLITDENGNEIRVRARYTLRDMYVEEFDRIWSRQAEQLGLNEKNVERIKTSFLYGNTNSKRNLTKIEKLYQKYGKQNIEVEKIKNSENAKPIIKITSKSIVPLKVYLGGVIEHDTDGIVKHKSQESLLFWQRPLRSQKKLIAKCRFEPDVKKEGKYLQKGKTPCYLSHPLYEEFRAYQFINNIEYGKKQKLDDNQRLIVLELINSKDSNFNFSEIPKKLKLEYENWNYDEDQKVPGNYTTKHLSELFSKEIWESQKDTIWHLFAFYEDNDKLIEKLKSNFYLNDNDAIKVEKINLKEGYSNVSLKAIKNIIGFLRKGYRMSDATILGGVKNAFGERWDFFREFHEKIEHDILKINSDKTNKEGDSIQKIKSYLADKNNSLGFEPDDKQFIKLYHHSQSIEDKQILDKLDKIENLRNPIVQQGINETRRLVNTLLLQYGKFDRIQIELGRDLKNSKTGRQELTRKIYDNTLKNDEAKKMLTEFGLKHDRDNIHKVLLYKEMQERGVVTICPYTNKSMNINDVLGRENKFQIEHIIPKSISLDDSFANKTLCDAKFNGLKGNLTPYQFYLKNPDINLWGGAKTWDEIEHRAYSILPYPKAKRFTSKIKIEDADIKSGFIERQLNDTRYISRKTKEIMSQICSDVRVLPGGLTSELRHLWGLNNILQPVMDIKIQIDDLEPDKQYPYYVVLDENGDPISSTPLYNRKPNLSENETTISGKISKGSFKTNDKYIKLNADASGFSDGDYWLKLKLSEPKHIIRVFREKPKSTENEIVLRGKIEKEKFKNDALNTVGAKGEENGTFWAKFKILNKKFQQPEKDKQPTKTGKQVLLFGEIKSGSFKSFIYECQTNEPDGKAWLLIDLDTENVQFEKAVNQKPEITENTIIVEGTINGEGIFVSEIDSEHHFKTTEKQGKYWFVFNIENFASHYNLIENPRPTIIEKQTLVEGTIWVDKYTGEIRFDPKKNREDHRHHAIDALVIALSKQSYFQQLSIYNAARDAKKKNSKFEKDQLNFPMPWNNFHSDAKKLAEKVLISHKQNTKVLTEIRKKITKNGNTFLSIGDSVRGQLHKENVYGKRLAPYETKESYHIRKKVSELKDNQIDKIVDLEIRKIIKHARQEELVIKKRIDTLEKQKKKIHSDAEELDLNFKISEFKKEITLLYTLKNKNGEPVPIKKVRIKENIGSAEQLKEHINQYVNPRNNHHVLIYKDFDGLLKEEIITFWKATERKNQKMDVFQLPIDGKEIVTTMQINDMFLLGLTDDKIDWANLDYKLIKNHLFKVQTLSSLFYEFRLNTDSSQNKDTNSKVFRRIQNFGVGKTGWQTLNPIKVKITTTGRIIKV

SEQ ID NO: 3984 - protein, 1122 aa, unidentified
  REGION 1..1122: note = Description of Unknown: Cas Enzyme sequence
MAKILGLDLGTNSIGWALIDDVQNKILGIGSRIFPMGVENLGDGDGEISKNASRTGARGVRRQFFRRKLRKKVLLKALAENKMCPMVAQDFKDWKKTKEFPSAKLANWFALNPYELRQKALNEKLSLEEIGRIFYHLIQRRGFLSNSRKGGSDDGAIFKGNPKEGKIGITETQESIQDKTLGSYLFEIYPKENQPFQSGLERIRNRYTTRKMYVDEFELIWNKQSQFHSELTDELKTLFGGRKLDGYKEDGILFHQRPLRSQKYLVGNCSFEPSKTKCPISAIPFEEFRVWQWVNTVEYNGKKISQDEKEKIVAFLYANEKPEFKKIRKAIGKESAEFKFNYKDDDKILGTHTISNLSNKKYFGKKWFEFTEKEQEDIWHVLYFFDSKSNLKEYAIKNWNFTEEQAESIAKFNVKDGYSSLSRKAISNILPFLKLGFTYDVAVVLGGIKNVFGSDWEKLSEEKRNYLIDNVEGIVRSKTKGGFINIIKDILRNDYNISDNQLRKLYHHSATIDVTELLEKLPVGKEADKEIQAIRNPIVITALFELRKLVNELIDEYGKIDEIKVEMARDLKISKSQRNKIRREQKRLEKENDRVKARLLEEGQRITHDNILLYKLWEECKRTCPYTGKPISVTQLFSGEVQIEHIHPWSRSLNDSFSNKTLCYADENRKKGDKTPFEFYGNDEANWSAIKERALKLFSDTKEYPNAYQKFKRFVQQNLDPEFISRQLNDTRYISKEAKNYLSRICKNVIVSPGQATSNLRQKWGMNNILNDENEKTREDHRHHAVDALVMACTKISYVQELSKWNRYNRNSELKNFPLPWETFRKDAEVAVDKILISHKKVSNDITLRTHKCEKNGKTHVNVGVAARGQLHKETVYGKRTFNGEEAFHVRKSIDSLTTEKQLDKVVDESIKLLIRKRIQELGGFVKGNIPANTFFVVDENGVKQPQIFLPNKNGAPVPVLKVRMKENIGGAEKLKDKENQWVNPRNNHHVLIYKDEKGNLKEEVVTFWTVVERKRTGQPAYQLPIDGKEIVTTLHINDMFLLGLNEDEINWENPDYGVLKEHLYRVQKLTSGDYFFRKHKSSTVTDDDFKQVRGFGEGKTGWFTHNPIKVKISVSGKIEKA

SEQ ID NO: 3985 - protein, 1123 aa, unidentified
  REGION 1..1123: note = Description of Unknown: Cas Enzyme sequence
MARILGLDLGTNSIGWALIDDAQNKILGIGSRIFPMGVENLGEGEGREMSKNAGRTGARGVRRQFFRRRLRKKILLKALSENKMCPMVVADFEDWKKTKEFPSDKLANWFALNPYELRQKALNEKLSLEEIGRIFYHLIQRRGFLSNSRKGGTDDGAIFKGNPKEGKIGITETQESIQGKTLGSYLFEIYPKENQPFQDGLERIRNRYTTRKMYVDEFELIWNKQSQFHSQLTNELKTLFGGRKLDGYKEDGILFHQRPLRSQKHLVGNCSFEPNKTKCPISAIPFEQFRVWQWVNTVEYNGKKISQEEKEKIVEFLYANEKPDFKKIRKAIGKESAEFKFNYKDDDKIVGTHTISNLSNKKYFGKKWFEFSEKEQEDIWHVLYFFDSKSNLKEYAIKNWNFTEEQAESIAKFNLKDGYSSLSRKAISNILPFLKLGFTYDVAVVLGGIKNVFGSDWEKLSDEKRNFFYDNVYEIIRSKNKGGFIDIIKDILRNDYNISDHQLRKLYHHSAAIEVSELLEKLPLGSEADKEIQQIKNPIVITALFELRKLVNELIDEHGKIDEIKVEMARDLKVSKSERYKTRRNQQRLERENDRVKAEVLKYTNLSHDNILKFKLWEECKRTCPYTGLSIPINELFTNKWQIEHIHPWSKSLNDSFSNKTLCLGTENIKKGNKTPFEFYGSDEANWSAIKERALKLFSDTKEYPNAYQKFKRFVQQKFDDDFSSRQLNDTRYISKEAKNYLSKVCKNVMVSPGQATSNLRQKWGLNHILNDENAKIREDHRHHAIDALVMAYTKLSYVQELSKWNRYNRTYDLKQFPLPWETFNYDAEKAVEKILISHKKVSNDITIRYKTVEKNGKKHTNKGVAARGQLHKETVFGKRTFNGEEAFHVRKPIESLETAKQIDKVVDETTRLLILKRVNELGGFVKDKVPANTFFVADENGVKQPQIFLPNKNRAPVPILKVRIKENIGGAEKLKDKLNQWVNPRNNHHVLIYKDEKGNLKEEVVAFWTVVERKRTGQSAYQLPIDGKEIVTTLHINDMFLLGLNEDEINWENPDYEILKEHLYRVQKFTSGDYYLRKALTSSIQNPEEKQQINSFGFGKNGWSTHNPIKVKITVSGKIQKL

SEQ ID NO: 3986 - protein, 1119 aa, unidentified
  REGION 1..1119: note = Description of Unknown: Cas Enzyme sequence
MARILGLDLGTNSIGWALIDDAQNKIIGVGSRIFPMGVENLGDGDGEISKNASRTGARGVRRQFFRRKFRKKILLKALAENQMCPMVTNDFEDWKKTKEFPSEKLANWFALNPYELRQKALNEKLSLEEIGRIFYHLIQRRGFLSNSRKGGSDDGAIFKGNPKEGKIGITETQQNIQDKTLGSYLFEIYPKENQPFQNGLERIRNRYTTRKMYVDEFELIWNKQSQFHAQLTEELKTLFGGRKLDGYKEDGILFHQRPLRSQKHLVGNCSFEPNKTKCPISAIPFEQFRVWQWVNTVEYNGKKISQEEKEKIVEFLYANEKPEFKKIRKAIGKESAEFKFNYKDDDKIVGTHTISNLSNKKYFGKKWFEFTEKEQEDIWHVLYFFDSKSNLKEYAIKNWNFTEEQAESIAKFNLKDGYSSLSRKAISNILPFLKLGFTYDVAVVLGGIKNVFGSEWEKLSDEKRNFLIDNVEGIVRSKTKGGFIDIIKDILRNDYNISDNQLRKLYHHSATIDATELLEKLPVGKEADKEIQAIRNPIVITALFELRKLVNELIDEHGKIDEIKVEMARDLKISKSQRNKIRREQKRLERENDRVKARLLEEGQRITHDNILLYKLWEECKRTCPYTGKPISVTQLFSGEVQIEHIHPWSRSLNDSFSNKTLCYADENRKKGDKTPFEFYGNDEANWSAIKERALKLFSDTKEYPNAYQKFKRFVQQKFDDDFSSRQLNDTRYISKEAKNYLSRICKNVIISPGQATSNLRQKWGMNNILNDENEKTREDHRHHAIDALVMACTKVSYVQELSKWNRYNRNSELKNFPLPWETFRKDAEVAIDKILVSHKKVSNDITVRTHKCEKNGKTHVNVGVAARGQLHKETVYGKRTFNGEEAFHVRKSIESLTTEKQLEKVVDESIKLLIRKRIQELGGFVKGNIPVNTFFVVDENGVKQPQIFLPNKNGAPVPVLKVRMKENIGGAEKLKDKVNQWVNPRNNHHVLIYKDEKGNLKEEVVTFWTVVERKRTGQCAYQLPLDGKEIVTTLHINDMFLLGLNEDEINWENPDYEVLKEHLYRVQKLSSSDFSFRYHKTSTVDNKLEEKRVQSLKAFSNINPIKVKISVSGKIQKL

SEQ ID NO: 3987 - protein, 1123 aa, unidentified
  REGION 1..1123: note = Description of Unknown: Cas Enzyme sequence
MAKILGLDLGTNSIGWALIDDTQNKILGVGSRIFPMGVENLGDGDGEISKNASRTGARGVRRQFFRRKLRKKILLKALSENKMCPMATNDFEDWKKTKEFPSEKLANWFVLNPYELRQKALNEKLSLEEIGRIFYHLIQRRGFLSNSRKGGSDDGAIFKGNPKEGKIGITETQESIQDKTLGSYLFEIYPKENQPFQDGLERIRNRYTTRKMYVDEFELIWNKQAQFHSNLNEDLKTLLGGRKLDGYKEDGILFHQRPLRSQKHLVGNCSFEPSKTKCPISAIPFEQFRVWQWVNTVEYNGKKISQDEKEKIVEFLYANEKPELKKIRKAIGKESAEFKFNYKDDDKIVGTHTISNLSNKKYFGKKWFEFTEKEQEDIWHVLYFFDSKSNLKEYAIKKWNFTEEQAESIAKFNVKDGYSSMSRKAISNILPFLKLGFTYDVAVVLGGIKNVFGTNWEKLSDEKRNFLIDNVYDIVRSKTKGGFIDIIKDILRNDYNISENQLRKLYHHSATIDTAELLDKLPVGKDADKEIQAIRNPIVITALFELRKLVNELIDEHGKINEIKVEMARDLKISKSQRNKIRREQKRLERENDRVKARLLEEGQRITHDNILLYKLWEECKRTCPYTGKPISVTQLFSGEVQIEHIHPWSRSLNDSFSNKTLCYADENRKKGDKTPFEFYGNDEANWSSIKERALKLFSDTKEYPSAYQKFKRFVQIKFDDDFSSRQLNDTRYISKEAKNYLSRICKNVIVSPGQATSNLRQKWGMNNILNNENEKTREDHRHHAVDALVMACTKVSYVQELSKWNRYSRNSELKDFPLPWETFRKDAEVVVDKILVSHKKVSNDITVRTHKCEKNGKTHVNVGVAARGQLHKETVYSKRTFNGEEAFHVRKAIDSLTTEKQLDKVVDESIKLLIRKRIQELGGFVKGNIPANTFFIVDENGIKQPQIFLPNKNGAPVPILKVRVKESIGRAEKLKDKVNQWVNPRNNHHVLIYKDEKGNLKEDVVTFWTVVERKRTGQSVYQLPIHGREVVTSIHTNDMFVVGLNEDEINWDSMDYNLLNQHLYRVQKTSKKEKSFEFNFRLAIASSLDNKNEEISIQSFKKWIELNPIKVKISVSGKIQKV

SEQ ID NO: 3988 - protein, 1457 aa, unidentified
  REGION 1..1457: note = Description of Unknown: Cas Enzyme sequence
MAKILGLDLGTNSIGWAIVEKENNDFSLVDKGVRIFSEGVKSEKGIESSRAAERTGYRSARKIKYRRKLRKYETLKVLSKNGMCPLSIDEVEEWKKSGFKEYPLNPEFLKWLRTDEESNINPYFFRDKASKQKVTLFELGRAFYHIAQRRGFLSNRLDQSAEGILEEHCPKIESIVEDLNSSEEILESLKDYFFETGILDVNEKNGFVKDSDEGDKKLVSLYKSLQVILKKNETDFEKSKLEIIERLNKKDVLGKVKGKIKDISQAMLDGNFKTLGQYFFSLYNKERIRNQYTSREEHYLEEFIIICKTQGIDLINLDEKLPEKKFEGLAKDLYRAIFFQRPLKSQKGLIGKCSFETSKSRCAISHPDFEEYRMWNYINTIKIGTQSEKTLRFLTQEEKLKLVPKFYRKNDFNFEVLAKELIEKGASFGFYKSSKKNDYFYWFNYKPTDSVAACQVSASLKNVIGEDWKTKSFTYKTLNAKKEEITKSVDYKDLWHLLSVATSDIYLNEYAKGKLGFDNKNAKAFSKIKLKKDFASLSLSAINKILPYIKEGLLYSHAVFMANIENIVDESIWNDVEQRKYIQTKIVEIVENYTFDKNQLEIVNGLIKEAKLKAEYYSKEAENIYKSDLANKLVSFYKNYTIENEADQKTILDNLFPIFIEQLKKYEFIKVKRLDEKVLEFLSGQNEDGEVFCSNPKQLKKLYHPSDIEKFKKKIIKDEFGNEKLVLGSPLTPSIKNPMAMRALHQLRKVLNALILEGQVDENTRIHIEMARELNDANKRKGIQDYQNESKKFREDAIKEIKKLYFDECKKEVEPTEDDILRYQLWTEQGKCEIYEQGKNISICDIIGSNPAYDIEHTIPRSISQDNSQMNKTLCSQRFNREVKRNKMPFELSNHLEILPRIAHWKEEADNLSREIEIISRSIKAASTKEAKDKKIRRRHYLTLKRDYLQGKYVRFIWKEPKVGFKNSQIPDTGIITKYSQAYLKSYFKRVESVKGGMVAEFRKQWGIQENFIDENGFKQYKEKDRSKHTHHTIDAITIACMTKDKYDILAKAWTSEDEQDKPKAKTLMSEAKPWKTFKEDLLKIEEEILVSHYTPDNVKKQSKKIIRIRGKKQFIAEIERDEKGKAIPKREANGKVIYKLDKDAEKLPRYHQGDTIRGSLHQDSIYGAIKNPLNTEEIRYVIRKDLESLKASDIENIVDEIVKETVKKAVENKVLLLSSNAQQKNKIAENEKIWMNEEKQIPINKVRIYANSVKNPLEIKEHSLLSKSRHEHKQKVYGQNDENYAMAIYELDGKREFELINNFNLAKLIKNGQGFYPLNKEKEVKGKKTLIPIAKRNNRDIVLKKGLQVIFFDKAIEKPKDISEILDFKGRIYIIEGLSINRVKSGNNFYEFGVIQLRYFKEARKSDDIKKDNFKPDGDFRLGENKPTRKMSPGQFSAFVEGIDFKVLPSGKLKKI

SEQ ID NO: 3989 - protein, 1127 aa, unidentified
  REGION 1..1127: note = Description of Unknown: Cas Enzyme sequence
MAKILGLDLGTNSIGWALIDNRLNKILGVGSRIFPMGVENLGDGDGEISKNASRTGARGVRRQFFRRRLRKKILLKALSENSMCPMVVKDFEDWKKTKEFPSEKLANWFALNPYELRQKALCEKLSLEEIGRIFYHLIQRRGFLSNSRKGGSDDGAIFKGNPKEGKIGITETQESIQDKTLGAYLFEIYPKENQPFQDCLERIRNRYTTRKMYIDEFELIWNKQSQFHKELTEDLKTKFGGRKLDGYKEDGILFHQRPLRSQKHLVGNCSFEPTKTKCPISAIPFEQFRVWQWVNTVEYNGKKISQEEKEKIVEFLYTNEKPDFKKIRKVIGKESAEFKFNYKDDDKIVGTHTISNLSNKKYFGKNWFEFSEKEQEDIWHVLYFFDSKSNLKKYALEKWNFTEEQAIEIAKFNTADKNKKNGYSSLSRKAISNILPFLQIGFTYDVAVVLGGIKNVFGSDWEKLSEDKRNYLIDNVEGIVRSKTKGGFIDVIKDILRNDYGVLDNQMRKLYHHSATIDVTQLLEKLPLGAAADKEIQKIKNPIVITALFELRKLVNELIEEHGKIDEIKVEMARDLKISKSQRNKIRREQKRLEKENDRVKERLKEEGQRITHDNILLYKLWKECKKTCPYTGNPIPLHKLFTGEIQIEHIHPWSRSLNDSFSNKTLCYADENRKKGDKTPFEFYGSDELDWSARKERALKLFSDTKEYPNAYQKFKRFVQQKFDDDFSSRQLNDTRYISKEAKDYLSKICKTIIVSPGQATSNLRQKWGMNNILNDENEKTREDHRHHAVDALVMACTKVSYIQELAKWNRYNRNSELKNFPLPWETFRKDAEVAVEKILISHKKVSNDITIRTHTTEKNGVKYRNIGVAARGQLHKETVFGKRTFNGEEAFHVRKPIESLETAKQIDKVVDESTRLLILKRVNELGGFVKDKVPANTFFIVDENGIKQPQIFLPNKNGAPVPILKVRVKENISGAEKLKENVNQWVNPRNNHHVLIYKDDKGNLKEDVVTFWTVVERKRTGQSTYQLPIDGKEIITTLHINDMFLLGLNEDEINWENPDYDVSKEHLYRIQKLTSGDYFFRKHKSSTITDDDYKQIRGFGEGKTGWFTFNPIKVKISVSGKIQKL

SEQ ID NO: 3990 - protein, 1101 aa, unidentified
  REGION 1..1101: note = Description of Unknown: Cas Enzyme sequence
MSVTLGLDLGTTSIGWALIDHKKQELIDCGVRVFPIGVNVDKSGSESPKNVQRRQARMIRRQYHRFKLRRKNLSKNLKILGMLPDPDGNLAKLSAKELYNLRRKAISYPGHEAEKLTPEEIGRIFLHLNQHRGFKSSRKQGSAVKPDEDQGQIKTEITKMKETIQNGGFKTVGHYFASLFDHDLHNQDEPETRIRGRHVGRDLYMEEFDEIWKAQQKFYPEVLTGSPEDGNKPKATAYFKIKHYCIFYQRPLKSQKHTISKCRFEPKLTVTPKANPDFQEFRFWQDLEKLRLSGEGRWNDPLFQEEKEYLFQHFGFDESFKANTIPGKLKYGRRVQVNDPDMKLSGQTTFGRIKRAIGVSEFDKLTELQRNQLWNLLFFFEDDDKLIHLTSTLETLFHWTPETAMSCAKVRLEEGYSSLSLKAIRKILPFMRTGMGYADAAKAAGYHHSYNRDENDPARVLTDRIVIAEGDRIRNPVVSRALAETTKVVNAIIKIYGGPDEIRVELTRELKSPKNKRENMRRNNIEREQIKKNLADFLSEKTGKTYYPNSSEVGKLELWMEMGMEQGDFFKTEDLKKELSPALREKFRLWMEGNRISVYTGNVISFSQMLSEEIQIEHIIPYSLSMDNSFANKSLCEHSINIRKGNKTAFEYFEGLGENEFRAFKERVKWFPNHFKRDRFLMKDVPEGFEPGAIENTGYIARTALGLFKTVCKKVTVTNGAATSTLRRLWGLNSVIVENETGKKDRTDHRHHALDAIVIALTTLPVLRTLTDYSKFNELSKLENDHISPPWPLFFPEIKEKIGSTLISYRSDKKLIEKHSWKMKAGKGKQAWVKQSGISIRGTLHNDTVFGEIQTPNQHHERLFVTRRPLGYLKSEKHFEMIVDKGTRELLYNHWKKNGEDFKQAFGDLDANPVYSNPALKIPIKTVRMAETSNSMVDRFQGSARPEEKGKQFVEPGNNYLYVLYGNPNNPTEKRELEMVSFFEAVSRFQAKKPIYPAEKNGKTFLIALKQGDLVIPYEKHPDEIDFRSLEINKGIYRVIKFDISGKIVLGLFLKSGIKADSDQFPLILRKMPNTLRAKAVKINILGKPIQVNHDQENFNL

SEQ ID NO: 3991 - protein, 1125 aa, unidentified
  REGION 1..1125: note = Description of Unknown: Cas Enzyme sequence
MNNILGLDLGSNSIGWSLVNADSQKFINTGVRIFPKGVNEEKGNESSKNEDRRKARGIRRQYFRRRLRKKFLLRFLIENELTPITASDADYWIKYGKFPDNVDIRAWFNLDPYQLRADAIEHKLSNYELGRVLYHLSKRRGFLSNRKSATKEDGAIFKGDPTSGKTGIIETRQELENHKTLGSYLASIDPHQTRLRNRYTTRRMYVEEFELIWEKQSSLNSSLTKEMKVALCEGAFNETQLPTEGILFHQRPLRSQKHLIGKCSLISNKPRALLAALEVEEFNMRKILNTIAYKDILLSNDQKEQAWLYLQKQKKAIDFKILKKYLGFEGLQLNYLDNAKLPNVNSHYHLQAIFGKEFWGLNSKEQNDRWHLIQSSDNADWLNKYAVENWGLNDKQIAILKKTHFEEGYSAYSLKAIKLMLPYIRQGYNEYLAKLFAGIVNAFGDEWELIDNEEKEIIVNTVEGFCLDKEATVIQQIRLFLKGQYGLTDKQLKKLFFNQDVRSERELLNKFPEIEEDLRNPIVQTALNELRKLINDLIETYGPINTIRIEMARDLKNSAKKREEIKIKQAQQQKENDKSKAKLEELNINPSRDNVLRMKLYEELKKKICPFTGKTISLSKDEGGNNLALFSNRVQVEHIYPWSRTLNDSFSNKTLCASATNQDKGNNTPYEYFSGIGEKSLLEAKERAFQVLPYHKYKHFIKKEIPDDFISQQLNDTRYISKVALDKLKDIAPNVNINTGRLTASLRHLWGLNSILNPSKDSKTRNDHRHHAIDAIVVAFSTTGYLQQMSKLAKYSHHMKDRSIELPWETFRADVEEQIENILISHKRNTKVLSRKTTRIKKERSQNGKKETISYTFKGGGPRGQLHNESIYGKRKNPITEKEAFHIRKPLSEINSKTKVDKIVDPTIRNLVLNHLKNHGVDTSKKKFNFDSSIFFKVNEDNSKESVLLLPNKNGTKIPIKKIRIAENIGNAESIDKDQTKWVDPRNNHHIAIYKDMNDNYFEEVVTFWVASQRALQGEPIIKITYQNGAKLVTALEVNKTYLLGLGIKDKYDFKHFTKYELSQALYRVQKISSKYYSFRLVSESTIDNDFDPYYKSIQSFKSWLINSPTEVKIDRIGNIQWLGS

SEQ ID NO: 3992 - protein, 1524 aa, unidentified
  REGION 1..1524: note = Description of Unknown: Cas Enzyme sequence
MSKILGLDLGTNSIGWAVVDATFKNNKVEQYNCIDDCGVRIFPAGVSDIGKGDSEKSNNATRTENRQKRRHFYRKRLRKIKLLQVLIDQSMCPLSHQELNSWKNWDRQQKSEGKKFPDAEEFRNWIKLNPYELRSKALSEPISLYELGRIFYHLIQRRGFLSSRKGNDDPKTLFEKGKPEENILPVNATKEKAKNSSLGDYLYSIIPQEGVPYKSIRDENGQSIRVRGRYTTRDMYIAEFEAIWIKQAKHLGLNERMAELQRTRELKGSLDGKRNQSRIQYLNEIYGAKNITISPQKDGHITKVTTTSTVPLKNFLAGNIQEINLENGEKALQFKSNESVLFWQRPLRSQKGLLANCRFEDNLPVINNEDNFVFDKNGKQIKRSKKPCPLSHPEFELFRTYQFLNNIRYGKNQVLSDEQKQQVLQLINKKDKNFNFSEIPKLLKLTYEKFNYEDDLKVAGNTTIKQLQPLFKPEVWEKHMLDIWHCFYFYEDNEKLFEKLQKDFAYTKSLDIIRKVKLKDGYSNTSLKAIRNIQHFLLMGLQFDRAVILGGIKNAFGKRYEHFGESEQELKAGVLKILNENNKEGEAIEKIKAYLSNPDNHYGFAKDDPHFSHLYHHSQEIEEKDELALWVPELENLRNPIVQQALHETRRLVNALLLKYRKELGDDFEFAQIKVEMGRDLRNNKSQRKKITDNISTNETKNNEARERLAEYGLRPSRNNVQKYLMYKEIVERSGKCTCPYTGKIISINDLLGNANAIQIEHIIPYSVSLDDSFGNKTLCEAHFNNDKGEKTPYEYYTENPDSKIWGANSWDEIVARAFHTLPYPKAKRFTSKKKFEKETFIERQLNDSRYIARKAVELLSNICHDIRVMPGQLTAELRHLWGLNSILQPTQSLVEHTFDINDDKPVPYYAITNEAGETLALHKKYNERPATNENELLLSGYASKNKFDAKSFKIDFKDVDVKDGHYWAKVNVNGSLQLMPQYTSKPQSDKNHIVLRGKVEKGQFKNDTSGNYKTTNIEDGSYWAKFEITNTQFQAPEKNKQPKTKRNQLLLFGTVHNCEFNCYIYNCQTNLPDGKYWLIVDISPDSIEFIKAVNPRPQAHNNEVCISATVDEYGYMVADCDPQYKRKTEHLPGKYFATLSIESKPKELYAVEKEQPKVEKGQKLVEGSIWVDKYSGEIQFDPKKNRDDHRHHVIDAITIALTEQGYLQRLSTENAKRKDKQRGKTNSTEKFPEPWNGFNLDVQKKAANILISFKQNNKTLTKNKKGFSVRGQLHKENVFGLRQSPNMEKAFHRRTKVTELKNNKHVAKIADITIQEHIKKFLKEKHGINTENTKGYTIPKDAFVSNGEWQLFLPNKKGGDEVPIKKVRIREMLGNANRLKGDLNQHVNPRNNHHVLIYKDSDGNLKEDTVQFWTVVERKRQNMPTYLLPEDGDTIVATLETNDMFLLGLSDEEFHSNIENKQILSKHLYRVQKLSSMYYTFRHHLASTIQNQEEEWRIVSFKAWEEANPIKVKISPLGKIQKL

SEQ ID NO: 3993 - protein, 1344 aa, unidentified
  REGION 1..1344: note = Description of Unknown: Cas Enzyme sequence
MSKKILGLDLGTNSLGWAVVESDNNSFQMIDKGVRIFQEGVKIEKGVEGSKAAERTGYRSARRIKYRRKLRKIETLKALIEYGYCPELSREDLDSWRYSNSYPTDKVFRDWLLTDDLDNKTPYYYRYLSITHKLDLNKEEDRFKVGRGFYHIAQRRGFISNRLEGTKESEGKVKQAISQISAAKGEKTLGHYFYDKYMRGEKIRDTYTHREEHYLQEFMAICEFQGLPKNFTNKLHKAIFYQRPLRSQKGLVGKCVFETNKSRCSVTRPEFEEYRMLCFLNNIKIKTPDDDRLRFLNKQERQDVLPLFFRKSKEHFDFEDIAKKLAPKKQYKFYKSRDKNPEDWLFNYSMKTTVSGCPVSARFKGLFGADFMNVKFDYDKGFIGIHDIWHVLFTYDSEEKLKEFTSKRLGFDDNQIKDFLKISLKHDYASLSLKAINKILPYLREGLIYSHAVFLANMEKVIPYKIWEDENNRKIIRGEVLNIITTQNEEKKIIDVVNGLVKACRDNSQFWSSEASEFYKEDIRKGLHGVFGERGYGELVQEKKLELEQQAFTLFQKQMQKNNGLGEFAKVQSIDDRVKAFLYDNFNADKENLEKLYHPAAIDVYKSPQKGKDGKLYLNSPMVSAIRNPMAMRAMHQLRKVINELLLNNIIDTNTHIHIEMSRGLLNANERKGLQDWQRAREKLKNGYSEKIKEHYYSSGSNLNPTDDDILKYQLWEEQNHKCLYTGEEISISEFLGVNPSYDIEHTIPRSLSFDNSQENKTLCEDKFNRSVKRNRIPHELDNHAEILARVEHWEKNVIDLEKQINQAVKQAKGAVDKDSKDRFIQKRHKLVQERNYWRNKHKRFTMKDVPVGFKNSQMVDIGIITKYSRLYLNTLFDKVYTVKGSTVADFRKMWGLQDNFQKKERVNHIHHCIDAITIACITKANYENLANFYHKWEDNYIAGNDRKPSVIKPWTTFTEDVKEIENDVLISHHTPDNLPKQSKKKLRKRGRIQYNKNGKPIYEQGDTVRGSLHLETFYGAIEKEVVNKKGEIEKQIKYVIRKPLDSLEDSSVKHIVDDRVRLIVVNAKKEEVVLKRELELLKKELAKSEEGEGSEIKDKMKLLEKQIVDLYSLPNKNGDPIPIKKVRIYATHITNPIHLKPQRDKSLKKAKPYKEQYHVANDNNYLMALYEGVNDKGKIIRDFEIKSNLEAGEFFKCSVQETLKAQSFNKYEGLLPDKKILKGLELPLKAVVKIGTMVVLWENNPDEVWDLDNAEINSRLYKVVGLSEQVIQKKYRYGTFVLRHNKEARPTTEIKVQDGVYEKGEETKEYRKLNHNQFNALVEGVGFKLTPLGKIIRIEDRTR

SEQ ID NO: 3994 - protein, 1194 aa, unidentified
  REGION 1..1194: note = Description of Unknown: Cas Enzyme sequence
MPLILGLDLGTNSIGWSLIDDTSFKVIDCGVRIFPEGVNRDNLGKEQSKNATRRAKRQTRRQLFRRKYRKLLLAKFLMEKGMFPKISDLSQKLVKIDQPAELKNFFGINPYACRSKAFNGEKLSVIELGRIFYHFAQRRGYKESLKDDSADSGALYEGVAKDGKTGINETWEKISHYVTLGNYLFHENPHQKRLRNRYTTRKMYTDEFEKIWEKQKIFYPDVLTDELKQKIGDSTEGFLFFQRPLKPQKHLIADCTFESGKKRSSDSAIAFELRRTYEFINSIRVDGLPLMEGQRATVKELMFSKDKLIFSKIAEKLKISVSRLNYEEDKNIIGTKSISTLRKIFTPKTWDAKTLEEQENILGIKRFAEDKVKTVAYLRNKYGLTDRQSEQFVKFRPSKGYSSLSYKATMNILPFLEKGYIYNEAVLLGGIYNALGKDKWDALGPKIKDYIETNAIDIYHNTGAEHIEIIKDWLEKEYGLTKNRLAKLYHHSQVAIRGDGQATELPMPEDTRNPVVQQSLYELRNLVNAIIKKYGKPQEVRMELSRELKSSIEERDKMRLRQYKNERENDEIKTELSNNNLPHTNAYIIKLKLYREVLKRAGKAACPYSGDPIAFHQLWNGEVDVEHILPYSISLDDSLSNKTLCFRKYNMLKGNRTPYQFFYFDHGKEEWEEVKKRAYSLLPYLKWLRFIDDKPHTFEEFENRKLNDSRYISKVAKGYMEFICPIVNVTQGEVTAKLRHYWGLDNILNPCIRVEGIAEGEYYAAIDETGKIMQLERWQPDANANKKSEEKLAKLGLVISGNVKKNTFFPYKSRNDHRHHMIDAIAIACTKRSYLQNLSTMKGKMLREDYEKRELSFPEPWPSFHKDVENAVIQALVSHKSKNRVITRSSKTIINDEKKIKTAGLSIRGALHGESVYGKRKDIYGNEAYHIRKSLTQITKRAQVDKIVDPQVKKLVEQAIIKRWQEQDSAIFEKYKNEGLLQLKGNTWEINRDSKTKYDVPDGAFFRQEKDESGKKIVGIRPNVFLPNRNGEPIPIWKVRIKENSSGAVKLKEKINQWVEPGNNFGVMIYQDQEGNYQEKIISFWEAVERKKQGSAIFQLPSGSQRLVATLQINDMFILGLQDDEINWKDQGQLCKYLYRVQKLSSYYYTFRKSNAATLDFASEEVRIQSFKNWREKNPTKVKVNILGEIEAVK

SEQ ID NO: 3995 - protein, 1424 aa, unidentified
  REGION 1..1424: note = Description of Unknown: Cas Enzyme sequence
MSKIKLGLDIGTNSLGWSVVEKQDGIYDFLKKEDENGELIPTKGSYIFSKSVDANENSKTSERRGFRGARRRIDRIRLRKIATLKVLDEFGLCPKFKEGELNKWKNKKIYPCDNIEFIEWQRTGKKNGNSQIEKLKQPYYLRYLAATTIGMMETADGRLQLGRAFYHLSQRRGYLSNSEEEQSDDKIDLFKTDVIKLLENCIGSGDFKVPYEVIFNLYKSDDKVKKLNSKISKVLKNELLLDNIKTFIVSEFDKPENLGKVMAGIGELSKEMKGFPTMGCYFYSIYSTKNKNTGLINRIRGRYTHREEHYEAEFNYICEIQKITGDLKDKLHNAIFYQRPLKSQKGLVAKCTLEPKRKRIALSHPLFEEFRMWESINRIKIKREFDDKLDFLNKEEKELIKNEFLQITDFEFGKIANKLSNGLPYNYIKRPEEVYLKGKTDKDSEIKAVISFNFPMDKKFSACPTTSSLKKIIGAEKYSTMPLLNSGYKDEKEKNQISIEDVWHCLQMDSFGSKDKKTVREEFAKKHLQLDEKGIENFVKIKLAKGYGNLSKSAIKKIIPFLEKGEIYTNAVFLANVSDVLGRKISEVEQNQVSKIVKEALENFRFEKQNKGIVNNYISKFKDNRENSLGNNELSINAFKKELDYEIANWIGEVQLGSMKKEEVSKITETCWNLFFEAACDKLPKDVNYLTTKTIPSFIEQGLRKDFPNDKIDVTKLYHPSAMETYPKADKKLGNPEITSIKNPVFDRAMHQVKRLCNELIRNGLVDRETEVNIEVAGEINSASYRRALTIWQNEQRDIREWAKNKIIECYPVEDRKNKIPTDTEIAKYILYSEQNGRCLYTSETITPRDFLNKQTIYDIEHTIPRSKNNDNSLKNKTLANYDFNRNYKKAILPGLLNVSFNGKQINKESILFNRNERLKSYSFIGKKPNMNIAWDVSLSDLKFEYKKFKNAAKAITDAVAHDEVMTKAHYTKMKLDYLREKYRNFEIEEINNQFTNANLVDTRIITKYARAYLNSYFNKVNVVNGKITDTLRKIWGLQGDEDIKDRSNHIHHCIDAIVVACVEKGTANRISELYHKYENDYFRGNSNPRISAKEPMKNFVERMKNLHKEVLVYHKQTDRIKPLLINAQKENAKKLNLRGRLNSQNPYAHIKKDGELIFAQRKPISSISIKDIDNIIDEGIKKRILDFANDVGLEVFVKESNKMGYMILPRYFDEEKSKEISEMVVKRLRLKSSKSNLKDYKVIRNIDQKKTQDKRFDHKHDFYFDKDSYTNYEARIYGSLIPNLKGKFKNREYRVINHHNIVKKIFEVENENSILQLHKDDMFLVFDLNPNVEINWENINDLQNRLFKIVKFDENGIIVLVRHNFAGGSVDSASPIKSECDLTDISQVVLRRSPSTLRVIPAKLNALGRLDINFSKYFISLNS

SEQ ID NO: 3996 - protein, 1396 aa, unidentified
  REGION 1..1396: note = Description of Unknown: Cas Enzyme sequence
MSKILGLDLGTNSIGWAVRDLQNGAGIDQIINKGAIVFEKGVGENKSGEFSLAAERTKAKSARKKNQRRRWRKIDLLSLLIEAHMCPLPKDELDKWSRPKRKSQRTYPANELFKNWLRLDFNNDGMEEYSNPFELRNEALRKKLNPEEVGRIFYHLTQRRGYLSNRSDKAQETENIEDTELEESETKKKLGKVASAIKELEEKLEGKTVGQQLHQEILEGGRARRRKDESTNIYRLTLQAEFLKICSFQQLDSYLTERIRKVIFEQRPLKSQKGTIGKCIYEKNKSRCPVSHPEFELYRMWQVLNNIKYSDDERKTWQSFNSEERKNVQAKFFRKSSQTFPFSDISKIFKKLHPARIFNYKENQTIAGCPTLAGLINILGEEKVWQLRNASIKRIYWEEKEKKSSKLRYTDKQLDLYDIWHWLFVMDNDKDQYIIKQKAILSLELTEKEAGIFTKITIKQGYASLSLKAIRKINYWLEQGEKYDKAVFLANIPYLFDKKIWEDNKEGLIEAIQNEIEQIGHQKNVVDITNSLIKKYNNLPYNHRFAQDKGYQLDDVDINDTKNAIEDYFGNKKWSFFSEEGKLNYTKQVTYLYGNALIKGTNGDIAFIKPPRLEDNIKIKISEILDIDKHDKVLDKVYHPSEIDSFLPIIEEKNAEGHITGRKLLNSPRTDSIRNPMAMRTLHELRKLINYLLKSDIIDEQTNVIVEMAKELNDANRRKAIERYQKERETENTSFTNEVKKIFSAQNKTLPEDLTSYIERYRLREEQPRRVCIYTGNTISDSDLFDEFTTDIEHTLPRSLTFDDSLQNKTIAFKYYNNEIKSKLIPSQLPNYSNNTTDYSAIEPRLQPWQEKVVDFETKVEICKRRSRTASTKEAKDKAIQDRHYFTMHLLYWRSKLERFTITQLTERFKNSQLVDTQIIAKYGVLYLKTYFYRVRSTKGILTDKIKRIWGAMSNDEKKDRSQHTHHTIDAVIQTLLHKERNKPDIYNLLAESYKEAEANKWKEPKLPNPWNLAPDAFFNSMQQLASDIIIYHADINHVLKQTKRKQRVNKQILYLTDDQGNYLTDTNGNKIPKYEKGRGIRASLHKDTFYGAIKIPVKVDGKLKTDEKGKLILEKDDKGNDLIKYRTSFVFRGNTIDAIKKNIENIVDDRLRALAKETGAAIIHKQGYFEIPPKEERRKKDPAAEATKVFKVKIFSESLQNPLQIKQHRDVKKEHKKWYYAQTDGNYLMALYDNGKEKDFELINTFQLSELSGMGQGFYPLSKEKFLRGKPIHLPLSRRHGKDIILKPGLKILLYEKYPAEILSDTTSKNLNDRLYKINGLGIQRQKTGGKYYDFGIIFLMHHLEARPLGDLKILDGDYVFGDKKRYRKMNHNQFKALIEGVDFTITRDGAVQII

SEQ ID NO: 3997 - protein, 1194 aa, unidentified
  REGION 1..1194: note = Description of Unknown: Cas Enzyme sequence
MPLILGLDLGTNSIGWALIDDTSSQIIDCGVRIFPEGVNRDNLGKEESKNATRRAKRQTRRQLFRRKYRKLLLAKFLMEKGMFPKISDLSRKLIKLEQPAELKSFFSINPYACRSMAFSGEKLALLELGRIFYHFAQRRGYKESLKDDAADSGALYEGVAKDSKIGINETWEKISEYGTLGNYLFHQDPHQKRLRNRYTTRKMYTEEFEKIWEKQKIFYPDILTDELKQKIGDATEGFLFFQRPLKPQKHLIADCTFESGKKRSSDSTIAFELRRMYEFINSIRIDGLPLVENQRALIKELMFSKDKFPFEKIAERLRIPVTRFNYEGDKNVVGSKSISTLRKIFTPKIWDAKTLEEQENILGVKRFAEDKIKTIDYLKKKYNLTDKQAEQFIKFRPSKGYSNLSYKATMNILPFLEKGHIYNEAVLLGGIYNAFGKEKWEALGPKVQDYIETNAIEIYHNAGVEHMAIIKDWLRKEYGLSENRLAKLYHHSQIVSQGDGQAAELPIPENTRNPVVQQSLYELRNLVNAIIKKYGKPDEIRMELSRELKSSIEERDKMRLHQYENERENDEIKKELTANNLPHTNAYIIKLKLYREVLKRAGKAACPYSGAPIAFHQLWNGEVDVEHILPYSISLDDSLANKTLCFRKYNTLKGNRTPYQFFHFDHGKEDWEEVKKRAYSLLPYLKWLRFIDEKPHTLEEFENRKLNDSRYISKVAKGYMEFICQKVNVTQGEVTAKLRHYWGLDNILNPCIRVEGIAEGEYYAAIDGDGNIIQLEGWLPDSKANKIMEEKLAKLGLVISGNVKNNTFFPYKSRNDHRHHVIDAITIACTKRSYLQNLSTIKGKMLREEYEKRELSFPEPWPSFHRDVENAIHHVLVSHKSKNRVITRLSKTIKKDDKKIKIAGTSIRGALHGESVYGKRRDVYGNEALHIRKSLIQITKRAQVEKIVDPQVKRLVEQAIIKRWQEQHSGIFESYQKEGLLQLKGETWEINKNNKTKYDVPDGAFFRQEKDETGKKIIGIYPNVFLPNRNGEPIAIRKVRIRENSSGAVKLKEEINQWVEPSNNFGVIVYQDQRGNYQEKIISFWEAVERKKQNTAIFQLPSDSQRLVATLQINDMFLLGLQDEEINWRDQNQLSTHLYRVQKLSSYYYTFRKNNAATLDFAPEEVRIQSFKSWQEKNPIKVRISILGKIVPSK

SEQ ID NO: 3998 - protein, 1194 aa, unidentified
  REGION 1..1194: note = Description of Unknown: Cas Enzyme sequence
MPFLLGVDLGTNSIGWALIDDLSKKIVDCGVRIFPEGVNRDNKGKEESKNATRRIKRQVRRQLFRRKYRKLLLAKYLMQHGMFPSIPNVSKSIQDLQLGNELKSFFHINPYECRSKAYLGEKLSLYELGRIFYHFAQRRGYKESIKDDSADTGVLYEGSAKDGKIGIIETSQKIEQYGTLGNYLYNEDPHEKRWRNRYTTRKMYTEEFEKVWAQQNKFYPSILTDEMKQKIGDATEGFLFFQRPLKPQKHLIADCTFESGKKRISDSTIAFELRRMHEFINSIRVDGLPLLTEQRAVLKELMQSKEKFEFSTIAQKLKINPTRFNYEHDKNVIGTKSISSLRKIFSPKIWDNKTLQEQEDILSIKHFAEDKAKTLDYLKNKHQLSDKQADQFIKFRPSKGYSSLSYKATLNILPFLEKGFIYNEAVLLGGIFNALGKEKWNSLSPSKINYIETNAIEIYHNMGADHFNIIKDWLQSECNLTEKQLQKLYHHSQLVSHGDGQSTNLPLPEETRNPVVQQALYELRKVVNTIIEVYGKPDQIRMELSRELKSSIEERDKLRLRQYENERENDEIKRELTDHDLPHTNAYIIKLKLYREVQKRAGKVACPYTGNAISFAQLWNGEVDVEHILPYSISLDDSLANKTLCFRYMNTRKGNKTPYNFFLSEFGQERWEEIKKQAYSLLPYLKWLRFIDEKPHTLEEFENRKLNDSRYISKVAKGYLEYICKDVSVTQGEVTAKLRHYWGLDNILNPCIRTEGIEEGEYYAAVDNNDKIIQLEKWQPDTKANKRTEEKLAKLGLVISGNIKKNTFYPYKTRNDHRHHVIDAITIACTKRSYLQNLSTMKGKLTKEEFETRELSFPEPWPGFHRSAETAVSKVLISHKSKHRITSQLSKTVVKNDKIFKVSASSIRGTLHGESVYGKRKDVYGNDAFHIRKPLSQINKRAQVDKIVDPAIKKLVEQAIIKAWQEENAVLFKAYQSEGLLVARGQHWEINNSNKTKYEVPAGAFFDIQRDETGKKIIGISPKVFLPNRNGNPIAIRKVRIKENSSGAVRLKDKINQWVEPGNNFGVLIFDDQSCEWQEKMITFWEAVERKKQNLPVFQLPPEGKSIITTLQINDMFIIGLQDEEVDWKNQVLLGNHLYRVQKLSSYYYTFRKANAATLDFANEEIPIQSFKRWKEKNPIKVKVSILGKIEGIK

SEQ ID NO: 3999 - protein, 1112 aa, unidentified
  REGION 1..1112: note = Description of Unknown: Cas Enzyme sequence
MAKILGLDLGTNSIGWAIINNEPPKILGAGVRIFTEGVENLGQGEKEQSKNSSRTGSRSERRNYFRRKLRKKALLKVLDAHRMCPFENESFTDWFKLNPYELRAKALSARLSLLELGRIFYHIAQRRGFQSNSRSEAANENTKIYKPKDGKAGINETQELIQNCPSGTLGGALCDLPKSFKPWQKRLRNRYTTRQMHVEEFEKIWAEQSKYHPNLTPELKATIGGRKRDGYDKDGILFFQRPLRSQKHRVGKCSFEPSKTKCPISAIQFELFRAHQFINSIECDGEKLSDEDRKVVLELLLRKEKVPFKDIRKKIQKFDAHYKFNFQDDDKITGCSTVSKLCNSKCFGEDWFEFSKKQQEDIWHVLYHFDDKEKLKKHAIEKWEFDEKRAIHVANKIFLKQGYANLSNKAINNILPFLEMGFTYDRAVAFGGIKNAFGILWNDLTEKELQFLFDNVPEIVGFGAKGGYIEQLKNTLKEHFNMSEHQFKKLYHHSANIHSAALLKKLPTGPQADREITNIRNPIVIQALFELRKLVNTLIDEFGKFDEIKIELARDLKISKTERQRIRSDNKKREEYHDKIAEILQNRNVKVNHENILKYKLWEECKRTCPYTGKEISFTQLYDNANTIEIEHIFPYSRSLDDSYLNKTLCFRDENAAKGNRTPFKYYSALGNWQEVKARALTIFHDTKEFPNRYKKFKRFVATKFNEDFISRQLNDTRYISKAAKNYLSKICNKIKVAPGQMTAKLRYHWGLNSVISSENEEKSREDHRHHAIDALVMACFSERHLNEISKWNRYRRSYDLKDFPPPWDNFRYEAIQAINKILVSHKKSSRVLSVKQNKIKKDGRIFTNKGIAARGELHKESVFGKRKAPKEEKPNFHIRKPLESLKNKKHIEKIVDDRVKKIIYDHLENEGVDIHSNSFKIPPGAFFEKDPENGKIKPKVFLPNKNGDPVPIFKVRLKEELGNAVQLKGDINQFVNPRNNHHVLIYKDLEGDLKESVVNFWTAVERKLKGEPVVSLPPDGVEIICALQINDMFLLGLKPESIKSENPDFGVLSQHLYRVQKLSSMYYTFRHHLASTLKYGEDEIRITSFKKWKSLNPVKVFISPSGEIKIH

SEQ ID NO: 4000 - protein, 1465 aa, unidentified
  REGION 1..1465: note = Description of Unknown: Cas Enzyme sequence
MRRRLGLDIGTNSIGWALVDEESGRVNIASTQNTKAFGSVIFTEGVKLDSGNEISRAAERTAKRSARKLNFRRKLRKYETLKVLIANGMCPLSIAELEKWRQYQEVEGGVKGPVLTFHHYPKNEQFLEWLRTDEKTDKNPYFLRFLFSTRKMDWEKDSSVAHSLGRAFYHLSQRRGFKSNRLDQTDDDRIDAIKEDINDLTAEADNAANLYTALRFRYEDLEFDTKKSKDLDETDKKLKRLLDRCMKIAENRNGQFKSVDEIRKAIDEYLHKKENLGVVKGDIRDLSEAIEEGGFETLGQYFWSLYQKERTDIKHKIRKRYTGREEHYQREFDVICETQQLPQDLRDKLHKAIFYQRPLRSQKGTIAKCTLEPRKPRCPISRPEFEEFRMLSLLNNIQVKEPGNDTFRGLTTDERDRAIGRFYLQRTSFKLNELCNAINKNGTFYYSKDPNKTSVDWEINYPLNTTVSGSPVSAAIKLCIGENWSTRTFTYTTLTKDGSSKEHRVDYQDIWHALFTFDDRDKLEAYFIENLGLSVKEARKLSRVIPQQGYAQLSLKAINAILPWLRDGYIYTHAVFLAKLPEIIKPSVWSDDNQRENVVDAIQEITDTHSDELTITHVVNTVLKQFFTEKNYAREYSNDEFKNMLTDAFQKRMGKRSWNATENKDQLLLKALKQFSNALISHAGENDFSPIQAPTIKERIRTYLADNNLLAHPEAGASLYHPSDLEGFKAQPGKDIHGNTISILPSPMSDSIKNPVLIRTMHQLRKVLNHLLIQGEINADTQINIELAREVNDANMRAAIKKWQDRLRDEREDAHNEIVRYFQEEHGQNINPDETDIDRYILWEQQDRREIYEDNPKNIPLTDIIGSESRYDIEHTIPRSVSWDNSMANKTLCTKRFNREIKRNQIPSSLPNHDNILDRLVGWEKRVLDLKTQIAGLKTTGLSDKAKKDQIIQKRHLLRFEHDFWKNKYERFTKKEIKEGFKNSQLTDTGLITRYARNWLGAVFQDERGRSNVRVVNGRAVSEFRKAWGLQALDERKSRANHAHHCIDAITIACITKRLYDQFAHEWRKEEDDYLKHNVIQKARLTKPWPTFTEDVKRIEHELLVVHQTEDNAIKHTRKKVRRRGRIIRNPATGNPLYQDGDTARVALHKDSYYGSILHPKTGEQTFVIRRQIDTISATDIEKIIDPVIREIVKKGKKREEQLIKHIKLLKNQLSSAQTEEAEAEIKADISATVKELSELFVLPSRNGKLIPIRKVRIEAKIKEPLPDFKKQRDVRRLPDGTPKYPHKTEVYVANDSNYGLAIYEDLERDRRVAVSINMMEAITSAKRSNASSSGFIESSYRGMPLKGVLRIGTMVLFYENEPDEIWDLPDVELRKRLYYVKKTGKDGRATFQFNQEARNDIQLKVDYESLHGEKAPDKITSGYGQLEINNIPISKFRLSPGNMRMLIQGIDFDLTATGEIVRLS

SEQ ID NO: 4001 - protein, 1281 aa, unidentified
  REGION 1..1281: note = Description of Unknown: Cas Enzyme sequence
MKTLGLDIGTNSIGWGIVDENAEKIEKCGVYIFPEGVKIEKGEESSKASERTGFRSARRLKFRRKLRKYETLKVLINNEMCPLTLEELEKWHKEKIYPSSKDFINWYRTDEEKNWEPYFLRKKCVEQKCEPYEIGRALYHIAQRRGFLSNRKETTKETDGKVSEGISELSQAKGNKTLGQYFYELKQAGEKVRGKYTSRKEHYEEEFNRICEIQGISEKLKGDLYKAIFFQRKLKSQKFLVGKCTFETDKPRCPISHFEFEEFRMLSFINSIRVYRNSGDFDGPSLFDDLEEHYPKDNKLTEEEKESIKPLFFRSKGNFDFKDIAKKIRGKNDEWSFNYRDDTNVAACPVSRDLKNIFGEDWKNIKIPNEDSASNKKYYDINDIWHVLYDFDDDEKLHEFALNKLHLDSETTEKFCAIHFQQGYANLSLKAIRKILPFLKKGYVYSHAVFLANIPTMIGEEVYNKHAEEIEKAVETITSTLKDKNNRITLANRCIEAIFKDEKHDFHSEEWDKSIVDDQIADLFGKRKFAEKPLTEQKEIRDEVIAKIEETLKIAVTKNPNDYKYKPLRTDELILEYLNQQGFEIKKNAKLYHPSETEYNLERPKESDDGKTYLGSPRTPSVKNPVAMRALFQLRKLVNYLIKTGKIDSETRIHVELANEVNDKNWRKAIEDFQKENEKKNEDARKRLREEFGKDFNITDDVLRKYRLWTEQRIGGIETCPYTGKTIKLTDLFGKHPKFDFEHTIPRSLSYDDSMENLTLCDSDFNRNVKKQHIPSELPNFAEISRRFERMYESKIDECLSAIERNKTRSGYIDPEIKNRKIVARHKAQLELDYYKGKLRRFTAKEVTGGFKHSQLNDTRIITKFSLQYLKSVFEYTFPVKGSMTDTFKRQWGLLDRAESKDRSNYRHHAVDALTIACVDRRKFNLLSEAIRNSSDGTHLKFAKPWENFDKDVLAAVQYIVPKHYVDDNSLRQTKKVLRDTRTGKPKLDKNGNKIYIQGNTARGSLHLATFYGKIQLPRVKEQDVKYGFVKRISVENLTVKNAKNIIDKGIQNAFFGNIRDGIQTIEKIQQDGILLPFKMNDKRVFVKKIRILDETVKNPMKIKKHAEITTTGQKDFKQWYYAVNEENYLVALYKGKGSNGKSLSDCRILNLFDAVHQKQKKEALYSPEIVKDNNILTLYKVLKIGKIVLLQQKVDEDIFSLNSEGIWKRAYRVSGLSKSGNYIYVMLSHILSAKPWSYIPGNFDLDEAVEFRRYQVNNFIGLVEGADFTISPIGEIIPKN

SEQ ID NO: 4002 - protein, 1265 aa, unidentified
  REGION 1..1265: note = Description of Unknown: Cas Enzyme sequence
MKTLGLDIGTNSIGWGIVDETANKIEGCGVYIFPEGVKKEKGNESSKAAERTNFRLARRLKFRRKLRKCETLKVLIKNKMCPLTMEELEKWRKQKVYPVSQDFLNWYRTDELKNWEPYFLRKKCAEQKAGPYEIGRAVYHLAQRRGFLSNRKESTKASDGKVSKSIDELSSFMDGRTLGQYFYELKQSGEKVRGKYTSRKEHYEKEFNKICEVQEILPELKDDLYRAIFFQRKLKSQKFLVGKCTFERNKPRAPISHFEFEEFRMLSFINSIKIAKNSGEDENCGFEFLTEEEKELIKPLFFRISKPSFQFADIEKKLKGKNGFWKFNYRKDTNVSGCPVSAGLKNIFGDEASAESWKDKKVGQYDMCDIWHVLFDFDDEEKLLEFAKRKLFLSDEAAKKFCAIRIQQGYANLSLKAIRKITPFLRKGYIYSTAVFLANIPFMIGRDIFLQNEKEIEDSVKNIIGTLRDKNNIIVLANRCIESAFKDKDNDFRFEEWDKALVENSAWDLFGKKKWNEYDEEKRKTIISQVSEKVEDNLKIAVGKNPNDYKYPLLRTGDLIMDYLNQKGFVVKGELYHPSDTDYNFETPVPAEDGKIYLASPRSPSVKNPVVMRALHQLRKLVNYLIKTGKIDSTTKINVELANDVNDKNQRKAIEELAKTNEKNNADARKKIEELCNEAGFKVVPTESDIKKFRLWKEQNETCPYTGKHISFTDLFGPIPKFDFEHTIPRSLSYDDSLENLTLCDSEFNRNIKKQRLPSELPDFEEINKRFLKFYEDKIDNCLRIIELNSKSGGSYEEPAVKDLRIVKKHKAQYELNYYKEKLRRFSSTEITSGFKHSQLNDTRIITKFSLSYLKGVFDHVQPVKGSMTDTFKRQWGLMERNEIKDRSNHTHHTVDALTIACINRGKFNLLSEAIKNSSDGKHLKFPKPWETFDTDVLNAVRYIIPKYFSDENSLRQSKKILRGRDGKPVLKDGKTVFIQGATARGSLHKDTFYGCIKTVPEEGGKSEMIFVQRIPVATLDEKVAEKIIDKRIRETFENNLSNGIQTLQEIQTDGILLPFKKEGRDVFVKRVRIKAKPTSPIILKKHHNVINKNPKGYKQNYYVVNDENYLLAIYRGKDAKGKDVSDHKICNLLDAVKSRQNRTELYPDFKEKKGINLQLYKVLKVGKIVILQDDIQEDVFALPKEKLWKRMYRIAGLAASGNDIQIKLVHIISARPWEYMKGERDLNAGIECLLYGTANFKGLLEGQDFTVSPAGEIIQKARVC

SEQ ID NO: 4003 - protein, 1272 aa, unidentified
  REGION 1..1272: note = Description of Unknown: Cas Enzyme sequence
MKTLGLDIGTNSIGWGIVDESAQKIQKCGVYIFPECANKDTSGNISSKAAERTGFRSARRLKFRRKLRKYETLKVLIKNGMCPLTLDELEEWRKGKIYPTSKDFINWYRTDEEKNWEPYFLRKKCVEQKCKPYEIGRALYHIAQRRGFLSNRKEASKEADGKVSEGISEVTQAKGDKTLGQYFYELKQAGEKVRGKYTARKAHYEEEFNKICEVQEISENLREDLYKAIFFQRKLKSQKFLVGKCTLELGKPRCPVSHFEFEEFRMLSFINSIRISRQISESETLSLFEEANENFPKDGKLTNEEIELIKPLFFRISKSNFDFKDIAKKLRKNHEEWTFNYRDDTNVAACPVSAALKSIFGEDWKNTKIDNYDIYDIWHVLFDFDDDEKLHEFALNKLHLDSEMVDKFCSIHFQQGYANLSLKAIRKILPFLRKGYVYAHAVFLANIPNMIGEDVYNKHANEIEKAVENIITTLKDKNNRITIANRCIEAIFKDEKHDFHSEEWDKSIVDAQIADLFGKKKFAEKLPVEQKEIREDVIAKIEETLKIAVTKNPNDYKYKALRTDDLIEKYLRQQGFEIKKNANLYHPSDNDYGFEPEYLEDGKKYLHSPRKPSVKNPVVMRALFQLRKLVNYLIKTDEIDSETRVHVELANEVNDKNWRKAIEDFQRDNEKKNAEYKARMIGLCKECGFEIEPTDSDVKKFRLWKEQNETCPYTGKKINICDLFGPHPKFDFEHTIPRSLSYDDSLENLTLCDSDFNRNVKKQHIPFELPNCEEIIGRFERMYEAKIDECLSAIERNKTRGGYIDPEIKNRKIVARHKAQLELDYYKGKLRRFTAKEVTSGFKHSQLNDTRIITKFALQYLKSVFPHTFPVKGSMTDTFKRQWGLLDRAENKDRTNYRHHAVDALTIACVNRTKFNLLSEAVRASSDGAHLKFAKPWDSFDKDVLSAVQYIVPKHFVDDNSLRQTKKVLRDPRTGKPKLDKNGNKIYIQGNTARGSLHKDTFYGCIMTSPEKGENLQDKKPIFVQRVSVDTLTKDSADKIVDKGIRNTFINNLESGKQTLAEIQEKGILLPYQMNGKNVYVKRIRVKAKPTSPLVLKKHNNVIDHNPKDYKQNYYVVNDENYLIALYRGKDEKGKFQSDYIVLNLLDAVHKKQNGEQLYPAVMEKKGTKLKLYKALKNGQIIILQNFLDEDVFNLPAKDLFSRVYRISTLESDGRVNLSHIVIAEAKNKNNKNECIDEGIDKYKRLSNSGLYCLVEGTDFTISPIGEIIPRN

SEQ ID NO: 4004 - protein, 1270 aa, unidentified
  REGION 1..1270: note = Description of Unknown: Cas Enzyme sequence
MKTLGLDIGTNSIGWGIVDESAQKIQKCGVYIFPEGVKIEKGVESSKAAERTGFRSARRLKFRRKLRKYETLKVLVKNGMCPLTLDELEEWRKGKIYPTSKDFINWYRTDEEKNWEPYFLRKKCVEQKCKPYEIGRALYHITQRRGFLSNRKEASKEADGKVSEGISELSQAKGDKTLGQNFYELKQAGEKVRGKYTSRKEHYEEEFNKICNVQEISASLKEDLHKAIFFQRKLKSQKFLVGKCTLELGKPRCPVSHFEFEEFRMLSFINSIRISRQISESETLSLFEEANENFPKDGKLTNEEIELIKPLFFRISKSNFDFKDIAKKLRKNHEEWTFNYRDDTNVAACPVSAALKSIFGEDWKNTKIDNYDIYDIWHVLFDFDDDEKLHEFALNKLHLDSEMADKFCSIHFQQGYTNLSLKAIRKILPFLRKGYVYAHAVFLANIPNMIGEDVYNKHADEIEKAVENIITNLKDKNNRITLANRCIEAIFKDEKHDFHSEEWDKAIVDAQIVDLFGKRKFAEKSLAEQKEIREDVIAKVEATLKIAVSKNPNDWKIPALRTDDLILEYLEKQGFKIKKNTKIYHPSDSEYNLEQPIESADGKIYLASPRTPSVKNPVVMRALFQLRKLVNYLIKTDEIDSETRVHVELANEVNDKNWRKAIEDFQRDNEKKNAEYKARMIGLCKECGFEIEPTDSDVKKFRLWKEQNETCPYTGKKINICDLFGPHPKFDFEHTIPRSLSYDDSLENLTLCDSDFNRNVKKQHIPFELPNCEEIIGRFERMYEAKIDECLSAIERNKTRGGYIDPEIKNRKIVARHKAQLELDYYKGKLRRFTAKEVTSGFKHSQLNDTRIITKFALQYLKSVFPHTFPVKGSMTDTFKRQWGLLDRAENKDRTNYRHHAVDALTIACVNRTKFNLLSEAVRASSDGAHLKFAKPWDSFDKDVLSAVQYIVPKHFVDDNSLRQTKKVLRDPRTGKPKLDKNGNKIYIQGNTARGSLHKDTFYGCIMTPPEKGENLQDKKPIFVQRVSVDKLTKDSADKIVDKGIRNTFINNLESGKQSLAEIQERGILLPYQMNGKNVYVKRIRVKAKPTSPLVLKKHNNVIERNPKDYKQNYYVVNDENYLIALYRGKDDKGKEKSVSRTLNLLEAIKNKHNGKSLYESKVDGLDLYKVLKIGKIVILQNSYDENIFDLSAEQIWKRMYRVAGLAKSGNRVFICLAHIIRQKAWEYISGKFELDSFVDCRRYQDNQFIGLVEGTDFTISPIGEIIPRN

SEQ ID NO: 4005 - protein, 1075 aa, unidentified
  REGION 1..1075: note = Description of Unknown: Cas Enzyme sequence
MPAFLGLDIGTNSVGSAWVDTDRNAVHLAVTVFPAGVDDKRESRAKKRREKRSLRRAIARKASRKRRLSAALHEAGLLPAAKSGEPAFDALMAADPWELRRLALTRPITAHEFGRILVHLNQRRGWQAGIEDEDEDKKKDEGKIKEAVKKLRALMRETHAETVGQLMAQLGADRVRPKYRDPIRNRADSYEFHAEREMIREEFDTLWRRQAESDSPLARLLTDSVRDTIEGILFFQRPTYWKTSSLGRCDLEPTDRECPKADMHAQHFLMLETVNRVRLNGERLDAGQRQAVIGLLTHEERVTVTKLRKALGVKRGHGELNVERERKPEINTDWFSAAIVHGVFGPERWVTLPDAAKQSVNRAVQKFGEADEARLRRDAPQWWALSPEEADRFIAALRRKPRDTVSLSRKAILNLLPHMEQGDDVTTAKQKCGYPPQGFRLNKATRHFLAKHPEQLPPAPDLPNPIVRKALHEARRHVQAYIERFGRKPDRIVVELAREARQPKRVRDEKLKANRRREDERKQIIETHLKPNSVEESQWPKAVDRVLLHQRQAGMCPYTGLGSGEAPCISMHDVVLGNDVEVDHIVPYSRSFDNSLDNKLLCRRDANRNKGDRTPREWLTEEQFHELELRLKHFEKAHARAWENLHRDALALDDFVSSQLTDTGYITRQVVAYLRETLFPGRPHDVLCTKGVYTAILRRDWGILEEKRRDDHRHHALDAVAIALTDRSRLQTLARLAQAQEAARAREGKWPSREAMKPPWDGFRQQVMDAAADLVVAHRPQRALTGAFHEDTLFGAVPGYEGVFCRRVPVALLTPKMLLEPREVTVGGRKTLNMGKGGVVRDARLRQHIRAWLEARLRETGRHEPVERLSPGDMKALLKGAQLTMPSGVPIRRVRLLKKIEDPVEIGGDPRHPRFYIGGNNHHFEIVQDEGTGRWRGRGVKMFDVARRIHPPKGQPRLPAILGTKAPVLAEQGLLSADDQRFYRGTRFVMALCKGDTLLMKDPDVKDPDAAAQGYFVVVKINPESVEMVEHWDARPATATDRQPPRRLIPIRPEHLRGLGARKARVGALGEVDMA

SEQ ID NO: 4006 - protein, 1087 aa, unidentified
  REGION 1..1087: note = Description of Unknown: Cas Enzyme sequence
MIFSPAGPITLEGSNMPTYLGLDVGTNSVGSAWVDTDRRLVELAVSVFPAGVDDRRESRAKTRRKMRSQRRTIGRRAARKRRLYAELFRAGLLPAGEPEHPALHPLMDSEPWVLRNLALTRPLSPHEFGRILVHLNQRRGWQAGLEDEDDEEEKKDQGKIKEAIEATYAEKARRNAETFGQMIAQCRAERAHANYNDPVRNRQGAYGFYADRDLIREEFATLWQRQAAFASPLASILTQPLRETLEGILFFQRKTYWKTSTLGRCELEPTDRECPHADMSAQRFLMLETVNRLRLNGEPLSATQRDAVVNLLSTQERATVTDLRNALHLKHRRDQLNIQAEKRPEINTDWFSAAIVRGVFGAEPWKALAERRRQSVNRAIQKFGQGDEEKLRRGARDWWNLTPEEAEKLIAAWRRRPRKNASLSRKAILNLLPYMENGDDVSTAKQKCGYPPQGFRLNKATRHFLSKHPEQLPPPPDLPNPIVRKAIHEVRRHVQAYIQRFGRKPDRIVVELAREARQPKKVRDLKLDANRERERERKQILDSVVRPNNIDESQWDKAIDRVLLHRRQKGMCPYSGLGLGQAPCISEHDSATGLGVEVDHIVPYSRSFDNSLDNKLLCRREANRNKGDRTPKEWLTPDQFAELKTRLQHFEKTYPRAWDNLTRDAPTLDDFVASQLSDTGYITRQVLAYLRETLFADRPHEVLCTKGVYTAILRRDWGIMEEKRRDDHRHHALDAVAIALTDRPRLHALARIAQAQEAARARLGQWPKREPLPPPWLEAFREQVMARCADLIVAHRPQQGITGAFHEDTLFGAVPGYEGVFTRRIPVSLLTPKMLQDPKEAIIGGARTLIMGKGGVVRDARLRRHIRNWVEDRLRARGIGVPVDKLSPKEMQTLLKEDKLTMPSGVPIRRVRLLKKIEDPVAIESDPAHPRYYIGGNNHHLEIVQDERTGRWRARGVKMFDVARRVHPPKGRPKLPAILGPKAPALAQLGLLSKADELFYRGARFVMALCKGDMIAMADPESRSQAHFVTVKVNPDSVELVEHWDARPAAETERQQPRRLIKLPPERLRALGARKVRLDPLGRLAPQ

SEQ ID NO: 4007 - protein, 1057 aa, unidentified
  REGION 1..1057: note = Description of Unknown: Cas Enzyme sequence
MQKCAYTLGLDLGESSLGWALIKLENNEPAGLIDAGVRVFPAVIERSQTSAQPEIKNAERRAKRSARRVKGRRVQRKQYLLAIMQENELFPIENNEMQRLFAREPYELRARALNEKLELFEIGRAFYHLCQRRGFKSNRKSEKDEKETGQIAKEIGQLALDLQNSGARTVGEWLHRKAADRVKLETGNERLRGRHISRAMIEDEFKKIWSAQAGHYPAILTDGLYEDIHYAIFFQRSFELTEERRAKLPSRANALRAPQIAPCSLIPSEKRCPAGEWIAQQFRLLKEINNLDVRLPFDRPRPLSADEKSKLAFHMGRQKSMSFSAMRNLLGFQKEARFNLEAGKREGLKGNIVEATLIDAFGEQVWDSFSERKCKSIRNALIEKEDPEEFEALSKEWGLDESQTEKLLKFPPPQSYLSFSAKAMEILLPYLQRGLDEVHAIIEARADDNLPKPAEDKISDFLPAPKEIPNPNVMRCLYETRKVVNALIREYGKPEKIVVELARDLKLNREQRERVIQTNRDNEKLRQTAAQFYKEHGRENPSGEDLLKHRLWSEQGGISPYSGSPIDAMLLLDERNILQVDHILPYSRSLDNSYQNKVLCFAEENAKKGNSTPYEWKRDSKEFDEMKIRLEAMKQMRGSKRARFYQPELDTDKFIQQKLQDTRYASREVAAFLNLLYPPDDRVGQKRVFTSPGMVTSDLRYYWGVNSILGPDTETKTRTDHRHHAVDAIVIACTDRSAVKRLADASAKHGIDHKKKIRVEPPWENFRNAVEDMVLWRERKWKLGDKEITTQGILVSHRVEKRLAGAFHEETNYGLTEIQNEFVYRVPVTGLSGAKVEKIRDPRIRAIVFKHCMDQDVDPKKLGSKPIPPKVWKTLPMLPVSEKARRKNPALPESIPIRRVRLVQTLEDPLFFNGPYDKPYRAVKTGNNHHMEIIEETDKKGRTKWSSVTVTMFDVVKRVRIERKPMVQRDHGEGKKFVMSLHRNESALLKISDTLLLYRVQKINVSGQLYFRPHSYAGLLKESDQTPIYVRKSASTLNGEITKVIVDSIGRLEPSND

SEQ ID NO: 4008 - protein, 1531 aa, unidentified
  REGION 1..1531: note = Description of Unknown: Cas Enzyme sequence
MAKILGLDLGTNSIGWAVIDYERNYKKESFSIVEKGVHIFTEGVDKDSYGNPQSRAAERTDRRGARRLKFRRKLRKYETLKALIKHKMCPLDIEELEKWRSYKNPETGKIETFKHYPTSKEFFNWLNTDNQHDKVDRKLQKKNPYYFRDFASREKLFNLHELGRAFYHLAQRRGFLSNRLDKSDEGIIEKHKPNLEYRIKEANNAAELLQETETYFDTLDIIYKQSKDLNEGDKKLKTLYNFFKKTIQEPNTTIEVVKRNLIERLNRKENLGKVKEGIFDLSEKIKKENCKTLGQYFYKCFQEGKKIRKTYTAREEQYEEEFKEMCKVQGFNEDGEIYKDLHNAIFFQRKLKSQKGLVGKCTLEPNKPRCPISHPSFEEFRTLKFINNIKMKVDNEWRVLNEEEKKKIWHKFFRKSKAHFDFKEIAKDIRSDYPVCEKPTDEPDPKKNFFNYKGNATVTGCQTLSYLMDLFGKDWEQTNWKTRSWQDILENPAWKKNLFEKCMKKEIKSRTTKEVIGMKDIETVANDVWHALFIYDKESNLYKFAKNYFGADNIVANKFSSPTIQLKREYASFSLKAINNIIPFLREGLIETYAVFLAKMPELIPDKWSNEETQALIRKEIELRVETYKEEKRRKAIVNDLIKRCRDEHPNDYYTYKINDNDKQNIVEKIYSVYGEKSFEEKDEQEKNEIIDWVTSQVKKNEFHEIKRLDEIIKDFFLSHPGLGIDEIKANKLYHPSDIEKFQEPIKKVDKDGIEREYPGSPISGSIKNPTVFRALFQLRKLINELIRKATIDHTARVHIELTRELNDMNYRWAIEKWQKELEVNRNNYREEIKNLYKAECEKDIEPTNDEILKYQLWIEQEKQCVYTGKSIGICDFIGPNPNYDIAHTLPRSKTNDNSQENKTLALKGYNQFQNNRIPFNLPNYNERCEIDLPGIGIIECEAILSVIKKWDKRCEELDAEIEKKKRSAAANKDDKEKHDTIIREKHLLTFERNYWKDKYERFTMEEIPEGFTNRNLVDTGIITRYAQQWLEKYFDKKVHAVNGKIVKDFRVIWGLQKEYEKKERTNHIHHCIDAITIACITKDKYDTLARAYREEEKMNVKEAKEILANSKPWHTFKEDLDKIENEVGVTHQMQDNVPKQLKKKVRVRGKIQYVVEYEKDLNDNFIRDKKGKKIIKKDVNGKIVYKLNDGKRITKIQQGDTTRGPLHKESFYGAIKIAKRDEDNKILRDDKGNIAFTEDKDGNEIFYVIRKELEKLNKDDVEKIVDGEIKKIIEQSIKDKLLTFKKNGAVIKEGATIWQNEPKLIPIKKVRVKVSLKNPLPDFKKHRDVSKHPHKQQYNVDNKENYCLAIYEGENQKGKIVRDSELVNVLDAGEYYKLSNKELRLQTSIVKRNKDGLKLKVVLKKGRKVLLYKEHQEEIWDLNDREKLERLYIITGLDEDGIKLYYHQEARSTTDVLAYMNEVINNYNKENNIVDKEGKTKESKLSSPKGGDVIGKYKEFPYIKFKPSNFNALIQDIDFRLSPTGIISKL

SEQ ID NO: 4009 - protein, 1508 aa, unidentified
  REGION 1..1508: note = Description of Unknown: Cas Enzyme sequence
MKKILGLDIGTNSIGGCLINLEEFGEKGSIEWLGSRIIPVDGEMLNKFNSGSAVETKAAFRRQKRGSRRLKQRYVLRRTRLIKALKILGWLNKEYPEDFKEALKENQDFKFNINNYIPIEQKTVKEATEVLGVKSKDGKLSVSIDWVVYYLRKKALNEKISMNELVRIIYMMNQRRGFRSSRKDKKEDEEKKIEKWVEILKVDSIEEKIQEVSEKNFKKQFIKIYIIKAGKYIWEEKRINKPEWIGKELNFLITKETLKSGEEKLKFQQPKPDDWEMSKVALEQDIKNSGLNVGEYFFNHLVNDKNYRIRQQIIDRSLYQKEFKEIWNKQCEYYPELKDTSKLKDISVELYKHNEAKQKEIQTHDIYYLLTKDIIYYQRELKSQKHSISLCKYEKGKFKKDNDFIKKGYKVAPKSSPEFQEFRIWQDIHNIRILEREKIINGKTLIDFELPKDFINNDIKEKLFDLFDKSAEVSETAILKAIDKKLLSTKTHKVNLFASRDKLKGNETKAYFRKIFNKIEHDGDKLLNDEKRFYRLWHIMYSISSSDADKSKKGLMNALTDKKKKETKNRENIELNLPDNVIKELADQPEFKEKQYAAYSSKAINKLLHVMRSGKYWKNELINDETKNRISKIITGEFDENIDDRTREQIAKHNLNVIEDFQGLETSLACYVVYGTDSERQNDDKYADYKDIDVMKLIPNNSLRNPIVEQIIRETLFVVKDLWEKFGQPDEIHIELGRELKKNEVERKKLSETGSKNFRDKERIRNLLIELINDGFPFDTKPNPNSPIDIDKFRIYESSSGSNYFEYEKKMKSENTNWRPTNAEIKRYALWLEQKCCSPYTGDPITITKLFSSEYEIEHIIPRAKLKYDSMENLVICECEVNKEKGDKLASNFISESPKTINRNGKEFTIKNYDEYVALCKSNFRGKKLKNLLCDEVPKEFISRQLNDTRYITKKVAELLYPIVKDKEGIIYTGGSITAELKREWGLTKVWKDLMKPRFERLENIIGRQLIIKDVKDRNNYHLETPEPETDIKRIDHRHHALDALIIASTTREHIRYLNSLNSVESDSKLKDIKRKLVKGKIREFKIPWEGFQKEAKDMLNEIIISFKSNNKVISKPKNKYLTWVNKDGKWIKEQKSQKSNNKWLSVRKSMFKEPQGIIYLKEIEEKKVLDAVKIHIDRQISDIDESGKPRAYIYDKEIREQIKMLLNRLNNNIDDIKKHLLKNPLLDFNGNKIDNVNIAVFNEYASKKVPIDSTFTYDKINNIPYAGKIIEKFEKLENIVSMKDKKDFPLPYLLKKHLDEYNGNSKEAFVGEGLENLYKKAGRPIKKVTRYEKKKEEDKFKGKYVETDKGGIVYFVMYENAEGIREEMFSVSVHQAIENIIQGKEIAEEKEGYKKIVLSPNNLVYLPTEEELETKIIDWNNKTNIFKRTYKMVSSTGKQCFFVPHFISKSLDSNGKELGANNKAEKPWYIIKPDEEFKAWDDTLIKKSCIKLKIDKLGNIKPFYSDD

SEQ ID NO: 4010 - protein, 1301 aa, unidentified
  REGION 1..1301: note = Description of Unknown: Cas Enzyme sequence
MKHIIGLDIGTNSVGWSLVKENDNKFIDIINTGVHIFPIGTIVDDKSGKEKTKNEQRREYRGANRMRYRFKLRRKNLKNILSKKGMLPDFTKYHKLKENKQSSDLYEFRAKAIDSKIPLDELGRIFLLINKHRGFQSNAKKLNKDDKESGVVKEGIAELQKFMNNNNARTIGEYFYLMHKKAQELFDKNKWHNDDEPIDERAINDNGEIVLFNSNGIRRHFGRYTLRDMYKDEFDRIWTKQKVFYSDILTGSVEEYNEIRKLKYSDKIRELKKFRETLYWQIKEYCIFYQRPLKSQKKYVSNCQFEKNKKVIPVSHPLFQEFRIYKQLHDIRYNNEENTDKPLKKEWIDKLANELKTNYRIYLKPTKKSKEEYYKTFYSVLDVSEDTIELIQNDSESEKYILGNNTFASFFEALGKEKFEELEKSGMLELLWHHLYIAKDGLLKGDEWLFDVLTENKKWNLKEEQAKKLIYNGLEDEYGSYSSKVIKKILPFMKNGDDEYTALVKAGYLKSPDEVSDEIILNDKIKQLKYQELRNPVVERAVSQTIKIVNALLEKYKEEIDKDNFEIRIESTREFKKPRKERENIRKVNLDKEKIREEYTNFLNSKKEKLNLNRKIEKYDSLINKFELWLEMGMDDNDKRFNEKDFVSFNKITKQIDKLKHKLWLECNRICPYSNKVIPLSKLFSAEIEIEHIIPLSRSLDDSFVNKTLTFTQINKEKGKMTSFEFMKNKYKEFKKRIESANFSKEKIKQFLKENVNTEFTNDQISNSSYIAKFVRLKMLEVCKNVQFTNGFATAELRINDWRLSNLLDKIRYEEETGNNVDEIFDNYFQIKKEYLNWYENKYRSTDFKINWNNIDKNNNVIDFQNETKLDFIFWWNKLNEFNQFRSKSGKKDRTDHRHHAIDAIITACCSPSIIKTLSTYNANREEIGSSLYDESGNITRRRINRYFDYNELKNNIHNIIVNHYEKRILIKKRINKIKTKNGIIKVNTYAPQGSLHEESFYGKREGNYVRRVRLFDDKRQDKILFTELKDLDNQGKGDKWHFIPENQVYEIVKKRIEKFGKDAFKKEIMEAMPFYMQSHKSDEQILSKNGKPLPIIKSVRQKYNIKRSMIQLNNKDEYGKIINKNRYVNNESNYMMVFYKNSSGKKKFAKPISFFESVKRKQKNEKLIPDEIEYRNDIYGIDNNLPWLKTGDIVFLCLDNENIDNINWNDKILLSKRLFRVKGFTSSEDNSKPKYGTYEYGSVTLQNIKIAKVKENYKMPKNIEDRIKLPVFSMKSDKFNAIKVRLNSLGEIIKKGKECF

SEQ ID NO: 4011 - protein, 1575 aa, unidentified
  REGION 1..1575: note = Description of Unknown: Cas Enzyme sequence
MKKILGLDLGTNSIGAGLISIPESIDDFGKSGQIEWLGSRIIPVDGDYLQKFESGGLGETKAAARRIKRGSRRLKHRYKLRRTRLIQVFKILGWVEDSFPENFKKKLADDENFKFQIGDYLPFSQETVEKATELLGVKGKRNKHRNIIIPEDWIIYCLRKKALTEKVTISELARIIYMMNQRRGFKSSRKDLKETTVLDFDEFKKKKENIEAGKLLEYANGEGEELETKFVSITKIKSVEQEGDEKDKKGNYSFIITAEDERLEPWKEKRKKEPELVGKEFNLVVTQKIDKKGKFSQNKPQIPTEDDWELNMVAQDNKIGDQTPGAFFWDKLVENKNCKIRQIAVRREKYKNELNTIWNKQLELRKAENLEYEILNNNKLEDIATTLYKNNSAKQKELNEKGLLYIISDDIIYYQRELKSQSNSIGECRYEKHKGIDKETYGVKCSPKSSPEFQELRIWQDIHNIRIFENEQKINGIIKIDVDVTKQFINQIAKEKLFELFDVSKEISEQNIFDELNKSSADKKLSTDTYRINLFFDKNKKLQGNGTKELFRKIFKKFNYETEGYKLLQSKDSFRKLWHINYSISSSNLKKSEKGIRTALSKFSLPENIIDAFTKLPEPKKQYAAFSTKAINKLLPLMRIGKFWSWDNIHNETKERINKIINDGWDFAYDKRTGELIREREFTNKEQFSGLPVWMACYVVYGRHSERESDKKYEHPEDLDVMKLIPNNSLRNPIVEQVIRETMFLVKDVWEKYGRPDEIHIELGRELKKNSVEKERITKNNANNLEEKMRIKKLLYELLNGGFEHYSEEGKKINNPFEVNPNPENPIDIEKFKIYKSCGAFTYDEEKENWDTLFKEGKKERIPTSAEIKKYTLWLSQKCCSPYTGNIISLSKLFTEEYEVEHIIPRKKLKYDAFENLVICERGVNKLKGSELAMLFISTNNGAELSYEGKKYKLQSTDDYIAHCKNTFKRRKLKNLLATEVPEDFVERQINDTRYITRKVSELLYPIAKDKAGLVFTIGSITSDLKREWGLNSVWKDILKPRFERLEKITGRQLILPDNEDANKFHFNILDQPEFNEKRIDHRHHALDALIIASTTREHIRYLNSLNAVDNNLELLQVKRALVKGKIRDFKLPWENFTKEAKEMLNATIVTFKSNNKIVSKPTNKYIKWFQKQDGSWEKKECYQKPNKKWMAVRKSMFKEPQGIIWIKEKREVSVVDAFKIQIERMKVEHDKERRKITSYVYDQLARPIIKDIIERIGIDLDDTNNLLNEINKHLINNSKKVETGKLKKDGKHENKTVYLLQDYEYEKIEIAEFVEYAAKRVKLDNSFTHDKINKTPYAKESNSPLAGLLHEHLKAYNDNSNEAFAGEGLEILTKKAGKRLEKITIYEKKSPDDKFGKKYVEVDKGAIAYFIIYEDEQTKKRPEMYSMATHKAIERLVHGMSIADKKEGFKTMILSPDDLVYVPTKDELKRINAYEQNPINWNDKKRIAERIYRMNSSTGSKCEFVPHRFVNQNPIIDKIEFGANNINQRAWDGIVKLVSNKKEGFKREDSGTMIKDVCIKIEVDRLGNIKPVNN

SEQ ID NO: 4012 - protein, 1068 aa, unidentified
  REGION 1..1068: note = Description of Unknown: Cas Enzyme sequence
MKKILGIDIGVASIGWAYVLEAESDSESSSILRTGIRIVPLNPDAKQNFTKGVSYSPNQGRRQKRTMRRNLQRYRLRRHLLRNIFGKHELKLASALFALNAVELYDLRCKAVQERITLPELGRIWYHLNQKRGYRSSRKSDAEETEKQGDYLQAISQRKAELVANNQTVGQYFQQHLKNNARYRVKQQIFPRECYIAEFNAIWKKQAEFYPELLNDAFLKQIRDEIIYFQRPLKSQKESVADCRFYPNHKVAPRSSPVFQIFKIWQNLNALRAERKSGEAVEITLEQRKHLFSLLNDRDRLSATDVMKELNLKPTRDFKINFEKLEGNRTRAVLLKAFTEAQIQRLDLLNFDPADRPDDQPLYRLWHVLYSIDEPENLLNTLQKPPFNFTHAEANVLIKVGFKAEFSNLSTRAMRKLLPKMEEGLGYAEACAAIGQRHSNFLTKSENAERELADCLSLLKNNSLRNPTVEKITNQLINLVNSILKDHELGRPDEIRVELGRELKQNADQRNRTFKNNNERDRERQKIEEHLKEHGVRKPTLSLIEKYRLWEETGKTSIYTGNTIMLSSIINGEIDVEHIIPKARLFDDSFVNKTLCERQLNEAKGHQTAFDFMQSRGDDEFARYQERIANLYSDKRINKAKRERLLMTAADIPQDFVERQLRETQYIARMVKDLLQQVCRNVYTSTGMITSHLRHIWGLDHVLQELNFEKYESAGRARTDGSKKIIDDWSKRDDHRHHAIDALVVASTKQSYIQRLNVLNQHLPQRYEVKESAWKFPMPWLHFVRDTRESIAQILVSFKSGKKVATLSRNKITGQITYAPRGPLHEESVYGRIKQGHQNKYVIKYPLGQGFDLKKADTIVDKRVRELVKKRLTDFNNDPIKAFKEPIWFNESLQIPMRAVRCFARLNEATPINFDANDQATAFVKLGNNHHIAIYEDALGKRYEAVITFWEAVERRRDGQPIIRSQHENGARLVVSLQQNQMFIFGLDRDQLEEAIFLQDWRLISQHLYRVQSISQGDYMFRHHLETKIDDSESAKEIKRFVRIKSLGKMNGIKVHLNALGQIIKIGE

SEQ ID NO: 4013 - protein, 1530 aa, unidentified
  REGION 1..1530: note = Description of Unknown: Cas Enzyme sequence
MKKILGLDLGTNSIGWALIAQDFENRTGKIISMGSRIIPMSQDVLGKFDSGVSISQTAERTGFRGTRRLRERHLLRRARLHTVLLQLGFLPGHYASQIDFEKRVGQFLHEKEPKLAWRQTAAVDFEFIFQNSFQEMVGDFQKANPALFYKKANGSETKIPYDWTIFYLRKKALTQKIEKEELAWLLLNFNQKRGYYQLRGEEEETLPNKLVEFHSLMVTDVTVDGPANAKGETWHNVILENGWIYRRSSKIPLFDWKGKTKEFVVTTELNDDGSVKTDKDGKEKRSFRAPEENDWTLVKTKTEQTIAQSGKTVGAYIYDALLENPKQKIKGKLVRTIERKFYKEELRQILETQQKFHSELQDTQRYQSCIELLYTHNEAHRNNIANRDFVHLFLDDIIFYQRPLKSKISQISDCRFETKKGIDGVQYPVKCIAKSHPLFQEFRLWQWLQNLHIYNRDQDHTAVTSDFLGNEEDYVALFEFLNERKDISQDALLRYLLERKGFKGKALTNEIAQYRWNYVDDKEKRYPCNETRNYFLTRLAQCAHVPSGFLTAEREEALWHILYSVSDKIEIEKALKTFALKNGLGEDFVAAFRKTKPYETRYGSYSAKAIKKMLPLMRMGKYWNAAAIHPDTLQRIEKLITGEYDERIRLRVREKAIHLSDVNHFKGLPLWLVSYIVYDRHSEEGDLGKWETPVELESFLKAFKQHSLRNPIVEQVITETLRLVNDVWKIYGAGQKGYFDEIHVELGREMKNPADKRRELTNKNSEQENTNARIRALLMELHNDELTENVRPYSPMQQELLKIYEDGVLKSSIEIPDDILKISKAANPSRGDLLKYKLWLEQKYCSPYTGRVIPLSKLFTPDYEIEHIIPQSRYFDDSFSNKVICEAEVNKLKDNSLAMEFIEQYGGQMVDLKFGGSVPLLSVSAYKDFIKDHYAKNYTKRKKLELVDIPDKMVERQMNDTRYISKEVKNLLSKIVRSEKDDDGTTSKNVISGNGQITAILRQDWGLNDIWNEIIAPRFERLNEMTGNDGKFGFVNPNTGKFLPQVPSDLQKGFSKKRIDHRHHALDALIIACATRDHVNLLNNMYAKSEMRYDLQRKLRAFEKVSYTDKNNRPVIKEIPKHFLKPWDTFTQDARTQLQTIVISFKKNQRVINKTVNRYDRWVAADGKLEKKKLRQEKGDSWAIRKSMHKDTVSGRVQLRFTKTVSLTNALDAVDSIVDKALKKHIKELQRQGYDKKKLLKYFKELNNSWQGRDIAKTEVYYFVENAASRVKLDDTFNTSKIESITDSGIRKILIRHLEAYNTADGKEQPELAFSPEGIDELNKNIRALNDGKFHQPIFKVRTYEPMGNKFAVGETGNKKAKFVEAAKGTNLFFAIYADESGKRTYETIPLNIVIERQKQGQRSVPEISEKGSRLLFYLSPNDLVYLPDEEEKQSGVAVLEAIDKKQALQIYKMVSASGSQCFFIRHDIATPIVNKFEFSPLNKMEKSIDGIMIKEACWKLEVDRLGNIMAINGKRLGISSRAAQLNIVS

SEQ ID NO: 4014 - protein, 1426 aa, unidentified
  REGION 1..1426: note = Description of Unknown: Cas Enzyme sequence
MSKINILGLDLGTTSIGFAHVKEGDTPEQSEIIQIGTRVNPLTTDEQTNFEKGKPVSVNADRTLKRGARRTLDRYQLRRENLIDALLNANIIIKDTKLAEDGKQTTFETWQLRAKSVTEKIEKVQLARVFLAINKKRGYKSSRKAKNEDEGQAIDGMAIAKRLYEENLTPGQLAYQLLTEGKKAIPDFYRSDLQAEFDKVWNKQKEFYPETLTDELKQKLYSKNKTQTWAICKEPFDIVGVKRETKGKELQIENLKWRSAAIELKLNLEQLAIVLSEINNSLNKTSGYLGEISDRSKELYFNKETVGQFLYKQLQHNPHTRLKNQVFYRQDYLDEFEAIWKEQSKHHPELTDALKSEIRDITIFYQRKLKSQKGLVSFCEFESQEKIINGHKKTIGLKVAPKSSPLFQEFKIWQVLNNVLVRKKGSKKRVAKNIDQTKLFEEDQEIFAFDLAAKQTLFNELNLKGNLKSSKIIELLGYKSADWELNYSELEGNRTNATLYNTYLKILEIEGYDVKDLLKVKSNKDEVALDDLDVPAAEIKKMVQQIFETLGINTQILEFNAELDGKSFEQQAAYQLWHLLYSYEGDDSTSGNEKLYELLVKKFGFKREHAQVLANVTFSDDYGNLSSKAIRKIFPHIKELQYDKACEIAGYRHSTASLTKEEIENRPLKDKLELLKKNSLRNPVVEKILNQLVNVINTILEKNRAIDPNFKFDEIRIELSRELKKNAKERAEMTTNINAAKIENDKIRETIKREFSNVPNPTKNDIVRYKLYQELAFNGYKDLYTNKKIEYHLLFGKEYDIDHIIPQSKMFDDSFSNKVLVPRQANLDKGNKTAYDYMSNKSQQNFENYTSSIEELYKNGKISKAKYQKLLKQESEIGDGFIDRDLRDSQYIAKKAKNMLYDITKSVVSTSGQITDRLREDWGLINIMQELNFDKFKALGLTEQVEKKDGSFKERIVDWSKRNDHRHHAMDALTVAFTKHNHIQYLNYLNARKNEKHKLHGNIIAIENKETELKIDDEGNRKRVFKLPIPNFRKVAKAHLENVLVSHKAKNKVVTKNKNKTKSKNGEKVKIELTPRGQLHKETVYGKYQFYVNKVEKISAKFDEATIAKVSNPLFKTFLLQRLEENGNDPKKAFTGKNALSKTPIYLDATQTETIPEAVNLSWLEEDYSIRKDITPENFKDEKTIEKVLDKKVKQILFDRLKQYGDPKKAFSDLDKNPIWLNKAKGIAIKRVTISGVKNVEFLHYKKDHLGKDILDQEGKRIPVDFVSTGNNNHVAIYRDEKGNLQDRVVSLLDAVQLVNAGEPVIDKTYNQGIGWQFLFTMKQNEYFLFPNEKTGFNPKEVDLLDPKNKKVISPNLFRVQKLSKVEYGNSAVRDFVFRHHLETSVEEKRGLNGIAYKQLKSLPHLKDIIKVRLNHLGDIISVGEY

SEQ ID NO: 4015 - protein, 1235 aa, unidentified
  REGION 1..1235: note = Description of Unknown: Cas Enzyme sequence
MQKNILGLDLGVTSIGWAIVSEDDNGEREIVDMGSRIIPLSVDDKDEFSKGNAISKNQNRTTKRTQRKGYDRYQLRRKDLKELLNKLVMFPDDTLMKLSSVELYGLRDKALKEKIELVELGRVLYHLNQKRGYKSSRSDANLDKKDTDYVAEVKSRHQNIKDAGLTIGQYFYEELKKNEFYRIKQQVFPREAYVEEFNAICKKQKQYHPILTDELIATFRDEVIYYQRKLKSQKGLVNICEFEGEYRKDAKGKTLFTGPKVSPKSSPLFQVCKIWETVNTISLKNKNGETLSITNEQKQLLFTYLDINERLSQAELFKLLNLKKDDGWYGNKHIGKGLQGNLTKAAILNHLKGFENLLVFNLNIEQKSQEVFLVDKKSGEIIGNNTQKVIDNTFEQEPFYQLWHIIYSIADTEDCSKTLQLKFQLPKDIADKLASLDFTKSAFGNKSAKAMRKILPYLMEGFVYSDACSFAGYNHSNSLTKDENFKRELLEAIPTLSKNSLRQPIVEKILNQLINVVNAIIEKHGKPDEIRIELARELKQSKDERNETFASLSKRERENEGIKNRIATEYGIYGVRATRNTVIKWRLFHEINNDESKVNATCIYCGQPFGITDALRGSNVDIEHIIPKSRLFDDSQSNKILTHRKCNEDKGDRTAYDFMKSKGDDEFQIYLETIETLYKNKIIGKGKRDKLLMPGNKIPQDFIERQLRETQYIAKKAKEILEQVCYSVWSTSGNVTEYLRRIWGWGDVLMNLQLPKYSGIGLTEWREWETNDGQQHKQEVIKDWSKRDDHRHHAIDALTIACTKQGFVQRINTLNASSTRDGMKKEIDEMKKEFDKRKSLLENYFFSIKPFSTKQVENAASKILISFKAGKKVATIGNRKVKINGKKQIVQSGIIIPRGALSEESVYGKIKSTEKNKPVKYLFENPHLVFKPYIKVLIEERLLQHEGDIKKAIASLKKEPIYLDEAKTKILEYGTCFKDEYVIKYPIETIKAKDVGYIVDSKVKEIIKARLAQFNDKEKEAFKDLENNPVWYNEEKKIAIKTVRCFTGLSAVEAVKKDDMGNDIGFVKPGNNHHIAIYVDEHGKKQEHVCSFWHAVERKKFGLPVVIEDVKSVWDAVLENKGEFPDSFLSKLPFDTWVFEQSLQQNEMFILGLPKEDTEKAFLENNKSLLSNSLYRVQKLATTNYMFRHHLETQINDSNEAKLSKRFIHIRSIASLLECNPIKIKINNLGEIIKR

SEQ ID NO: 4016 - protein, 1424 aa, unidentified
  REGION 1..1424: note = Description of Unknown: Cas Enzyme sequence
MPSKNILGLDLGTTSIGFAHIIEGPTPEQSSIVRIGVRVNPLTTDEQTNFEKGKPVSVNAERTLKRGARRNLDRYQDRRKNLIHALLKASIISADSILAEDGKGTTHSTYAQRANAALNEITLEAFARVLLVINKKRGYKSSRKAKNEDEGQAIDGMAIAKRLYEENLTPGQLAYQLLKDGKKAIPDFYRSDLQAEFDKVWDFQKQFYPEIFTDEFKKELAGKGQRATSASFWGKYNFNIAENKGTRDQKKMNAYKWRAEAIAKQLAREEVAYVITEINNNLNSSSGYLGAISDRSKELYFNNETVGQYLYKQLQHNPHTKLKNQVFYRQDYLDEFEKIWEVQAQFHKELTQELKSEIRDIIIFYQRKLKSQRGLISFCEFESKEIETEKNGQRIKKTIGMRVAPKSSPLFQEFKIWQVLNNAELKNRKGKLKRSLEQEEKELLFEELNLKGNLSSSKILTLIEHSPKDWEINYTEFEGNRTNKALYDAYLKILQIEGYDEDVLKLSDKDEINVAELKTSAADIKNMVKQIFETLHIDSEILAFDAELDGKAFEQQASYQLWHLLYSYEGDNSSSGNEKLYDLLQQKFGFKKEHARILSNVALSDDYGSLSSKAMRKIFPYIKEQTFDKAAAQAGYNHSAYSLTKEDILSRPLKNTLELLKKNSLRNPVVEKILNQVVNVVNTLIETNSEKDADGKIVQYFRFDEIRIELARELKKNAKERAEMTININAGKIVHDKIFKILQNEFGIKNPTRNDIIRYKLYEELKNNGYKDLYTNTYIPREILFSKQIDIDHIIPQAKLFDDSFSNKVIIFRKDNLDKGNKTAFDYIESRYGSDKAEAFVNRARTLFDLGQKSKEEGISKSKFQKLQKRETEIGDGFIERDLRDSQYIAKKARNMLYEICRVVTPTTGSITDRLREDWDLINIMKELNLPKYRALGLTEMQERKFEHKVEIIKDWTKRNDHRHHAMDALTVAFTKQSHIQYLNFLNARKDENHKEHHKIIGIETKETQVVKDDKGNNKRKFILPVPNFREIAKEHLENVLVSHKAKNKIVTKNKNKTKSKNGEKIKVELTPRGQLHKETIYGKYRYYVNKEVIINGKMDETVIQKVSNPIFRKLLLGRLKENGNDPKKAFAGINALSQKPIFLDNTKIEVLPEKVNLTWLEEDYSIRKDLTPENFKEAKSIEKILDKKVKEILLARLKEYHNDPKKAFSDLEKNPIWLNEIKGIAIKRVTISGIKNAESLHHKRDHFGNDILDKNGNKILSSFVSTGNNHHVAIYKDDAGTLQDNIVSLLDAVRLSNSEETVIDKTYNQSLGWKFLFTMKQNEYFVFPDEKSGFNPKEIDLLDVKNKKIISPNLYRVQKLSKVMYGNSAVRDYVFRHHLETSVEEKKELSGITYKQIKSLPFLEKIIKVRLNHLGDIVKVGEY

SEQ ID NO: 4017 - protein, 1436 aa, unidentified
  REGION 1..1436: note = Description of Unknown: Cas Enzyme sequence
MKKVLGLDIGTNSIGWAFIETNLETNTGKIAGIGVRIIPTDSELLSKYEAGQAASKNAVRRQARGARRIKQRYKLRRQRLVDALMILGWLPEGFLPGHQMPVRHETLSEMRSSFGTDEISADWIVYYLRHKALSERVTEQELARILYHMNQRRGFKSNRKTGTDLLQDTDEEADGGKKKREKNVEIVRIISVEDTGEKAKGNMLFKVTLADSRTGIIARKVKPEWDNQEQELEITTIPPTKKEPSRYEFRKLTNTDADKWVKQKVAREEDIRRSGLLYPGRYYYNELKKNPNYTIKDVSIDRKFYMDELEAILRKQIECNPSLDNREKLQIIAEKLYPKNQHKQKEIRNNDIVHLLLKDIIYYQRPLKSKKSSISDCGLAKKNYVDPTTGKRLTYKVAPASSPVFQEFRIWQTVNNIRVLQKTKKDEQGKISLDVDVSGDFLNPSTLERLFQLFDSKERVNQTQILKELGLSEQQFSINLFRQNEEKELPGNETKALVKKQFKKAGYESEGAAILNKPERLYQLWHILYSLEDNASVYSALQRQFNIPAGAAEIIAQAPAFKQSYCSFSHQAMSRLLPLMRSGKYWTWDVIDAFTKDRLEKIFTGEFDEGISDFVRDFFKKYRIEKENSCQGMMVPMASYAVYGVHSERDGSYYERPEQLIPSEPLNLRNPIVEQVVNETLRLVRDIWKEYGRPTEIHIELSRELKKNAKERKEISEMIAENENENRRISAILKELRLGNPDSLADIERLKLWEKQADQKTREEFKTIRFKRPAEPTKDEVQRYRLWSEQNFLSPYSGKPIPISKLFSREYDIDHIIPRSRYFDDSLENKVVVETSINKEKGNRTALEYIKNGSTGNCILSLSAYEAHVNQFFYRKKKKLLLSEEIPSGFSNRHLVDTRYISRKLHQLLAPVSENRKNPVISTSGKITSELKSAFGLGEKMKELVKWRFERLQEKTEEPYAWYDDETDQDGKPTGRRILRLKGYEKRIDHRHHAVDALIISCTTLSHIKYLNDLNASQYRKSPSDEELMQNLPKLLELNKEKDYWQSRKFRKPWPGFTTEAMKAIDGIIISFKNNIRVYGKKANKSWRYIQQPDGTFEKKLAPVTDRNGKRKLSPYVRQSLHKATFAGKIQMREYCFINISEAFKTPELIANKKEREHIRKLLEKGNGDVKKAARFYKEDPIKDEEGIEARKISSIRLASYYVNRVNLSSGFDEKRIGKVPDLVLQKTLLDHIRKISELNQQKDKNEQIEPFGAEGMEILNKGKRIPITKVSIKEESESKFEIRHGTFTEADKGTNLYFVIYEKKEDSRDRKYESIPLREVIKAKAEGSDFVEEKVGYKWFRLSPNDLVYMPEEGEALGGINWKDREGIAHKIYKLVSCNKGQAFFVPQALSKVIVDKVEFDSLNKVERALDGRMIKQYCIKLNVDRLGNVRPINR

SEQ ID NO: 4018 - protein, 1456 aa, unidentified
  REGION 1..1456: note = Description of Unknown: Cas Enzyme sequence
MKKILGLDLGSNSIGWALIQHDFSNKEGEILGMGSRIIPMSQDILGEFYKGNSVSQTAERTSYRSIRRLRERNLLRRERLHQVLNLLNFLPNHYAEAIDFETRFGKFKEGTEPKLAYNNNSFIFKSSFEEMMAEFKLNQPQILINKKGAPALVPYDWTIYYLRKKALKEKIEKEELAWIILNFNQKRGYYQLRGEEEEENPNKLVEFHSLKIVDVKEDEPQKGKQDIWYSLILENGWIYRRSSKTPLFDWKDKIRDFIVTTDLNDDGTVKKDKEGKEKRSFRTPGEDDWTLLKKKTEKEIEKSGKTIGTFIYDTLLQNPKQKIRGGLIRTIERKYYKDELRQILNTQIKFHPELKNKDLYNDCVRGLYRNNDAHQLQLSRKDIVHLFINDIIFYQRPLRSQKSTISNCTLEYRTYKDKDGNEQRNYLKAISKSNPNYQEFRIWQWMYNLSIYNKENDQNVTTDFLNSIKDWENLFAFLDERKEIEQKALIKFFLEQTGLKGKVLNTECEKYYWNYVSDRAYPCNETKTQICTRLRKAGIDATNFLTKEKEHQLWHIIYSVTDKTEFVKALGSFAKKHQFNEGEFVDAFKNFPPFQNEYGSFSEKAIKKLLPLLRLGKYWSWEAIDNSSKNRIDKILTGEFDEEIKERVREKTIHLTRENDFQGLQLWLAQYIVYGRHAEAAVIGKWNSVNDLEEYIQNFRQHSLRNPIVEQVVTETLRVVKDIWQKYGNGTKDFFDEIHIELGREMKKTAKERELATSKNIVNENTNLRIKALLAELMNDTSVENVRPYSPSQQEILKIYEDGVLNSGILIEDDILKISKAPQPTISELKRYKLWLEQKYRSPYTGEIIPLNRLFTPDYEVEHIIPQSRYFDDSFTNKVICESEVNKLKDNQLGFEFIKNHHGTTLETGINKKIIHISEIEVYEDFVKTHYAKNRTKRNKLLLEDIPEKMIERQLNDTRYISKFISGVLSNIVRSDKSDDGINSKNIIPGNGIITGELRQDWGLNDVWNDLILPRFERMQKLRTEKDIANGISFLALNKNNKPIPELLPTALQRGFSKKRIDHRHHALDALVIACATKDHVNLLNNQYANSPKRYDLNRKLRIFKKVAYNHPQTGERIEREVPKEFIKPWNNFTITAKEALESIIVSFKQNLRVINKATNHYEKWVVKNNKKTKERQLQTGTNWAIRKSMHKDTVSGKVILERIKVPKGKILTATRKPIDTSFDEKAIESITDTGIQKILTNYLKVKNNNPELAFSPEGLEDLNKSIEKYNDGKQHQPVFKARIFEVGSKFPIGHTGNKKTKFVEAAKGTNLFFAVYGRENGQRNYETIPLNVVIERQKQGLPSAPLENEEGDKLLFCLSPNDLVYVPSDEEQLDGKEVDFTNLTKEQLTRIYKVVSFTGNRLFLVQQYVATTIVNKAEFSSLNKMERSIDGAMIKECCEKLLIDRLGNISIKKKT

SEQ ID NO: 4019 - protein, 1391 aa, unidentified
  REGION 1..1391: note = Description of Unknown: Cas Enzyme sequence
MNKNILGLDLGTTSIGFAYVIEGNTPEQSSIQKIGVRVNPLTTDEQTNFEKGRPVSVNADRTLKRGARRMLDRFQDRRKNLIDALIKANIITAKTILAEDGKNTTHSTYYFRAKSVSEKVEKDELARIFLAINKKRGYKSSRKAKNEDEGQIIDGMSVAKRLYDENLTPGQLAYQLLSEGKKYLPDFYRSDLQAEFDKVWIYQKQFYPEILTDEFYKELKGKGQRATSAMFWAKYGFNTAENKAKSREEKKLQAYQWRSDAIFKQLEKEEVAFVITEINNNLNNSSGYLGAISDRSKELYFKNKTVGQFLYDQIKQNPHTRLKNQVFYRQDYLDEFEKIWEMQAKFHPELSEKLKAEIRDIVIFYQRKLKSQKGLVSFCEFESREIEIEKNGSKTKKTIGLKVSPKSSQLFQEFKIWQVLNNVLVRKKGSRKRSVKNENQSVLVDEEREIFILDLETKQKLFEELNIKGNLKSAQIMELLGCKTSEWEMNYSELEGNRTNKILFDAFLKICELEGYDEDLLKLQGKDEIDVSELKAPASEIKEMVKNIFHALGINVEILEFDAELDGKHFEKQAAYQLWHLLYSYQEDDSKTGNDTLYRLLEEKFGFKEDHGSILAKLVFSDDYGNLSTKAMRKIYPHIKELTYDKACFQAGYKHSASSLTKEEIATRPLKNTLELLKKNSLRNPVVEKILNQLVNVVNTIIETNSQKDKDGNITEYFKFDEIRIELARELKKNAKERAEMTTNINASKIDHEKIREIIKKDFPNVKNPGKNDIVRYKLYQELSYNEFKDLYTDEKINYEKLYSKDYDVDHIIPQSKVFDDSFSNKVLVPRQANLNNGNKTASDYMSGKSAEGFEKYLSIVETLFKEKKITKAKYQKLLKQNSEIGDGFIDRDLRDSQYIAKKARNMLYDICRIVTPTTGSVTDKLRQDWGLINIMQELNFDKFKKLGLTEMIEKKDGSFKERIVDWSKRNDHRHHAMDALTVAFTKHSHIQFLNFLNARKDENHKEHTKIIAIESKETKVNSDDEGNKKRIFNLPIPNFREQAKEHLESVLVSHKAKNKVVTKNKNKISGKDKPQIVLTPRGQLHKETVYGKYRYSVSKEEKVSARFDEETISKVANPTYKKLLLQRLYENNNDPKKAFVGKNILSKNPIYLNKEKTETLPEKVKLSWLEEDYSIRKDITPENFKDLKTVEKILDEGVKRILKKRLEEFGNDAKKAFSDLEKNPIWLNEEKGIPIKRVTISGIKNAESLHYKKSHLGKDLLGDDGKRIPVGFVSTGNNHHVAIYRDQKGNLQERVVSLFDAVQLVNSGEPVIDKNYNQGFGWQFLFTMKQNEYFVFPNSDLDFDPKEIDLLDPKNKRRISPNLFRVQKLATKNYMFRHHLETTVDEKKNL

SEQ ID NO: 4020 - protein, 1401 aa, unidentified
  REGION 1..1401: note = Description of Unknown: Cas Enzyme sequence
MRVNKILGLDLGVSSIGWAVVQEDSKNPENNKIIKLGVRVNPLTVDEQLNFEKGKPITTNAGRTLARGARRNLQRFKLRRHYLIDVLKKNNILKETDLLAEVGKNSTFQTQEIRAISAKEKIELSEFARVLLLINKKRGYKSSRKAKNEEDGQIIDGMAVAKKLYEENQTPGEYSYQLLQQGKKQLPDFYRSDLQAEFDKIWNFQKQFNPEIFTNELYERLQGKNRNATWKELEIPFSLVGIKQIGTMQEKKMERYFWRSEAVKKQLDFERLAVVFQEINSNLNNSSGYLGAISDRSKELYFNNQTVGEYLYNQLKINPHTKLKNQVFYRQDYLDEFEKIWETQAKYHKKLTKDLKEEIRDIIIFYQRKLKSQKGLISICEFENREIEINDVSTGSTGKIKKKTVGLKVAPKSSPSFQEFKIWQRLNDLEFKNVETKEIFPLELEHKEILFGNLNIKGNLSSKELIELLGYPSKEWKCNFKEIDGNKTNDNLYTAFLKIIASEGIEFPKEFKLTIDDEIKISKINASAEIIKLFVKEKLSELVIDISVLDFNPELEGRDFEKQTSYQLWHLLYSYEGDDSPSGNEKLYELLEKKFGFKKEHSKILAEIGFPQDYGSLSSKAMRKIYPYIKEYKYSDACNYAGYNHSKNSLTKKQLEDRVLKEQLDILPKNSLRNPVVEKILNQMINLVNEVSKEYGRPDEIRIELARELKNNAEERANMTSEINKATLLHQKYAEILKKKFGIPVPSRNDIIRYKLYLELANNGFKDLYTDIQIKKEELFTDKYDIDHIIPQSRFFDDSFSNKVLVPRGANLKKGNFTAFDYLEIEGKEKLEKFLNIIKELYDKGAITKAKYEKLQKKGVEIGDGFIERDLRNTQYIAKKAKEILFGITNSVVSTSGRITDKLREDWNLINTMKEINLEKYRKLGLIETITNSKGEEKQRIIDWTKRNDHRHHAMDALTVAFTTHNHIQYLNYLNARKDEKHKEHQNIFAIENLITKVFEKKNGSKERRFKEPIKNFRIDAKKHLDEVLISHKAKNKVVTKNINKIKKKGSIVTKTELTPRGQLHKETIYGSSKFLKMKDEKVSGKFDLEIINKVQNEKFRNALLARLQEFDGDSKKAFTGKNVISKNPIFLNNEKTEQLPETVTLAWYETGYTIRKVVNPDNFKDYKNIEKVIDKGVREILMNRLKEFNGNSKEAFSDLDKNPIWLNKSKGIAVKTVTITGINNAEALHYKKDHLGKEILDENGKKIAVDFVSTGNNHHVAIYEDENGNLQEKVVSFYEAVERVNQGLTIIDKDYNADLGWKFLFTMMQNEMFLFPSEDFNPKEIDLFDDKNLSLISKNLFRVQKFTIKDYFFRHHLETTVEDHSTLKGITWRREGLNGVREILKVRLNHLGKIVYVGEY

SEQ ID NO: 4021 - protein, 1399 aa, unidentified
  REGION 1..1399: note = Description of Unknown: Cas Enzyme sequence
MKTILGLDLGTNSIGWALVKEAENKNEQSSIVKIGVRVNPLTTDEQTNFEKGKPITTNAGRTLARSARRNLQRYKLRRDNLIQILKQQNWISNETILAENGAHSTFETYKLRSLAAKEQLTLEQFARVLLMINKKRGYKSSRKVNNTEEGQLIDGMDIAKKLYNEGITPGQYVHELLKNGKKKTPEFYRSDLQNEFDKIWNKQLTFYPDLLIPSLKEELKGKGSKATWAILKVPLHLVGIKRDKKRDELKLENYEWRVKGLSEKLDLEALAIVLQDINGQMANSSGYLGAISDRSKELYFNKQTVGEYLYTQLQNNPHARLKNQVFYRQDYLDEFETLWSVQAKGRENILTNELKEEIRDVVIFYQRKLKSQKGLIALCEFEQKTITQNGKTKTIGLRVIPKSSPLFQEFKIWQNLHNVKIKNKQTREVLLLSQEVKNLLFEELNLKGNLTANEVLKLLVDKPKDWELNYTSLEGNRTNQALYNAYLNILDIEGYDVREELKLKLNKDEISLADIDKPASEIKKMVHDIFNHLGINTAILDFNAELEGKHFEQQASYQLWHLLYAYEEDTSPTGMDTLYRLLEAKFGFKREHAKCIGAVAFQDDYGSLSAKAIKKIYPFIKKSKFSEACKLAGYRHSKHSLTKEELDNRELKSKLDILPKNSLRNPVVEKILNQMINVVNTIIDTENDKLEKQGLERNFKFDEIRIELARELKKNASEREELSKVINAAKLEHENIVKILQQEDGIKFPTRNDIIRYKLYQELKNNGYKDLYTNEYIKREELFTNKYDIEHIIPQSRLFDDSFSNKTIVPRQINLDKGNRTAYDYIQDTFGDTALEAFITRVEHMHQQKEQGISQAKYKKLLMKGSEIGTGFIERDLRDSQYIAKKAKEILFQITKSVVSTSGSVTDRLRQDWDLVNVMKELNLPKYEAAGLVELQEDKNGQPKKVIKDWTKRNDHRHHAMDALTVAFTKHSHIQYLNNLNARRNENAPKQAIIENIEQKETIKVQDGNGNYKRIFKEPIPNFRQIAKQHLEAILVSHKAKNKVVTKNINRIKGSDRVQIALTPRGQMHDQTIYGKNSWSRIELSKKTSKIEIESIIDLNKKELIKKFIKEKGSIAKAFSDENLSKLIFNGKQLKEVEISIPCFTQKIDLGKVMTDSQKTNSAKEKCIRNILDLRVREIIRQRLLDFKGDYKKAFSDLEQNPIWLNKDKGIAIKRVTISGVKNAEPLHVKKDHSGKDILDENGQPIPVDFVSTGNNHHVAIYEDEKGNLQEKVVSFYEAVARVNLGLPIVDKTFNQHLGWQFKFTMKQNEMFVFPAEDFNPQEIDLLDPKNRALISKHLYRVQKIATKDYTFRNHLETTVEDNNKLKGKTWKREGLNGIKGIVKVRLNHLGEIISVGEY

SEQ ID NO: 4022 - protein, 1289 aa, unidentified
  REGION 1..1289: note = Description of Unknown: Cas Enzyme sequence
MTLKVVSVKDTGEVSKGKTWYEVLLENGWIYKRQSAYPLDWEGKTKDFIITTKLNDDGTDAIDKEGNVKRSFSAPKEDDWGLRKIKTQHDIDASHKTIGEFIYDALLKNPDEKIIGQLVRVVDRKYYIEELKRILDTQKQFIPELCDKILYQDCINALYPQNEAYRNSIAGKDFTYLFLNDIIFYQRPLKSKKSLINECLYEYHNYKSSEGEWKRQYLKCTPKSHPLYEEFRLWQFVENLHIYHNDANGIGKTDCTAEYIHDKAEMVKWLLTQKEVSEKTMLEHLAEKKTKGLSWNYISDKDKKYPAAPVTATISSVLHEAGGTADMSNIMHVWHILYSVSDKVQLTAALQHYAVDNNLTNVFVEKLSKQKPFEADYGAYSEKAIRKLINLMRCGEYWKKDAIDRKTLERIEHILTGEVDDNISERVREKLTSMHEITDFQGLPLWLAEYVIYDVRKNDTKWNNPEDIDSYLQAFRLHSLNNPIVEQVVMESLRTVRDIWKQEGQIDEIHIELGRNLKQNAEQRKKTLERQQENEKANLRAKLLLQEFMNPDMEIEGVRPYSPSQQELFRIYEDGVLNSNNPSEDIQKIIDDISSLKRPSTQDIKKYRLWLDQKYRSPYTGEIIPLAKLFTSAYQIEHIIPQSRFFDDSMSNKVICEAEVNALKDRMLAHEFILLHGGEKVTLSGGKVVTICNRESYEQLVRDNFSGNKAKQEKLMLDDIPEKFIARQLNDSRYISRLMTQLLSNIVREKINATEYEPEAVSKNVIVCNGTTTTRLKKDWGINYIWNHIILPRFERLNQLQNTTVFTTQTANGHIIPNMPMELRKGFEKKRIDHRHHAMDAIIIAFTTRNHVNLLSNEAALEKDEKARYDLQSLLRKREIWTDANGKQHTKFTDFIEPYIGFQKEVQQCLENIVVSFKQNLRVINKSNNHSLRFVDGKKQMVRQEKGDNWAIRKALHKDTVFGRVNLRKKKFVNLTYALQHIKDIVEKDLRNKLQELVTDGKDEKQIKKWFAAEPDVWADVNLKRIEVYYFTEDANEHYYAVRTAIDESFTAEYIRNKVTAESIQKILLAHLDSCNGDPKLAFSPDGIDKMNTNILQLNNGKPHKPIYKVRVCEKADKFAVGQVGAKSKKFVEAAKGTNLFFAVYTSKLEDASEVRSYVTVPFKVAVDCQKKGLRNWKMLLDEWIHNENLVSKDANLRFVISPNDLVYVPTVEELQTGKIKLHKERIYKFVSSSGMDAYFIPNSVASSILNKVEYSQLNKISRVNIEEPLIKEICIPIKVDRLGNIIEA

SEQ ID NO: 4023 - protein, 1173 aa, unidentified
  REGION 1..1173: note = Description of Unknown: Cas Enzyme sequence
MITSYTMSTKKILGLDLGTNSIGWALIETEDSKPKSILAMGSRIVPLSTDDSTQFAKGQAITKNADRTQKRTARKGLNRYQMRRALLTEALRRHGMLPERTDENIIDLWRLRSDAATEGKQLSLQQIGRVLYHINQKRGYKHSKAEADNSADAKQTKYVEAVNQRYRDIQACHQTVGQYFYEQLLSSAVQTPSGPYYTYRIKDQVLPREAYIAEFDQIMKVQRVFYPDVLTDELVDTLRNRIIFYQRPLKSCKHLVSLCEFEKRPFKREDGQIVYSGPKCAPRTSPLAQLCAVWEAVNNITLTNRQNETFEITHEQRVAMADFLNQHDKMGVKDLQKILGISPKDGWWAGKAIGKGLKGNTTFTQLRDALGNLPGAEHLLEMKLSMVDAAVDTTTGELILQVSPQVEELPLFRLWHMVYSVQNEEELRKALHKQFGIDDEEVLARLGKIDFVKPGYANKSHKFIRKLLPYLMEGYQYHEACAHIGVNHSNSLTAEQNAARPLLDKIPLLEKNELRQPVIEKILNQMINVVNALKAEYGDIDDVRIELARELKSSKDEREAAFKRNNENERQNKIYEDRIREYGIRPSRSRIQKYKLWEESNHLCFYCGKPVNVTDFLAGAEVEIEHIIPQSVLFDDSYSNKVCACRACNQAKGNLTAREFMEKHSKEEYDSYLLRVDDAFNAHRISKTKRDHLLWRKEDIPQDFIDRQLRQSQYIAKKAAEILRQGYRNVYATSGSVTDFLRHQWGYDEILHHLNLPRYRQVEGLTEEVTYDHRGQEHQQERIKGWTKRLDHRHHAIDALTIALTQQSVIQRLNTLNTSREQMFDDLGTRTDTPEYTEKRSLLENWIDAQPHFSVQEVTDKVDGILVSFRAGKRAATPAKRAVYQKGKRRIVQTGLQVPRGALSEETVYGKLGNKYVVKYPLGHQSMKVDDIVDPTIREIVRTRLDAFGGKAKDAFAEPLYSDAARQMQIKTVRCYTGLQDKAVVPVRFNEQGEPVGFVKMGNNHHIAIYRDSKGQYQESVVSFWQAVERKRYGIPVVIEHPHEVWDKLINSDNIPQEFLETLPHDDWEFVVSLQQNEMFVLGMDDADFEAAMEQKDYRTLNKYLYRVQKISSKEYCFRYHTETSVDDKYDGVTNPNISIELQKLKRLKSFGAFFSQHPHKVRVNLLGEVSAL

SEQ ID NO: 4024 - protein, 1456 aa, unidentified
  REGION 1..1456: note = Description of Unknown: Cas Enzyme sequence
MKKKILGLDIGTNSIGWGLVTNDIDEKAGKIIALGSRIIPMSQDVLGKFDSGVSISQTAERTAFRGVRRLNQRNLLRRERLHRVLNCLNFLPPHYQAAIDFDKKLGQFINGAEVKLNYVQNNEEFDFIFKESFNEMVDDFKKEQPNLFHKKKNGQTTKVPYDWTIYFLRKKALSHKISKEELAWLILNFNQKRGYYQLRGEEEDNQSKIEEYHALQVTKIYKDKDSKASDLWYNVVLENDWIYRRKSKIPLDDWIGTTKEFIVTTSIDKDGSLATNREGEIKRNFRAVDSEKDWIAIKSKTERDIDNSEKTVGEYIYENILAQPKQKIRGKLIRTIERKYYKEEFRKILERQAQFHAEFSDNKLYEKCIEELYPRNEAHQNNIKDKDLIYLLLDDIIFYQRPLKSKKSSIANCQYEARHYKTKDGQVREQPLKGIAKSNPYFQEFRLLQFIQNLKIFKKENGQEIDVSNLLFPNISDWENLYEELRLRKEIEQSQLLQYFIKKKIISRAEKETYRWNYVEDKKYPIGDTRYQIISRLKKIENLKIENFLTNEIEYNLWHIIYSVKDKKEYEQALATFAKKNKLDTASFVNHFKNFPPFKSDYGAYSEKAIKKMLPLMRFGNYWTADNIHAQTKERIEKLLNAEYDENINDRVRGKVSNLESIMDYNFLPTWLTGYVVYGRHSENKTISQWTSPEDIEKFLKEFKQHSLRNPIVEQVLTETLRVVKDIWLHYGKGKANFFDEIHLELGREMKNPKDKRERISKRNAANERTNQRIKELLEELKKDSSIQGDVRPYSPSQQEILKLYEEGVYQSQVKIEDDIEKIRNSSSPTTKEIQRYKLWLDQKYVSPYTGKAIPLSQLFTSSYQIEHIIPQSRYFDNSMGNKVICESIINEEKSNTTAYEFIDHRGGERIDLGHGKSVPLFTKEQYIEHCNRQFAKNRTKLRNLLAEEIPEGFIQRQMNDTRYISKFAKSLLGNIVRQDDEPEATPKKLIPINGTITSRLKRDWGLNDKWNELIAPRFKRMNEITNSNDYGYWDETINAFRTQVPDTTSANFNKKRIDHRHHALDALVLACCDRRHIQYLSSLNNDTVKYNLQPALLIKNGDGRYSKHFQSPWQNFQTDALKALQEIIISFKQNQRVINKTNNKTWQWQKENGELKKKLVKQTKGENWAIRKPLHKETVYGKIQLLRNGKIIKATAGRVALSDKFTRKHLNRITDTGIQKILNKHVKNYLDEKGKEQFARAFNHEGLKNLNENIVTLNDGKFHQPIRKVRIYEVGEKFAVGHSGNKSSKYVEAAKGTNLYFAIYQGKNKKGEIIRQYETIPLNEVIERLKQGDSPVPKQYIDKQKCVYELLFWLSPNDLVYVPSEEELENKNIIVDHQLNPGQINRIYKMISCTGRECHFVQMHIAHLIKNYDSKTKIGELGSINKLEKTLSGLTIKDCCNKLKIDRLGNIKLIK

SEQ ID NO: 4025 - protein, 1156 aa, unidentified
  REGION 1..1156: note = Description of Unknown: Cas Enzyme sequence
MKKHILGLDLGVGSIGWALIETEDDQPKQIIGMGSRIVPISKDDSDQFSKGQAISKNADRTARRTTRKGYDRYQLRRALLTQVLRQNGMLPERMDENVIDLWKLRSDAATEGHQLTLPQIGRVLYHMNQKRGYKHAKADDNGDSKQTKYVEAVNQRYTEIQEAKQTVGQHFYLELLRSKVESGNGPYYTFRIKDKVFPRAAYIAEFDQIMKVQKAYHPEVLTDEFIDTLRNRIIFYQRPLKSCKHLVSLCEFEMKPYKNKDGKIVYGGPKCAPRTSPLAQLCTMWETVNNITLTNRNNERYEFSLDERRQLVEHLCTHEVLKLTDLYKILGITKKDGWYGGKAIGKGIKGNATLNQLRKALNGKYSDWLEMPIERIDAVDNETAEVFWQVSPKVEETPLFKLWHAVYSIQDAEELAKTLRNKFGIDDQEVIDALCKIDFVKPGYANKSHKFIRRLLPYLMEGMMYSEACARIGINHSNSMTAAERDARPLAEHIELLQKNALRQPVIEKILNQMINLVNRLQQEYGPIDEARVELARELKQSREEREGAYRRNNQNERLNKEIAAKIEEMGIRPSRSRIQKYKMWEETNHRCMYCGKTVSLAEFLNGADVEIEHIIPRSILFDDSFSNKVCACRECNHEKGNMTALDYIETKPAAEVEAYKQRVDEAFKEGQISKTKRDHLLWHKSDIPTDFIDRQLRQSQYIAVKAVEILQQAIRQVWTSGGSVTDFLRHQWGYDEILHTLNLPRYRQVEDLTEIVHYEHAGQEHEEERIKNWSKRIDHRHHAIDALTVALTRQAYIQRLNSLNAEFTREEMLKEVEEANAVYNEKKSLLEKWINEQPHFSVDDVTQSVDSILVSFRAGKRVTTPARRAIYQGGKRTIVQRNIQVPRGALTEETIYGKLGDKFVVKYPLDHPSMKPENIVDPTIRALVQKRVAERGKEAFKEPLYSAEGMEIKSVRCYTSLSENGVVPVKQDEQGRNIGYAKKGNNHHVAIYKDKDGQYQEMVISFWDAVERKKYGVPVVITNPHAVWDSLINKDLPQEFLEKLPKDDWQLQLSMQENEMFVLGMEEDEFNDAIEIKNYAVLNKHLYRIQNISSLFYIFRYHTETRVDDKYEGVENGRNASMSLGALVPIRSFKALFAQFPQKVKIDIMGRITKA

SEQ ID NO: 4026 - protein, 1153 aa, unidentified
  REGION 1..1153: note = Description of Unknown: Cas Enzyme sequence
MKKNILGLDLGVGSIGWALIETEDDQPKQIIGMGSRIVPISKDDSDQFSKGQAISKNADRTARRTTRKGYDRYQLRRAMLTETLRHNGMLPERMDENVIDLWKLRSDAATEGHQLTLPQIGRVLYHINQKRGYKHAKADDNGDSKQTKYVEAVNQRYVEIQETHQTIGQHFYLELLRSKVESGNGPYYTFRIKDKVFPRAAYIAEFDQIMNVQKAYYPEVLTDELIETLRNRIIFYQRPLKSCKHLVSLCEFEMRPYKTKEGKIVYGGPKCAPRTSPLAQLCAMWEAANNITLTNRNNERYNFSLEERKQIVEHLCSHEALKLTDLYKILGITKKDGWYGGKAIGKGIKGNSTLNQLRKALNGKYGEWLEMPIEHMDVVDEETAEVLWQVSPQVEETPLFKLWHAVYSLQDADELAKTLRNKFNITDQDVIDALCKIDFVKPGYANKSHKFIRRLLPYLIEGMMYSEACARIYINHSNSMTVAERDARPLAEHIELLQKNALRQPVIEKILNQMINLVNRLQQEYGPIDEARVELARELKQSREERENAYKRNNQNERLNKEIAAKIEEMGIRPSRSRIQKYKMWEESDHRCMYCGKMVSLAEFLNGADVEIEHIIPRSILFDDSYSNKVCACRDCNREKDNLTALDYLETKTGAELEAYKQRVDDAFKEGRISKTKRDHLLWRREDIPSDFIERQLRQSQYIAVKAVEILQQGIRKVWTSGGSVTDFLRHQWGYDEVLHTLNLPRYHKVEGMTEFVQYEHAGQTHEEERIKNWTKRVDHRHHAIDALTVALTRQAYIQRLNTLEASHDLMEKQVKDAGTLYNEKKSILEKWINEQPHFSVDEVTRQVDGILISFRAGKRVTTPARRAIYKGGKRIIVQTGLQVPRGALTEETVYGKLGDKFVVKYPLAHPSMKSENIVDPTIRAIVQKRIDERGKEAFKEPLYSAEGMEIKSVRCYTSLSENGVVPVKQDGQGNNIGFAKKGNNHHVAIYQDKNGQYQEMVVSFWDAVERKKYGIPVVITNPHAVWDSVLDKESPQEFLEKLPNDDWKYILSMQENEMFVLGMEDGDFEHAIETQNYAALNKHLYRVQKVSSKFWCFRYHTETMVDDKYGDTKNEQWSFQMGKAFRASSFDGLFRQFPHKVKIDIMGRITKA

SEQ ID NO: 4027 - protein, 1527 aa, unidentified
  REGION 1..1527: note = Description of Unknown: Cas Enzyme sequence
MKKKILGLDLGTNSIGWAVVNDDKGLKSISHAGSRIIPMDAKLMGDFESGNSISQTATRTAARGARRLYERHALRRERLNRVLTILGFLPNHYTKELNRYGQLNKGAEPKLAWNIVDEKYSFLFKDSFLEMVKDFGNPHPELMVNGRNIAYDWTIYYLRKKALTQPISKQELAWILQQFNQKRGYNQARGEEEEQKENKLQEFITQKVISVRDTGEKSKGKSVYEVCLENGWIFTKESKYPLDWEGKTKNFIVSTTLNSDGTDAIDKDGKIRRTFRAPADDDWGLLKLKTQHDIDASHKTVGEFIYDALLQNPDQKIIGQLVRVVDRKYYKDELKRILDTQKQFIPELQNGDLYDECIHALYPQNEAYRNSIAGKDFTYLLLNDIIFYQRPLKSKKSLINECPYEYHVFKEKDGKWQKQYLKCISKSHPIYEEFRLWQFVENLHIYREAANGIGKEDCTAELIANKADLISWLLTQKEVSEKSLLTQLVGKNKIKGLSWNFVSENDKKYPAAPVSSTIIGTIKEAGGDINTLTDPFEIRKNKHHRKLSGKEQDEKAKKNNRIINNLEQIWHMLYSISDKSQLLAALKHYAETNHLSDVFVEKLGKMKPFSDYGAYSEKATRKLLSLMRCGEYWSEEAIDANTKSRIEHIRTGEVDDAISERVREKLDTMHEVKDFQGLPLWLAEYVVYDVRKNDTKWETPEDIDKYLQSFRLHSLNNPIVEQVVMESLRTVRDIWKQEGQIDEIHIELGRDLKQNAEQRKKTQQRQQENEKANLRAKLLLQEFMNPDMEIEGVHAYSPSQQELFRIYEDGVLSSNKPDDETQRIINDLSSLKQPSAQDIKKYRLWLDQKYISPYTGEIIPLAKLFTPAYQIEHVIPQSRFFDDSMSNKVICEAEVNARKDRMLGHEFIVKCGGEKIKLSAGGKVVTILSPEAYEDTIRKNFAGDPRKQEKLMLDDIPEKFVARQMNDSRYISRLMMQLLSNIVREKISNTEYEPEAVSKNLIVCNGATTTRLKKDWGINDVWNKIILPRFERLNQIQNTTVFTAKTANGHIIPNMPLELRQGFEKKRIDHRHHAMDAIIIAFTTRNHVALLSNESALDKDEKARYDLQTLLRKREVWRSADGTEHYKFTDFIAPYDGFQKDVQETLENIIVSFKQNLRVINKSNNHFVRFKKDEDTGKLKKKKDRQKKGDNWSIRKSLHKATFFGEVNLRKKKYVNLTYALQHVEDIVEKDLRTKLRELLQEGKDEKQIKKYFASEPDVWADVNLKRIEVFYYTKDTNDHYYAVRTALDDSFTADYIRNKVTSEAIQKILLAHLARCNNDPKLAFSPDGIEQMNADIQALNNGVPHKPIFKVRTYEKAEKFAVGQIGAKSKKFVEADKGTNLFFAVYSTKTEDGSEKRSFVTIPFKAAVDCQKQGKKEWRQWLDKWVHGENLVAEDAKLCFILSPGDLVYVPKSDSTLEIDRSRIYKFVSSSDTDAYFIPVAVASPIINKVEYTQLNKISRICAEEPLIKEICIPIKVDRLGNIVAQ

SEQ ID NO: 4028 - protein, 1154 aa, unidentified
  REGION 1..1154: note = Description of Unknown: Cas Enzyme sequence
MKKKILGLDLGVGSVGWALIETEDNQPKQILGMGSRIVPISKDDNDQFSKGQAITKNADRTQRRTARKGYNRYQMRRALLTQALRNHNMLPDRLDENVIDLWKMRSDAATEGHQLSLSQIGRVLYHINQKRGYKHSKADDNGDSKLTKYVEEVNQRYKKIQETKQTIGQYFYIELLRSKIERANGPYYTYRIKDKVFPRAAYLAEFDKIMQVQRAYYPEVLTDDFIDILRNRIIFYQRPLKSCKHLVSLCEFEARPYKTKEGKVVYGGPKCAPRTSPLAQLCAMWETTNNITLTNRNNEKYEFTLEQRRQIVDFLCRNKEMKVSHLQKILGIGRNDGWYGGKAIGKGIKGNATLNQLREALQGKYDQWLEMPIKHVDVVDTTTGEVFWAVSPEIEETPLFKLWHAVYSLQNADELAKTLREKFLITDESVIEALCRIDFVKPGYANKSHKFIRRLLPYLMEGMMYSEACERININHSNSMTREERELRPLSARIQLLQKNQLRQPVVEKVLNQMINIVNSLKDQYGEIDEVRVELARELKQSRDERESAYKAMGQNERRNKEIAIKISEFGIRPSRSRIQKYKMWEESLHQCFYCGKTIDLAEFLNGADVEIEHIIPRSILFDDSFSNKVCACRQCNHAKDNQTAMEYMETKTVGELEAYKRRVDEAFTSKRISKTKRDHLLWRKTDIPTDFIERQLRQSQYIAVKAVEVLQEGIRQVWTSGGSVTDFLRHQWGYDEILHTLNLPRYRQVEGLTEFVDYEHAGQKHTEERIKNWTKRIDHRHHAIDALTVALTQQGYIQRLNTLEASHDFMEKQVKEAGTHYNEKKSILEKWINEQPHFSVDDVTKAVDGILVSFRAGKRVTTPARRAIYKGGKRVIVQRGIEVPRGALTEETVYGKLGDKFTVKYPLDHPSMKPENIVDPTIRALVQKRVAERGKDAFKEPLFSAEGMEIRSVRCFTSLSENGVVPAKYNEAGKPIGYAKKGNNHHIAIYKDKEGQYQEMVVSFWDAVERKRYGVPVVITNPHEVWDRLLTKDISQEFLAKLPNDNWQFVLSMQENEMFVLGMEDDEFNDAIERQDYATLNKHLYRVQKLSSHDYTFRYHTETKVDDKYEGAANGRNASMALGALVPIRSFGGLFSQFPHKVKVDLLGHIHKL

SEQ ID NO: 4029 - protein, 1159 aa, unidentified
  REGION 1..1159: note = Description of Unknown: Cas Enzyme sequence
MTTKKILGLDLGVGSIGWALIEMNNENPTSILGMGSRIVPLTTDDSTQFQKGQAITKNADRTQRRTARKGYDRYQLRRARLTQFLRANGMLPERTDEHIIELWQLRADAATEGKKLTLPQIGRVLYHLNQKRGYKHTKSDMSADSKQTKYVEEVNKRYKELQECNQTIGQYFYQKLVESAVQAPSGPYYTFRIKDQVFPRAAYMAEFDQIMNVQKQFYPDILTAELIDTLRNQIIFYQRPLKSCKHLVSLCEFEMKAYTNKETGKVVYSGPKCAPRTSPLAQLCAVWEAVNNITLFNKNNEYLSITLEQRQAMVEHLNTHEKMTAKDLQKILGISPKEGWSVGKAVGKGLKGNITLYQLRQALNGKYDRLLQMNLQMIDYVDEATGEVIARVADKVEQEPLYRLWHVVYSVQEREELGKALYKQFGIDDEEVVEALFKIDFVKPGYANKSHKFIRKLLPYLMKGYKYSEACEHIYVNHSNSMTKEQNAARELVDKIPLLLKNELRQPIIEKILNQMINIVNALKEKHGDIDEVRVELARKLKQSKDERAQATERINKNERENKNIEEKIREFGVRPSRVRIQKYKMWQESQERCFYCGKQIGAAEFLSGFDVEVEHIIPKSVLFDDSFSNKVCACRACNQAKGNMTARDFMETRGKVELDAYLQRIDQAYQEGRISETKRDHLLWSKEDIPQDFIDRQLRQSQYIAKKAVEILRSAIRDVYATSGSVTDFLRHIWGYDQILHNLNLPKYRDAELTEFVTYDHRGQEHQEERIKNWSKRIDHRHHAIDALTIALTRQGYIQRLNNLNTEHNSIEEEVRKVNPIMDKKYSLLEKYIYIQPHFTVQQVTEAVDGILVSFRAGKKVTTPAKRAIYRKGKRINVQTGLQVPRGALTEETIYGKLGNKYVVKYPLNHPSMKVDEIVDPTIREIVRARLNAFGGKAKDAFAQPLYSDAAQKMEIKSVRCYTGLQDKAMATVRFSEQGEAIGFAKTGNNHHIAIYMDSNGQYQESVVSFWQAVERKRYGLPIVIEDPKAVWDKVMNLDLPQEFLQTLPNDDWQFVVSLQSNEMFILGIEDGDFELAMENQDYQLLNKHLYRVQKIATKNYAFRHHIETSVDDKYDGVKKEMLSKQMQKLKITQSFDSFFALHPHKVRVNLLGEITNV

SEQ ID NO: 4030 - protein, 1184 aa, unidentified
  REGION 1..1184: note = Description of Unknown: Cas Enzyme sequence
MRKKTTFAANRFIKVEPNIFSKSSMATKKILGLDLGVGSIGWAVIEETDNKPQQILSMGSRIVPLSKDDSDQFQKGQAITKNADRTAKRTARKGFDRYQLRRFTLTQVLRKNEMLPERMDEHVADLWKLRSDAATPGCKLTLKQIGRVLYHINQKRGYKHSKADEGGDANQTKYVAAVNQRFADLQQRKQTIGQYFYQQLVDTAVHTKTGEYFTFRIKEQVYPRQAYMAEFDQIMAVQKDFYPGVITDELIDTLRNRIIFYQRPLKSCKHLVSLCEFEMKPYKNQQGKIVYSGPKVAPRTSPLAQLCTLWETVNNIAIDNRDGEKYQFTFAERKSMVDFLCEHEKMTATDLQKLLGFTKKDGWRVGKNVKSGIKGFTTRLLLREALGDKYDTERFLKFDIPMHDTGLFCEETGEIYKEISPSIEQQPLYRLWHLIYSVQDPEELKKALEKQFGITDDEVVQRLFKIDFVKPGYANKSHKFIRRILPMLMNGYMYSEACAVIGVNHSHSLTKTEQELRPLQSRLTLLQKNELRQPIVEKILNQMINVVNALLDKYGNIDEVRIEMARELKMTKEERNDADKRNRDNERQNSAFAQRIKELGITPTRTRIQKYKMWEESQHQCFYCGKMINVKEFMTGADFEIEHIIPRSVLFDDSFSNKVCACRECNKSKNNRTAIEFMESKTTAELEAYKNRVDEAYQSKRISKTKRDHLLWHMSDIPADFIDRQLRQSQYIACKAMEILQTICREVHATGGSITDFLRHQWGYDEILHTLNFQQFKSVGLTEVRESDNRERICNWSKRMDHRHHAVDALTIAQTSPTYIKRLNTLNASREIIHDEIKQADAILRNNEKRSMLAAWVQTRNHISVKEATQMVDSILISFRAGKKVTTPGKRYTYEQGKRHLAQAGLLIPRGQLTEETVYGITKDNQFVVRYPLATIDSKTVGDIVDPTIRHLVEARLQAFGGKSKEAFAMPLYSDPAQTMAIKSVRCYTGLKESSMTPVQFDSEHQPVGYSKTGNNHHVAIYQDAQGKFQEIVVPFKQAVQRKQMGLPVVIEEPQAVLEQLKNTNTPKDFLETLPHDDWKFVISLQANEMLILGMEDADYQKAIQDADYHTLNKHLYRVQKLATKNYCFRYHTETSVDDKYNGEKNEMLSKQMKKLILIQSLDRLWMEHPHKVQINLLGEIVPL

SEQ ID NO: 4031 - protein, 1362 aa, unidentified
  REGION 1..1362: note = Description of Unknown: Cas Enzyme sequence
MESKILGLDLGTNSIGICVRNADKSDNVVEQMEYFSSVIFSSGVGKDKSGEFSYAAERTKYRSTRRLYMSRKYRIWRTLEVLIDNGCCPLSKEDLDRWRKYDKQKGLKREYPVDAREFEQWVRLDFDNDGLPEYSSPYQLRAELMNRQFDFTQPVERYKLGRALYHIAQRRGFKSSKGDTASSTVEDSDEDGLKKSEEERSKDLVAYMQEHNCATVGCAFYEMEQQGLRVRRDNLSMVVRSQYEDEIRKIFAYQKGLDTDSAFCRAILSRKAGEGSIFYKRPLRSQKGSVGKCTLEPTKARCPQSRPEFELFRAWTLINNIRYTSKEDGKEAKPTHELTLEQKKGLFAARFVLARKTFKFSDLKKWLEKDAKIAAVAWNYPDATTVAGCPVVYRLKDILGDEWQTALLNDHYTYEDLWHVGFSADEAEDIHDFVVAKLNGDSELEKKMLHLWKTIAQGYAELSLKAIRNILYFLQKGYIYSDAVVLAKVPDLFGANWADVEESLLREWSSIKDKCAYVRTINKVTNQLISAYRILEPEEQFALHNTDYTLQDDDLLDVKKAAVDVLSKERWKTLAEDEKEQVLTEVAASYQAFFASAERNYLPVYHLTDYLEHFIAEAYVDMLPEKSAKDLQNPDKKTLYHPSAIAMYAPAGYTRYEQDGHLISKRLLGSPATYVFRNPMAMRVLHTLRQKINELIKAGIIDERDTRVVVETAREFNDANVRAAIGRYQKKRESENEGYRKELLQYMPENRITDADIDKMRLWHEQDGRCVYTGKTIELSELLNGDKWEVEHTIPRSLSYDDSLANKTLCDYHYNRYTKKTLLPTELPQADYEGILERIKPWQKKCTALQGQIVTAKNKAKAAATKDDKDRAIRDKHILEMQLDYWRDKVRRFMMQRDALNLGFRHNQLNDTRIITKYAYHFLKTAFNNVTVQRGEMTADFRKAFGLQSIDEKKNRSKHAHHAIDAAVLTLIPSNTKRDEMLDAFYLIQEAERFPKSVTKEEETAAKRKYGYLKTTCKLQGVERLSDYIEENILVQHSKRDQALTPASRCKRVRGKVVLDKNGKPVMQRGDILRGQLHKEAWYGAIAPAILDKHGNMQRDENGRILVDDEKLSFVVRVALTEENFANWDALEKAIVNKQLVPMMKQQFAVDTTLKEALEKGIYMLDGKGKPVNRIRHIRCYASVTNPMPIKSQTYRSKSEYKNTYYAAVGNLMGMAQYVDPATGQSDYQAVALFDVARNRKLGMEDVLPVITDKKGRKFELKTVLKSGQMVLLYENSIDELTAGNANELSQRLYVINGFETDGQKVKLTNHNNAKPDGELGKGESIKSFDHLPERIRCGIRTLKFMAEGLDFQITPKGIVFL

SEQ ID NO: 4032 - protein, 1440 aa, unidentified
  REGION 1..1440: note = Description of Unknown: Cas Enzyme sequence
MKKNILGLDLGSNSIGWALVEQDFDNKQGKILGIGSRIIPMSQDILGDFGKGNSVSQTAERTRYRSARRLRERFLLRRERLHRVLNVMGFLPEHYSTHIDFEKRLGKFIEGAEPKLPWKRNDDGKFSFLFQKSFDEMLADFTANGQDLCIPYDWTIYYLRNKALTQKIEKEELAWILLNFNQKRGYYQLRGEEEEENPNKLVEFYSLKIVDVLADEPQKGKTDIWYSLVLENGWVYRRSSKTPLFDWKDKTRDFIVTTDLNDDGSLKTDKEGIVKRSFRAPDEKDWTLVKKKTEQEISNSHNTVGTFIYQALLKNPKQKIKGKLVRTIERKFYKDELKQILNKQKEFHPELQSKDLYHDCVRELYRSNDAHQLTLSKKDFVHLLMEDILFYQRPLRSQKSSISNCTLEYRTYKDKDGLEHTEYLKVIPKSNPFYQEFRIWQWIYNLNIYRKDDETNFTSKFLYTTEDFENLFEFLNNRKEIEQKALLKFLLEQKGFRAKMLNAEIDKYRWNYVEDKKYPCNETKTMISGRLEKVENITAGFLTREKEQHLWHIIYSVNDKIEYEKALKSFAKKNNLDEVSFFDAFKKFPPFKSEYGSFSEKAIKKMLPLMRLGKYWSWDNVEKNSKERILKIITGEYDENIKDKVREKSINLTSENHFQGLQLWLVQYIVYGRHSEAAMAGKWNSVDDLTDFLDEFKQHSLRNPIVEQVVTETLRVVKDIWQQFGQGTKDFFSEIHIELGRDMKNNANDRKRITQTVTDNENTNLRIKALLAEMMNDKNVENVRPFSPMQQEILKIYEEGVLNSDIDIEDDILKISKTAQPSSTDLKRYKLWLEQKYRSPYTGAVIPLNKLFTSEYEIEHIIPQSRYFDDSLSNKVICEAAVNKLKDNYIGLGFIKQFGGTVVECGMGKTVTVYKQDAYEEFVKQHYAKNRNKRAKLLLEEVPETMILRQINDTRYISKYISGLLSNIVRAEDGSDEGVNSKNIIPGNGKITTILKQDWGLNDVWNELILPRFERMNSLTNVTHFTAWNENHQKFLPTVPIELSKGFSKKRIDHRHHAMDALVIACATRDHVNLLNNQSARSEKKRYDLQHKLRHTEKWIDNKGEEKDKFTTFKKPWEGFTAEARLALENIVVSFKQNLRVINKATNNYQKIENGKKIEKKQEGINWAIRKSMHKDTVSGKVDLSWVKVPKGKILTASRKSLDTSFDLKAIGNITDTGIQNILKNYLSVKGSPELAFSPEGIEDLNKNIAKYNDGKPHQPISKVRVFELGSKFQVGQTGNKKHKYVEAAKGTNLFFAVYEDENGKRSYNSVPLNEVIERQKQGLNAVPLENEKGDGLLFHLSPNDLVYVPSKDELDNIGQINYYNLSKSQKKNIYKVVSFSGNQIFFVRQEVATVIYDKNEFSSLNKMERAIDGTMIKEVCLKLNVDRLGNILSGVNSKP

SEQ ID NO: 4033 - protein, 1210 aa, unidentified
  REGION 1..1210: note = Description of Unknown: Cas Enzyme sequence
MKHIIGLDAGTNSTGFAVFDENYKLLDSGVDTFPMGNKEEKGIEKSRNAERRGYRGARRNRFRYHLRRAKLQKTLKSLGMLPKFEESMTAFELYQIRKIALEKQVLPTDLGRIFCLFNKYRGFKSSRKETGKDPEKETEEGAIKTEINWLKNRMAVHNCKTVGQYFYKMFEKSLELYERGEWHNPDEPYDERGFGTDNHFSLHQSRGIRREGRHLERALLEDEFDKIWQTQRAFYPDLLTDENFAAIKINCIFYQRPLKSPKKYIGKCHYEKERRCAPASSLIFQEFRVLKQLLDIRLTDKKDPDIFNKPLDDEQRGILFLALQNLDKLSHTKAKELLELPKSIQFNTDEIGKDGLLGNHTRASLREALGVAVFDELQLSNKLENLWHALYMSSDEGWLRQTLSDPQKWAFEEDMVEKLLDINLASGYANYSTKVLNKIVPHLKRGVHEREALILEGYNVEQNALNRPLKNRINDLKNNELRNPVVEKATMRVVRLVNQLIKKHNINPEELTIRIESTRELKKPKQERQKIRSRNLETENRRKAYAAFLTNYGKFGNIYPDSSLINKFELWLELGENQDDLKEFQRFVNDAKSYDLHIEKYRLWLEQGMKCPYTFETIPLSKLMSADIEIEHIIPYSRSMDNSFINKTLCYTEANKQKSNKTAFEFMKDKGTGNLTAFKDHIKKVFAKSPEKQKRFLQEEVPQTFRPDQLTNTSYIARQIKTKLQEVSRDVQFTTGAATAELRRSWRVSGLLEEVMYEEEKGIEMWRHFANKNDEANQTEIQHYREWLAQFGKGKNRTDHRHHALDALVIGLCSPAIVQQISTFHRIREELRLAASDHDGKIYQDNTEYRLPRLHLPKSGIRDALKQILVASQVNQRLLVRQKNHSKKKGGRHMQQVQSVRGALFAENFAGKLKNPANQGLKKKDVFVRRKPLNAKLIPDEKALSKIVDLQIREILRKRLEQYNGKSELAFSEEEMRQNPVYMYSLKDYPNGVPNPSSKKGGALPVIKKVRTIEGNARSFVQIPAKNTEGEIVTTNRYAEKDGNYIMALYELKTTNKKGETKRICGFELLSNAEAVQKRLKSEALFADELTNDKGQTLPLNPLCPNLKKGDFVVFFEDSHTEIQWNDRTDLFKRLYQVTGLSEGIKSKVYLFGYVSFAKHNNSRQNASYESTEYRYTDSLPFLMMSHIQIKAIKVEVNQLGEVTPLVLLS

SEQ ID NO: 4034 - protein, 1408 aa, unidentified
  REGION 1..1408: note = Description of Unknown: Cas Enzyme sequence
MSKKILGLDLGTTSIGWAFITEAENTNEASTIKRVGVRVNPLTTDEQTDFTKGKPVSVNADRTLKRSNRRSLQRYKQRRANLIDALLKNNIIAKENILAEDGKQSTHSTYALRAKAASERIDKEAFAKVLLMINKKRGYKSSRKAKNEEEGQAIDGMGIAKRLYEENLTPGQLCYQLLKEGKKLLPDFYRSDLYAEMEKVWNYQKQYHTDILTDEFRKEIEGKGQRATAASFWGKFKFNTAEIKGTRDEKKLKAYEWRSIAIHTRLNKEELAYVITEINNNINNSSGYLGAISDRSKELYFHNQTVGQYLYNQLLQNPHARLKNKVFYRQDYMDEFEKIWEKQATFHPELTPGLKEEIRDVIIFYQRKLKSQKGLVSFCEFESKKKEEQVNGKLVTKTIGYKVTPKSSPLFQEFKIWQNLNNLLIQNKETKEIVPFDTATKQFLFNELNIKGNLSQDRILGILGYNSKEWALNFSTIEGNRTNQALYEAYLNVLELEGYDMKELLKINADKDEVKLQDLNVPVFDIKKIVHDIFEVLKINTAILEFNAELDGKAFEKQPSYQLWHLLYAYEGDNSLSGNDKLYNLLQSKFGFSLSHAKILANVTLTDDYGSLSAKAIRNIFPFIKENKYSEACMLAGYNHSSSLTKEVNESRTLKNKLELLPKNSLRNPVVEKILNQMVNVVNAIIDDPELGHPDEIRIELARELKKNAKERAEMTAAINKATAEHEQIRSLLMKEDGIKNPTRNDIIRYKLYQELKNNGYKTLYSNTYIPRERLFSKDFDIEHIIPKALLFDDSFSNKTICVRKENLEKRDRCAYEFIGETQLEEYRSRVDMLYQINLKSPGEGINKAKYKKLLMKADEIGKGFIERDLRDSQYIAKKARELLLEICHTVVPTTGSITDRLREDWDLVNVMQELNLEKYRVLGLTEVVEKKDGGTKIRIVDWSKRNDHRHHAMDALTVAFTKYSFIQYLNNLNAKKAEDKKGKEIYAIEQKETEYNTNKDGNRKRRFKSPLPHFREEAKKHLESILVSCKAKNKVVTKNKNQYKSGSKEKSKIELTPRGQLHNETVYGKIRQYATWEEKISAKFNETMIQQVASEKYKKALLQRLKENNNDPKKAFTGKNSPDKNPIYIDETRNEQLPPKIKLVELEDNYTSRKEITPDNFKDEKSIEKVIDARVRDILKERLKAFKGNAKAAFSNLDKNPIWLNEKKGISINRVTISGIKNAEALHYKKDHLGQFILDVNNNKIPVDFVSTSNNHHVAIYRDETLNLQEKITPFFEAVERSRQGLSVIDKTFNQHLGWKFLFTMKQNEYFVFPGEGFDPKEVDLMNPANNKIISAHLYRVQTISIVKYGNNTIRDFKFRHHLETSVADKNELKDIAYKQIKSLAPLENIVKVRINHIGQVVKVGEY

SEQ ID NO: 4035 - protein, 1384 aa, unidentified
  REGION 1..1384: note = Description of Unknown: Cas Enzyme sequence
MKKILGLDLGTGSIGWALINEAENELERSSIIKLGVRVNPLTVDELSNFERGKTITTTADRTLKRSMRRNLQRYKLRRANLIEILKENKFISDETILPESGNHSTFETYRLRARAVVEEITLEEFSRVLLMINKKRGYKTSRKAKGQDEGQLIDGMSIAKQLYKESVTPGQLCLQLLKSGKKYLPDFYRSDLQNEFDRIYNLQKEFYPEILTQNLKDQLANKNEKATWAICEKPMKLVGIKRVRKGPEIRLENYKWRARAIFVKMELEQLAVVFQKINGQLNSSSGYLGSISDRSKELYFKKQTVGQYLMARLDSDPNASLTNKVFYRQDYLDEFNILWEKQAQFHKKLTDELKNEIRDVVIFYQRPLKSQKGLISFCEFESKQIEIESDGKLRTITVGNRVIPRSSPLFQEFKIWQTLNNLEVFPKGRSSRRNTSTKMITSQTKSGERRNLDQEEKNLLFRELTVRDELSKADVLKLLFNNHSELDLNYSRLDGNKTLTAIYKAINEIIEVSGHEKLNLDKLSADEITSSVQSILTTLGCNPNILQFDSETNLDKQPSYRLWHLLYSYQGDNSNTGIGGLINKISGLCGLEKEYAKILTSITFQDDYGSLSAKAIRKILPYLKAGNGYDLACGYAGYRHSKASLTKEETAEKVLKHNLEILPKNSLRNPVVEKILNQMTNVVNAVIDEYGKPDEIRIELARELKKNAAEREELSRMLNEATRAHEKIKKTLQDEFKLSHVSRNDIIRYKLYKELETNGFKTLYSNTYIPREELFSKEFDIEHIIPQARLFDDSFSNKTLEKRDINLEKGDRTATDFIKDKYGEAGLEDFHIRIESLLNKNGIGISKAKFNKLKMSDKDIPEGFIERDLRNTQYISRKAMGMLGEIVRTVVPTTGSITEKLREDWQLVDVLKELNWEKYKALGLVEYYEDRDGLQVGRIKDWTKRNDHRHHAMDAVTIAFTRPVYIQYFNNVNARYEKNSIAYSIEQKYFSDRKVKPPIPVNEFRSEAKKHLEAVLVSIKAKNKVVTKNINVTSKRKGENRKIQLTPRGQLHLETVFGSNKVPVIKDIKIGGAMNEELINRVTRSDYREVLLKRLTDNSFDPKKAFTGKNSLEKQPLYIDELQTKMVPEKVRILFFEPVYTIRKQVAPDLNVEKVIDHKIRKILQDRIKSYGDAKKAFSNLDEDPIWLNKEKGISIKRVTISGINKAQALHEKRDKEGNPILDSEGRNIPVDFVNTGNNHHVAIYRDADGELQENVVTFYEAVTRANLGIPIIDRELRSSEGWSFLFSMKQNEYFVFPNVKSGFNPGQIDLLNPGNYSMISPNLFRVQKFTVKDYFFRLHLETTVVNNNNLKGVTWLRGGPVILKDVVKVRVNHIGNIISIGEY

SEQ ID NO: 4036 - protein, 1658 aa, unidentified
  REGION 1..1658: note = Description of Unknown: Cas Enzyme sequence
MAIKKILGLDIGTTSIGYSIIKVSNNKNLISDKLAISDINNDRIGIFENVIGVRIINQDTDRFDRGLKLNDPKGSTLTPTANRRKFRGVRRMRNRYKLRRNKLYKVLSILGLTPDESYFTNKKGKRGKDNDIGKALYGLRERAAREKITLSELARVLLHLNQLRGYSSDRFAKDEETKFDYYLTEVVTLDWENRIAVFEKGSTEDVKYYQFKAKLRFIEPYVIDEDDEKNILYEIEGYIFKKDIDFKVGDFITIKAPEFKQNKKGKVVVEEYYKITPTKPDATDWKYKYQTLHKNLSDWCKAGGTVGSYFYKNFYESSTLSRIRNNVVNREWYENEFDAIWSLQYEFHKDFFEKIDVSNLVKDVFKDYSTVLNDVIGKTGNKAQLQTLIKDKIIFFQRPWQQAKSKGRCEFEKIKVKREFAIKGTGTKELREEHIGRTVVPRSHPIFQDFKVWQQINNVRLIWNTADEKINLFENAELFEKLTAKKIEEVKELLFKRLQGSKTLSWRTFVKEELGLDTYDEIEEKRKAKLSKKQGFDFETGEVVDEFFSVNFRKRKRDGTYDDIKLKGNTTKAELQNILKEKPAEWFEALHDQNKKATNLQLLWEIIYDITNSDVSKVSSIIKKHFGFVEDVCLTLAKVQFDDSGMANLSAKAIRNLLPLMSDGKNYSKITKAKVDELITLNKSETDIDTDEKLNGLKDFITDRRARIRLSKLTSENEFKYLNYWEAAAIVYGSHSSKGNSQAGIMKKVHPHSMNNPIVEKIVNETISIVNELKKEYGFDEVRIELSRELRASADERQQMWEAMSNGAAKNEWAKKMLREIKQAMLEDDRDVSQLDTEISGSNLDKIKIIEDVVKYQKPVEFKTKEKEYKLTEPSNAEVTKYLLWLEQNFKCPYTNQPIPLTDVFARGKVVEIEHIIPRQRYYSNAYANKVITWREVNQEKGNKTAYEFIVSKRNPTGTVKVGKKEISLVLASQWENHVKEMFPKSGKRNNLLRKEIPEDPIERTLKETQYINKKLKEKLGELVGSDKVWVTSGAITDILREKWKLNDIWKELVEERFVKFNNGETKDRLNLKYTTKHYNNKTSQYEDVEKFAGMSKRIDHRHHALDAIIIACTKQNHIQYINNLNAINSADIENDDSKKAKYKGIKTDVCIGDSSSKFKFPWDENKFIPEVKEALQNVLISHKNSNVLISPSKHRNNKGINSGKVAAVRGELHLQTNYTKKKYFENEKIDIVKLIPLLFKKKFENQNQTLVRFKSFDKIIKETVLKEKYQNVLISLFEDYDVEKLNTKTVKYFSKKVLKKIEDQKLFIHEKSGEKMTWLSIFTEKNASVRPMGLSMDLNSEKEIKDISNPRLRRIGQYRLNYINKKIAKIKALKLPFKEEENARIREIREIPLYNNAIYEVRIKLKDGKHNWVEIKDLQYSDLENIEYAKHETTIAIKNKLKEFSLDELKETYISNPIFLSEKPTIVKKARQKSFFQDLYELNDGRYVYSRDVFMTYVFVPEDSNRKDAKRELEFLKFFDAVKIVTLEKPDKIDYQNLIKKEGRKLLFTLSKNDIVYLPDEILTDEQIAEINWENRSEIIPKLFVVKEMPASLGKIVFQHLYKCDSIKVNGDEAMNVLNTEKLEEEIKYGDANMWKRCIKVEIDKLGKGITPFWQKA

SEQ ID NO: 4037 - protein, 1374 aa, unidentified
  REGION 1..1374: note = Description of Unknown: Cas Enzyme sequence
  MOD_RES 1362..1365: note = Any amino acid
MKKILGLDLGTTSIGWALVYESENADEKSSIVRLGVRVNPLSVDEKGNFEKGKSITTNADRQQTHGARINLQRYKLRRENLKDCLQKQGWIGTEALYEEGKTSTFETYMLRAKAAEEEISLHELCRVLFMLNKKRGYKSNRKANNKEDGKLFDGMTVAKKLYEEHLTPAEYSFQLLSSGKKFKQEYYRSDLKEEFDRIWNEQQKYYPEILTDDFKQQLQGKSKGNTSKIFLGKYGIYSADLKGLDRKLQPLKWRVEALKQKVDKEVLAFVISDLNGQIASTSGLLGAISDRSKELYFNKQTVGQYLWTSLKESPHVSIKNKPFYRQDYLDEFEKIWETQATYHKELTPELKQEIRDIIIFYQRPLKSKKGLISVCELEQRKVKVTIDGKEKEISIGPKVAPKSSPMFQEFRIWQNLNNILLIDKGNNSNRPLYEEERNLLYEELSVKEKLSKAEALKVLNKNSKQWDLNYKEIEGNRTQAVLYDCYNRIIGMTGHEECNFKKLKASEIRSDVQTIFTSLGFNTDILEFDSSLTGHELERQPSYQLWHLLYSYESDNSRTGNDALLRKLETAFSIPKEYAAVLSDVVFEDSYGNLSVKAMRNILPHLQAGLDYSQACEEAGYKHSRRSLTKNELDQKEYKEKLELLPKSSLHNPVVEKILNQMINVINAVIDEYGKPDEIRIELARELKIGAAERENMTRSINQGNAENKRIREILEKEFALSYISRNDIIKYKLYEELKSNGFKTLYSDTYISKDKLFLKDFDIEHIIPKARLFDDSLSNKTIEARDVNIAKSNKTAFDFISEKYDQQGIEAYKKKLDILLQDGSISKAKYNRLLMKEADIPSGFIDRDLRDTQYIAKKAYEILSDLVRNVTPTTGAVTSRLREDWQLVDVMKELNFEKYQKLGLVEVIEDRDGRKIKRIKDWTKRNDHRHHAMDALTIAFTKPSYIQYLNNLNARSDKNSSIYGIENKELHREDNKLRFNAPLPINEFRAEARRHLKSILVSVKAKNKVMTQNVNVIKTKHGVIKKVQLTPRGELHNATFYGTKKRPIIKMVKVGAALDEVTIKKVSSSFIREALLDRLHEYNGDAKKAFTGRNSIDKNPIYIDEEHKKTVPALVKTIEWEMYHPTRKLISPDLKIDKVIDKGIREILKTRLAKFNGDAQKAFSNLDENPIYKDEAKKITLKRVSLEGVSSVIPLHTFKDREGKPVVGKDGKPVLGDYVQTSNNHHIAFYMDENGNLQDNVVSFFEAAERKSQGVPVIDKNYNHDKGWHFLFTMKQNEYFVFPNEVTGFNPSEVDLTDEANYSIISPNLYRVQKMSKASGRDYWFRHHLEAMLNDDPKLRNSMFKRIKSLKALEGIVKVRXXXXWENSCSRGI

SEQ ID NO: 4038 - protein, 1300 aa, unidentified
  REGION 1..1300: note = Description of Unknown: Cas Enzyme sequence
  MOD_RES 765: note = Any amino acid
  MOD_RES 1032: note = Any amino acid
MKKILGLDLGTTSIGWALVYESENTDEKSSIVRLGVRVNPLSVDEKGNFEKGKSITTNADRQQTHGARINLQRYKLRRENLKDCLQKQGWIGEEALCEEGKASTFETYMLRAKAAEEEISLHELCRVLFMLNKKRGYKSNRKANNKEDGKLFDGMTVAKKLYEEHLTPAEYSLKLLSSGKKFKQEYYRSDLKEEFDRIWNEQQKYYPEILTDDFKQQLQGKSKGNTSKIFLGKYGIYSADLKGLDRKLQPLKWRVEALKQQVKKEVLSFVISDLNGQIASISGLLGAISDRSKELYFNKQTVGQYLWTSLKESPHVSIKNKPFYRQDYLDEFEKIWETQAIYHKELTPELKQEIRDIIIFYQRPLKSKKGLISVCELEQRKVKVTIDGKEKEISIGPKVAPKSSPMFQEFRIWQNLNNILLIDKGNNSNRPLYEEERNLLYEELSVKEKLSKAEALKVLNKNSKQWDLNYKEIEGNRTQAVLYNCYNRIIEMTGHEECNFKKLKASDIRYYVKTRFKNLGFSTDILDFDSSLQGHELERQPSYQLWHLLYSYESDNSRTGNDALLRKLETAFSIPKEYAAVLSDVVFEDSYGNLSVKAMRNILPHLQAGLDYSQACEKAGYKHSRRSLTKNELDKKEYKEKLELLPKSSLHNPVVEKILNQMINVINAVIDEYGKPDEIRIELARELKIGAAERENMTRSINQGNAENKRIREILEKEFALSYISRNDIIKYKLYEELKSNGFKTLYSDTYISKDKLFSKDFDIXAKSNKTAFDFISEKYDQQGIEAYKKKLDILLQDGSISKAKYNRLLMKEADIPSGFIDRDLRDTQYIAKKAYEILSDLVRNVTPTTGAVTSRLREDWQLVDVMKELNFEKYQKLGLVEVIEDRDGRKIKRIKDWTKRNDHRHHAMDALTIAFTKPSYIQYLNNLNARSDKNSSIYGIENKELHREDNKLRFNAPLPINEFRAEARRHLKSILVSVKAKNKVMTQNVNVIKTKHGVIKKVQLTPRGELHNATFYGTKKRPIIKMVKVGXHKKTVPALVKTIEWEMYHPTRKLISPDLKIDKVIDKGIREILKTRLAKFNGDAQKAFSNLDENPIYKDEAKKITLKRVSLEGVSSVIPLHTLKDRGGKPVVGKDGKPVLGDYVQTSNNHHIAFYMDENGNLQDNVVSFFEAAERKSQGVPVIDKNYNHDKGWNFLFTMKQNEYFVFPNEVTGFNPSEVDLMDEANYGIISPNLYRVQKMSKTSGRDYWFRHHLEAMLNDDPKLRNSMFKRITSLKALEGIVKVRINCIGKIVAVGEYD

SEQ ID NO: 4039 - protein, 1032 aa, unidentified
  REGION 1..1032: note = Description of Unknown: Cas Enzyme sequence
GKDQYPYRWNYVEDKEYPCNETRVEILKGLGKCGVDVNFLTKEQEMQLWHILYSVEDKIEIGKALKKYAEKNSLPESFADVFAKIKPFKKEYGSYSEKAIKKLLPLMRMGKYWKADDIDANTKDRINKIINGEYDEKIRTRVREKAINLTNENHFRGLPIWLACYIVYDRHSEAKEIEKWESPEDIDKYLKDFKQHSLRNPIVEQVVTETLRTVRDIWKQEGNIDEIHVELGREMKNPADKRKRMTETIQQNENTNLRIKAMLMEFMNPEMGIENVRPYSPSQQDILRIYEENALDNLTKDDKEFEFVSKISKTAQPSKSDIVRYKCWLEQKYRSPYTGEMIPLAKLFTSAYEIEHVIPQSRYFDDSFSNKVICEAEVNKLKDRQLGFEFIKSHKGEKVQLSQGKTVEILSVEAYEKFVKDHYSSNRTKMKKLLMDDIPDGFIERQLNDSRYISKLVKGLLSNIVREKLPNGDYEQEAVSKNLISCNGSITDRLKKDWGMNEVWNGIILPRFRRLNELTGKDVFTAISAEGYEIPAMPLELQKGFNKKRIDHRHHAMDAITIACATRDHVNLLNNEAAHSRHNANRYQLQRKLRRFEKTMINGQEREVAKEFLKPWDSFSIDAKKALENIIVSFKQNLRVINKTVNMYESYKDKDGKLRIGENGLPKKGLIRQEKGDSWAIRKSMHKDTVFGEVNLRFKKQVSLNEALKNPRCIVNAEFKNDVVKWLKLGMDVKAIKKLVEGQKDVWSDIDVKKIWVYYFTKETNDRYFATRKPLDTSFNEKKIKESVTDTGIQKILLAHLEANNGNVELAFSPDGIDEMNRNIVTLNNGKFHQPIQKVRVYEKADKFAVGQKGNKSTKFVEAAKGTNLFFAIFSSEKLNKETGEMESVRSYLTIPLNVMIDCQKKFGSQWRDNIEAYLKGNNLVSSDVKLLFILSPNDLVYLPTKEELKNGIKVVDKKQIYKMVSCTGVEGHFAPARIANPILQTTELGSNNKAQRAWTGEMIKEICVPLKVDRLGNIVELNGQKTIGRTE

SEQ ID NO: 4040 - protein, 1471 aa, unidentified
  REGION 1..1471: note = Description of Unknown: Cas Enzyme sequence
MKKILGLDLGTNSIGWAVVNEAEHVDEQSSIVKIGVRVNPLTADELSKFEEGKSITTNAYRTLKRGMRRNLQRYKLRREHLLALLKEKGFISEETILSESGNRTTFETYRLRAKAATEEISLEEFARVLLMINKKRGYKSNRKAKNTEEGQLINGMEIAKRLYQENLTPGQLCWQLLQDGKKSLPDFYGSDLQSEFDKVFEFQRQYYSFLTDELKKELSGKNDKAVWAICAPSKEKESSDEKFVWKWVETVTEWDEETSANQTVEKVKTLEGLKREGNTAERKRENYEWRSRALEEQLSPEQLIVVFQEINKQINNASGYLGNISDRSKELYFTKQTVGQWKMKKLDEDPNHSLKNKVFYRQDYLDEFEKIWETQAKYHSELTPELKKEVRDIVIFYQRPLKSQKGLISICELEGKQMEFEKEGKNKLVTIGPKVCPKSSPLFQEFKIWQRLNDVQVVNAEGERRFLNQNEKNVLFEELNYREKLSKTETLKLLFDKKHKEYDLNFEGLDGNRTQSELFKTYQKIIEMTGHGEYDFSKMSAKAKVELVTEIFEGLGFNTEILTFDSSIKDKKEFEQQPFYQLWHLLYSFEGDKSVLGNEKLIEKISEMYGFDKESATVLAGVIFQPDYGSISAKAIRKILPDMMRGDNYSTACEKAGYNHSKRSLTKEELEKKVWKDKLDLLPRNSLRNPVVEKILNQMINVVNAVVDAYGKPDEIRIELARELKKSAKERDELTKAINNTKKQHDVYTKKLQEEFGLTHVSRNDIIRYKLYEELRSNGYRTLYSNTYIPREELFSKKFDIEHIIPQAKLFDDSFSNKTIEARDVNIKKSNMTAWDYVVLTNNEGYANNEYKNRVEKLFADKIISKSKRDKLLMREVDIPSDFINRDLRDSQYIAKKAREILEGMVKFVVPTTGSITDRLREDWQLVDVMRELNWDKYDRLGMTYYEQDRDGRQIPKIKDWTKRNDHRHHAMDALTIAFTKRSFIQYLNNLNARVQKGVDEWIDLDTVELSKLDKEQRTSVVYAIEKKELYRDSHGKLRFNPPNLTNNRDIEQQLSQFRREARRQLENVLVSIKAKNKVVTRNVNKAKNKSGEYKMQLTPRGKLHLETVFGSQNRYVTKEEKVNASFDAEKIKTVAVKRYREALVARLAQYGGDAKKAFTGKNTLDKNPVWVNAQQSEKVPEKVKTVEFEKIYTIREEVTPDLKIDKVVDAHIKKILQNRLAEYGGDAKKAFSNLEENPIWLNKERGISIKRVTIERMGNYIALHDKRDKNGNLTLDENGKKLPVDFVSTGNNHHVAIYRKPVLDKNGLPVLNENNEVEYELDEKIVSFYEAASRAMLGLPVVDKEYRKSEGWQFLFTMKQNEYFVFPRYESYIDSEGKEAQRMIFNPTEYDEAWYKNPENYALISPNLFRVQKFSYKNYVFRHHLETTIDLSEYNLRGTTWVDFRSSKWLDKILKVRVNHIGQIVSVGEY

SEQ ID NO: 4041 - protein, 1744 aa, unidentified
  REGION 1..1744: note = Description of Unknown: Cas Enzyme sequence
MTKNILGLDLGTNSIGWALVEIDHDNKTLKIIGLGSRIIPMDGQEFSKFNAGQKVESAASKRTILHRTRITKERYLLRRDRLHLILNLMEALPKHYKINIDFEKNGQKSGQFKNGQEPKIAYLPTKDSENKYDFYFEDAFNEMIADLQEVNPEIKNEKKKRVPKDWTIYFLRNKAMSEKISLEELAWVLLSYNQKRGTDPSEIENDNDKSGEVKEYLDLKVINIESKSDDSGNYFEITLNDSENFKYKEYSDEQLTFVDDVKEVYKILKLDDAGNIISNKTVYQINDLYNLTLSSIEHMAIDDKKAKHKYDFNYTNGWRIEKKKEKFDFTYQKLQKQIQDEHKVITELFVISNRFDFNGKPESIIPNIKLPDFSSEGSKDWTLLKKKTEKDIVSYNISQGFTNEDGGAKHFISPKIYNVLKNDVKTGERTKIIGGLFQTIDRKFYREELSQILKTQEKFHTSTLDNEEIFEKCVKLLYPHNQEHSKALLENKNALTNLLVEDILLYQRPLKSKKSEISDCKYEVDYWKEDVNKNTGEVIEIPIYKKAVSASHPLFQEFRIWDKIHNIKLIQLESKDSEGKSETNVDITSKYFKSDDYQALFNHFNSRSTVSIDDFLTFCKDRFKLDIGKKGERKILWNYPAEEEFKGNETRKSFEIRFKRCGFEGFHEFMTQQKEIDLWHYLYSTSSGERKKTSETKDDTNPKFGKTSIFNFFNKYFRDVNVSFEVIDKLCRDFGNYPKFTSKYSSYSVKALNKLLSIMRLGENFLTSEIVNEKWQEKYTERVKTVLSKINEVDWSSNSIDLSKVILNNVSVKGGEISFPKGLFSTFKKFETIEDFQFLNLTQASYFIYGRHSELAQAKYWNSPDKIREEIMTELKHHSLNNPTAEKVLKETMKVVADVWEYYGNSQEKFFSEIHLEVARELQKSNKEKKDITDRQKNSRAENNRLRNILEEFLNNSSYNAKTGNKDHFERLKIVEDGAKIRSYSEKDFYSNNKDKFSRNDIEAILKKQKITKADFEKYKLWIEQGYKSPYTDRIIKLTDLFDGNKYNVDHIFSRATISNDSLNNKVVCEREINKEKSHLTGREFVSSYQEKEIYTVAHGNVKVISEENYVNLVKSQFSDSKRMILLAKDIPSGFTESQLNNSKYIARKAMELLSHIVREEGEVEFRSKNVIPVTGGITDRLKKEWKVNQIWTELLTSRFERLNKIHNSEDFGNYNISKSGHQYFDINTKAILEKNDKFDLKRLDHRHHALDALIIALCTENHVQYFNNINSGITNNKKGKREAIQKQRAGIKRQIMYSEKDKENPKETVWRYMLPGSFREKEFINNEKDSVVDLLWENNYSIKESKDYRKTILQSLENCVVSFKNDFKIVSKSSNKYESYYDKEGNLRLDKNGKPQKDFVSQKNENHKHWSIRKPLHTDNPSAEITLQFDRLKLIENLGKADLIIDEKIKDAVKEILGIHDGKIGEAKKYVILNPITIDDKVIQYTDFKISNTKYRKRQPITSLSIRTGTGALPTYDSVVDRINKIADLVLKNDLLKHLRINENDIDKAFSIEGINEFNSNRNIPVYRLPISESATLKFRIGSKNSNIHKWVETGGNFHFKITENDNSRTYETIPLRVALTIDKKNIIEKQNTDNDSEIILSPNDLVYVPLKKNEIVDFNNLTIQQKKRIYKFISCTDKEAHFVPYSNSLEIIKNENGTNSKNERIQDFFDGNILRDEKGKLIQVKSVCLKLDVDRLGNISKA

SEQ ID NO: 4042 - protein, 1431 aa, unidentified
  REGION 1..1431: note = Description of Unknown: Cas Enzyme sequence
MNENILGIDPGTNSLGMALRNILLGENLIDQLEYLSVDIFDAGTNSGISHAAERTQHRQPRRLYDTRRQKLWATLQLLIDYKLCPMKQESLDQWKTYDKKRNLFRKYPIEDVALDKWIKLDFDGNGIQDYSSPYQLRKELVEKQYDFSNDIDRYKLGRALYHIAQHRGFKSSKGETFSGEKEKEKEKNLIDISEEGIIQSMEKSEMKISKDLEALRQAKKFKTAGQTLAYLEEHGTRIRGGIYKPIRSMLMSEIREIFEFQSELDTSSELFRRLISTKKGDGTIFYKKPLKSQRGSIGKCTLEPQKARCPIGHPEFEKFRAWSLLNNIHYRTSPNEDWQELSFELKQEILQKLFLARVKVDFSFEEIRVFIEKKIGHILTGKGNKRLINYRDEQSISSCPVTARMIKIFGENWNEWEMAGNKERCSHSNKSLSHQVKYDAMDIWHVCFNADDKESIKEFAQNRLNWDEKQSKLLVQLWGAIPQGYAMLSLKAIKRINKMLLRGLKYSDAVLMAKLPDIIGENETEEFISTHLQTIKGFVNHEKIINQIANSLIANYKSLPEKYIFAYNDFNYKLDNSDKKEIEKQVIGFFGKEKWALMTFEEQQPIIVDVTQKYQNFFNDLKRKFYTSTPLLDKIKEKLKELYPEIQDKALDSIYHHSQISLYNVDRKSTDKSQSRLKSPNIGSIKNPTILRTLHILKRKINAMLDAGLISTEYTRIVVELSRQLNDANRKWAFNFYQEERKKEREKAKEILSEYYPNRAINELDIDKALYIIDQKEDIQLTNGKGETYKQKEDQEKILKKYKVWLEQGCQCMYTGKIINLTNLFDDNAFDLEHTIPRSLSFDNSDKNLTVCDAHYNRTIKKNQLPTQLPNYEHDAEIGGTIYKAIKPRLKHWEERVKHISKNIEIWKSKSRYAQDKERKDSCIQQRRLWELELDYWKEKLRRFTMTEVPEGFRNSQLVDTSIIAKYTTLYLKSIFNKVEVNVGVTTSDFKKILGLQHIEETKNRDLHSHHAIDVAVLTTIPIAAKRQRMLELFYQIQEAKVGFHDCYEKEKELKDELNACRIGNKNNEIVEYINSNLLINHKKKDNTFIPARKRIKMRGNNKNNKEVERWATGDAVRGRLHNTTFCGAIHLPQGKDKDGKFVYGQKPNDFTIVSRVNVNSKSFSSKKDLEKIIDPSLKAMISTILEKRIATGCGFKKAIDEDMWMLDQNGNEIKQDRNGRPLSPIRHVRCKVKMGRGFMTFEKSLEIKKHLNLSKKALINLDNRDHKKLLYAVNDTNYMLLLYEGEKKGVIVRKSRIINLLDAVNIKKEYSSSNLELTLKQNKQFSEIIDKGVSYHLKYLLKTGIRVLLWKESPQEIYASKKDIKELSRKLFIVKNFNNQRSDYVYLSHHLNAKNGDKGIDERFVPNEMNFLVEHVDFEIDDLGNIKFYD

SEQ ID NO: 4043 - protein, 964 aa, unidentified
  REGION 1..964: note = Description of Unknown: Cas Enzyme sequence
LTIISFKSYFSLEKFIRNVYYNGYLLNNIRIRTPHDDTPRRLNAEERTTVTPLFMRKSKSMFDFEDIAKKIAGRKNAYAYDGDRNGAPYRFNYRMSDSVAGCPTIATLRDIFGEDYITAICSRYTLADGKTPERIIDDVWHVLFSFDSKDKLKQWAADRLQLSDDDAARFAEISPKQGYASLSLNVIDKILPYLRDGYRYDEAVFCANLKAVLPAGVWNDESRRREIIGQVAAIVADFRPNPYMKGDTKQNRIEEYLSRCGIEADMRRLYHPSKTETYPDARPNADGTIILGSPRTSAVRNPMAMRALFRLRALINRLLDEGRIDPSTKINIEFARGLNDANMRKAIEQYQREREREHDRFADEIRNLYLETTGRQIDPSEDDILKYRLWEEQKHICLYTGRQIGITDFIGPDTTCDIEHTVPRSRGGDDSQLNKTLCDNRYNRDVKRGKLPSELPDHNAVMARIETLGWEQKIEDLHKQIGRAVRNAKNAATKENKDKAIQQRHRLKMQLDYLSGKYERFIMTEVPEGFANRQGADIGIIGRYARLYLKTVFDRIYTVKGATTAAFRKMWGLQDEYSKKERTNHVHHCIDAITIACIGRREYDRWAQYAAEEEYYRCCNGNKPVFDKPWPTFTEDVRAATDELLVPHNTPDNMSKRTRKRLRKRGAVQRNAAGEVKYATGDSARGSLHKETFYGAIEHNGEIKYVLRKRVADLTNEDVGKIVDEAVKQKIKDAIDKFGFKAAVSGTIYMNEEKRIPINRVRIFTPTVKSPIKLKKHRDLSTKDYKQNYHVVNDRNYCLAIYEGTDKKGKLKRTFEMVNNLEAAGYFKSSADRTSRPDLVPQSDADGNPLKYIFKTGTMVLFYENSPAELYDCSTKELSARLYKLTKFSSMTSGNNSYGILVFRHHREARPAKEIKGKNGTWKNGEEYRPLISTLHTQLNVLVEGYDFELTVTGDMIFKNTSHA

SEQ ID NO: 4044 - protein, 1231 aa, unidentified
  REGION 1..1231: note = Description of Unknown: Cas Enzyme sequence
MNTRILGLDTGTNSLAWAVVDRDAKGNYTLVRRGDVIFTEGVNVDGQPVSSKAAVKSKYKSLRVQYARRRLRKIDTLKVLVSLDLCPYLSDEQLSQWKAKKTYPLTDDFMLWQRSGSAEENNPYYCRYRCLTQKLDLTDQSQRFLLGRAFYHLAQRRGFLSNRLDTTADSAESGKVKSGIAQLSVEMEKAGCTFLGEYFYQLYKQHGNTVRLRSRYTDREEHYIKEFLAICEKQELDAQWVEKLQRALYFQRPLKSQRKGVGKCTFEPKKPRCAESHPDYETFRMLCILNNIKIKTPKDVSLRPLNAEEREKVWPLFFRKSKPNFDFEDIAKALAGKNNYAWYKDAGEKPFRFNYRMHQGVPGCPVTAQLIDLFGPDWKAGIAETYMAVEKKNGTKTIDEMAGDVWNVLYSFSSKDKLKAFATDKLQLDEARATKFANAKLPHGFAALSLKAIRNILPFLRQGFIYAHAVLLAKIPDIVTAAVWDDADKRQQILSGLLEVIENYNPNDRGIEGTIDFCIKSHLQDVVDLRPGAADALYHPSMIEAYPDAKLNKMGVFQLGSPRTNAIRNPMAMRSLHILRSVVNQLLRDGTIDRDTEVHVEYARELNDANKRKAIADYQKDIERKRADYRKRIIELYKEECHKEIEPTDTDILKFQLWEEQNHKCLYTDSEIGICDFLGDNPKFDIEHTIPRSVGGDSTQMNLTLCDAMFNRQVKGARLPSQLPNHADILVRIAPWKSKCEDLRKQLDKIRTFSGMAKEKKDSQIQKRHRQKMELDYWQGKYERFTMTEVPEGFSRRQGVGIGLISKYAGLFLKSLFHSADNPNKSNVYVVKGVTTAEFRRMWGLQGEYEKKSRLNHCHHCIDAITIACIGKAEYDKMAQYYHDEEVSRWHGSAGKPQFKKPWPTFTKDVLALEQSLLIKHLTKDNMPKQAKRRVRTAKGKHLAQGDAARGSLHKDTYYGAIEQEGAIRYVLRKSLSDFNRESELENIVDQAVKEKIKAAVAGKNFKAAIAEPIFMNKEKGIRINKVRCYVKAKERLKIRQQRDLSTKEYKQFFCVENENNYLLAIYEGELKGKKERDFCVVNNLDAAAYLKRSNKGKAAPLVPERSAERNLPLLAVLQRGTQVLFYEDSPEEILFDNPQDLVRRLYKVVGIGTKRVKTGGKLYSYGEVKLRFHQNAQKDDDVKYVSGEYKNNEEQYQGIILLHTQFKALVEGIDFEFNILGEIKKKEHHA

SEQ ID NO: 4045 - protein, 1225 aa, unidentified
  REGION 1..1225: note = Description of Unknown: Cas Enzyme sequence
MNTRILGLDTGTNSLAWAVVDRDANGNYTLVKRGDVIFSEGVKIEKGKESSKAAERTGHKSLRVQYARRRLRKIDTLKVLVSLDLCPYLSDEQLSLWKAKKTYPLTDDFMLWQRSGSAEENNPYYCRYRCLTQKLDLTDQSQRFLLGRAFYHLAQRRGFLSNRLDTTADSVESGKVKSGIAQLSVEMEKVGCTFLGEYFYQLYKQHGNTVRLRSRYTDREEHYIKEFLAICEKQELDAQWVEKLQRALYFQRPLKSQRKGVGKCTFEPKKPRCAESHPDYETFRMLCILNNIKIKTPKDVSLRPLNAEEREKIWPLFFRKSKPNFDFEDIAKALAGKNNYAWIKDAGEKPYKFNYRMHQGVSGCPVTAQLIDLFGPDWKAGIAETYMAVEKKNGTKTIVEMADDVWNVLYSFSSKDKLKAFATDKLQLDEARATKFANAKLPHGFAALSLKAIRNILPFLRQGFIYAHAVLLAKIPDIVTAAVWDDADKRQQILSGLLEVIENYNPNDRGIEGTIDFCIKSHLQDVVDLRPGAADALYHPSMIEAYPDAKLNKMGVFQLGSPRTNAIRNPMAMRSLHILRSVVNQLLRDGTIDRDTEVHVEYARELNDANKRKAIADYQKDIEHKRADYRKRIIELYKEGCHKEIEPTDTDILKFQLWEEQNHKCLYTDSEIGICDFLGDNPKFDIEHTIPRSVGGDSTQMNLTLCDAMFNRQVKGARLPSQLPNHADILVRIAPWKSKCEDLRKKLDKIRTFSGMAKEIKDSQIQKRHRLKMELDYWQGKYERFTMTEVPEGFSRRQGAGIGLVSKYAGLFLKSLFHSADNPNKSNVYMVKGVTTAEFRRMWGLQGEYEKKSRLNHCHHCIDAITIACIGKAEYDKMAQYYHDEEVSRWHGSAGKPHFKKPWPTFTEDVLALEQSLLIKHLTKDNMPKQAKRRVRTAKGKHLAQGDAARGSLHKDTYYGAIEQEGEIRYVLRKPISKFEKESELENIVDQAVKEKIKAAVAGKNFKAAIAEPIFMNKEKGIRINKVRCYVDSVRNPLHIRQQRDLSDKEYKQQFHVVNDNNYMLAIYEGEVKGKVKRDFVLVNNITAASFFKRSNRRKNAETLVLKTSPKGNLPLLVMLKIGMQVLLYEKSSEEIKFDSPHDLVKRLYKVVGLSIDGSCIMIDLRHNQEARQAKDVKPKKGAYMGNEQFRPCIRLRHTQFKALVEGIDFEFNILGEIKKKEHHA

SEQ ID NO: 4046 - protein, 1462 aa, unidentified
  REGION 1..1462: note = Description of Unknown: Cas Enzyme sequence
MTKNILGLDLGTNSIGWALINQDFQNKQGEILGMGSRIIPMSQDVLGEFGKGNSVSQTASRTGYRGVRRLRERFLLRRERLHRVLNLLNFLPENYASQIDFEKRFGKFKQETEPKLAYNKGGFIFKNSFNEMVSDFKIHQPKILENDKKVPYDWTIYYLRKKALTQKIEKEELAWILLNFNQKRGYYQLRGEEEEDNLNKLVEFYSLKIVDVLADEAQKGKSDIWYSLILENGWIYRRSSKTPLFDWKDKTRDFIVTTDLNDDGTIKTDKDGNEKRSFRAPSENDWTLVKKKTEQEIDQSHKTVGTYIYETLLQNPKQKIKGKLVRTIERKFYKDELKKILEKQKEFHQELQNDDLYSDCVRELYRNNEVHRLTLSKKDFVHLFMEDTIFYQRPLRSQKSSISNCTLESRKYKDENGVERTQFLKAIPKSNPYYQEFRLWQWIFNLNIYERDNEDNVTKEFLNTPKDFENLFEFLNNRKEVDQKALLKHFKLNEKSHRWNFVEDKKYPCNETKTMISSRLDKVENISDDFLTREIEQKIWHIIYSVNDKVEYEKALKSFAAKNNLDENSFVDAFKKFPPFKNEYGSFSEKAIKKLLSLMRLGKYWNEDKILKYSDDYFKNIESLLGVLKQRDENISDDDRQNYNKTINNKLREELENFQNAEIESFQGLRLHIAQYILYGKHSEGDNKKFNSADDLEEFLKDFKQHSLRNPIVEQVITETLRVVKDIWLKYGNGAKDFFNEIHIELGREMKLPADDRKKLTNQISENENTNLRIKALLAEMMNDGEVENVRPYSPMQQEILKIYEDGVLNSGIEIEDDYLKISKTAQPSPSDLKRYKLWLEQKYKSPYTGQIIPLNKLFTPEYEIEHIIPQSRYFDDSFSNKIICESAVNKLKDNYIGLGFIKKFGGTIIELGFGKNVKIFEVEQYEDFVKKHYASNRGKRNKLLLEEIPEKMIERQMNDTRHISKYISGVLSNIVRAEDGSDEGVNSKNIVPGNGKITTTLKQDWGLNDVWNDLILPRFERMNQLTNSIDFTAWNENHQKFLPTVPIEVSKGFSKKRIDHRHHAMDALVIACATKDHVNLLNNQSAKSDTKRYDLKKKLMKFEKVAYNDAKTGERIEREVPKLFLKPWENFTVEAKNSLETIIVSFKQNLRVINKATNYYEKYVDKDGVKTKERVEQTGINWAIRKSLHEETISGKVDLPWVETSNGEFITATRKSLDTSFNLEKIKKITDTGIQKILKNYLEAKDNNPEVAFSPEGVEDLNKNIENYNEGKPHQPIIKVRLYEKGKGRFALGQTGNKVNKYVQGSPNLFFAIYRDENGKKSFESIRLDIAIERLKQGLQAVPETNSNGISLYQNLSPLDLVYIPTEDESDSIHLIDFSTLNKARLERIYNVNDFSGYTIYFSQNSFAKNIYPKEMDMTWNEKKQKSSGSFDSKTASYNKKSIKDIFIKLKIDRLGNISKA

SEQ ID NO: 4047 - protein, 1390 aa, unidentified
  REGION 1..1390: note = Description of Unknown: Cas Enzyme sequence
MSKILGIDLGTNSLGLTLREDDIFSWYGVYIFRKGVGEGKSGEFSLAAERTKHRSSRRLYNARRYRKWETLSVLAKFGFCPLSEDNLKKWRNYQKGAGRVFPVNDADFDRWIKLDFDGDTKPDFSSPYQLRRFLIQEKLDLSQKEDRYKIGRALYHIAQRRGFKSSRKNGANEKTAVYKGSSETKTIGRNDYENLIEENGSLGAAFAHLEDQNIRIRNRYTLRSDYQNEVHKILEFQKVSDNDFIEKVDKAIFFQRPLRSQKGLVGKCTLEPNKSRCPVSHPKFEEYRTWSFINNIKYRTEKNHQFQPLPIELKEKLYNEEFFFKSKRELKFSDIRKFIQLNGGKDWELNYNHRMDEISVPSCYVSARLKATFGEDWESFEKKVTRKNKKGEDETKTYAIEDIWHILFSFEDEEYFTEFLENVLELNDEQIKELSILFNNFPVGYANLSLKAINNILPFLKEGLIYSEAVILAKIPEIIGKEIFVANKSSILNAIESEIEENRFQKTVMSIVNNLIFKYYARGVDEKYPWKAVDYKIDEYDYKEIEKTAIEHYGEKTWSKLEADFKQRILDDVAKLYQDFFASSKREHFKPPHLVNQIKIFLGDKFHVSAKLLDKIYHPSQIDIYPSKEGQEFLESPKTAAFKNPMAYKTLYKLRSVINYLIEIGKIDNETRIVVEIARDLNDSNKRWAIEKYQRDREVENLSFAAAIEELLKDSNFSGYANPKNENDIDKFRIWTEQLENFDEIRTEINAIENNKKISASEKDIMKYRLWKEQNCFCMYTGKPIKLTDLFNKNIIDFEHTIPRSKSFDNSLANLTVCYADYNRNIKKNKLPSEMPNYEEDANGYSAIKPRLLAWEKKVEALQNQIETQKRNSKFAIDKETKDKAIRLKHVLQMEYDYWKNKVDRFTRTEIPKGFINSQLTDTQIITKYAFHYLKTVFNKVDVIKGSQTAEFRKIYSIQPKGEIKNRDKHSHHAVDAAVLTLIPSARNREEILKKSYEFAEQNNNKQYHEKPFPDFSYSMIEEIERDILINNIVDKDQTLTPVIKKVRKRGRVVWLRDKEGKLLLDENGNKIPKIAQGDSVRGELHKQTYYGKIKRALKNENGSLIRDENGNITYNQVDGKDEVWMVIRKPIDSVNFKTDVIIDENIANYLKNQLDNGIKQTELKDFQGNFIRHLRCRVKAARGFMNPDNATIVKEQTYKSKKEYKNYIYADSGENYMFGLYENENGKSIVSFNVLESAQYGKHLEKLTHENLFKSKEPILIGRGKKAKEAILKHVFMLGQKVLLFENEKEELKDLEKNDLSKRLYFVKRLADANAQRILFQHHLEARDDQQLSLDFPKEVFGTKGKDGFSKFSTDFVAPRLLLTPGNFSFIIEGKDFEMKLDGSIEFHF

SEQ ID NO: 4048 - protein, 1234 aa, unidentified
  REGION 1..1234: note = Description of Unknown: Cas Enzyme sequence
MPNFWSIFTENSQTYLMKTRILGLDTGTNSLGWAVVDRDENNQYTPICRGDLIFTEGVKQEKGIEFSLAAERTSYRASRRHYFRRRLRKVEVLKVLVKHKLCPPLSDEALNRWHTKKEYPLDEDFILWQRTNEADNKNPYHDRHICLHHKLNLKDSQTDRYTLGRALYHLTQRRGFLSNRLDNNEEAEETGKVKSAISELCKEMKEAGCEFLGDYFYLLYRTEGNRVRIRSRYTDREKHYLQEFKEICRVQELDKDLAKALEKTIFFQRPLKSQRQDVGKCTMEKGHSRCAVSHPLYEEYRLLCYLNNIRIKTPSDDRLRPLNAEEREKITPLFYQKSNFDFKKIAKKLAGKTPFGWIRDEEDWPYQFNYRMTQEAPACPTTAQLIKVFGEDWKAALAETYTMSAKQDGTLKTEDEICTDIWNVLYSFSSKEKLKEFGLKKLQLDEAQAKSFSEIRLTRDFASLSLKAIRKILFFLRTGEDYSKAIFLANIPTIVGEKIWSNIERRSRLLYKVDLALRPQEEDDAEEHRTIAERIKAAVAAEVPDAPIDLLYHPSMIEAYPDAKRNERFDCYQLGSPKTNAVRNPMAMRSLHMVRKVINHLLRKHIIDEKTEIHIEYARELNDANKRQAIADWQRELSKRHTAYAQNIRQLYKAETGLEIEPTKTDILKYQLWEEQQHVCLYTGKKIGIADFLGANPKFDIEHTIPRSKGGDSTQENLTLCDSKFNRDIKRDKLPTELDNYEEILARIEHWKKQCYALKLKRDGIRTHSGQEKSIKDSKIRRRHLIGLEYGYLKGKYDRFTMKEVPEGFSRRQGAGIGLISKYAGLFLKSLFKDPKNPNRSNVYVVKGAITAEFRKLWGLQQADEAKSRENHTHHCIDAYTIACIGPCEYAALAEYYRSDEEFKYGRRREKPQFEKPWPTFTEDLLKLQEELLIVHQATDKLGKRDRRKVKTPRGKFLTGGDSARGRLHQETYYGAINYDGNIKYVVRKPLDSLTEKDLDKIVDETVKGIVKGAVEAKGSLKEALADGIYMNKEKGILIRRVRIFSDVSEPINLKQLRDVSTKEYKRHIHLRKDENYLFAIYEGLDKKKNKKQTETATVDYLDAAKFYKDSKRRDKANSLVGDYSKKNKLPLKCILKKRQMVLFYEHSPEEIRFKDKKDLSKRLYIVTSIAKDGRVKFLHHQAATATGIQSSPSPFTNDGEHQPYYRLSASNIKVLVAGIDFDINILGEITPKL

SEQ ID NO: 4049 - protein, 1224 aa, unidentified
  REGION 1..1224: note = Description of Unknown: Cas Enzyme sequence
MKTRILGLDTGTNSLGWAVVDRDENNQYTPICRGDLIFTEGVKQEKGIEFSLAAERTSYRASRRHYFRRRLRKVEVLKVLVKHKLCPPLSDEALNRWHTKKEYPLDEDFILWQRTSEADNKNPYHDRHICLHRKLNLKDSQTDRYTLGRALYHLTQRRGFLSNRLDQNEEAEETGKVKSAISELSKEMKEAGCEFLGEYFYLLYRTEGNRVRIRSRYTDREKHYLQEFKEICRVQELDEDLAKALEKTIFFQRPLKSQRQGVGKCTMEKGHSRCAVSHPLYEEYRMLCYLNNIRIKTPSDDRLRPLNAEEREKITPLFYQKSNFDFKKIAKKLAGKTPFGWIRDEEDWPYQFNYRMTQEAPACPTTAQLIKVFGEDWKAALAETYTMSAKQDGTLKTEDEICTDIWNVLYSFSSKEKLKEFGLKKLQLDEAQAKAFSEIRLTRDFASLSLKAIRKILVFLRRGDDYSKAVFLANVPTIVGEEIWDDIERRSRLLNEIDTALRPQEGDKAEEHRTDAERIKAAVAAEVPDAPIDLLYHPSMIEAYPDAKRNERFDCYQLGSPKTNAVRNPMAMRSLHMVRKVINHLLRKHIIDEKTEIHIEYARELNDANKRQAIADWQRELSKRHTAYAQNIRQLYKAETGLEIEPTKTDVLKYQLWEEQQHVCLYTGKKIGIADFLGANPKFDIEHTIPRSRGGDSTQENLTLCESKFNRDTKRDKLPTELANYEEILARIEHWKKQCYALKLKRDGIRTHSGLEKSIKDSKIRRRHLVGLEYGYLKGKYDRFTMKEVPEGFSRRQGAGIGLISKYAGLFLKSLFKDPKNPNRSNVYVVKGAITAEFRKLWGLQQVDETKSRENHTHHCIDAYTIACIGPCEYAALAAYYRSDEEFKYGRRREKPQFEKPWPTFTEDLLKLQEELLIVHQTTDKLGKRDRRKVKTPRGKFLTGGDSARGSLHQETYYGAINYDGNIKYVVRKPLDSLTEKDLDKIVDETVKGIVKGAVEAKGSLKEALADGIYMNKEKGILIKRVRIFTRLTQPLALRSLRDQSQKEHKRKVYVTNEGNYMMAIYEGVIKGKTKREFDLVNNIEAAKFFRKRIGQEQDLPLMPEKSASDFPLKQTLKIGTLVLLYETSPSEIDFSDPKDVAKRLYKVVGLSTLRVSKYTYGIISLRHHQEARPTGDLKFQNKSFKNGEPSLPAMLLLHTQFNALVEGQDFDLDITGEITLKRP

SEQ ID NO: 4050 - protein, 1218 aa, unidentified
  REGION 1..1218: note = Description of Unknown: Cas Enzyme sequence
MKTRILGLDTGTNSLGWAVVDRDENNQYTPICRGDLIFTEGVKQEKGIEFSLAAERTSYRASRRHYFRRRLRKVEVLKVLVKHKLCPPLSDEALNRWHTKKEYPLDEDFILWQRTSEVDNKNPYHDRHICLHHKLNLKDSQTDRYTLGRALYHLTQRRGFLSNRLDQNEEAEETGKVKSAISELSKEMKEAGCEFLGDYFYLLYRTEGNRVRIRSRYTDREKHYLQEFKEICHVQELDEDLAKALEKTIFFQRPLKSQRQGVGKCTMEKGHSRCAVSHPLYEEYRLLCYLNNIRIKTPFDDRLRPLNAEEREKITPLFYQKSNFDFKKIAKKLAGKTPFGWIRDEEDWPYQFNYRMTQEAPACPTTAQLIKVFGEDWKAALAETYTMSAKQDGTLKTEDEICTDIWNVLYSFSSKEKLKEFGLKKLQLDEVQAKAFSEIRLTRDFASLSLKAIRKILFFLRTGEDYSKAIFLANIPTIVGEEIWNNIERRSRLLNKVDLALRPQEEDDAEEHRTIAERIKAAVAAEVPNAPINLLYHPSMIEAYPDAKRNERFDCYQLGSPKTNAVRNPMAMRSLHMVRKVINHLLRKHIIDEKTEIHIEYARELNDANKRQAIADWQRELSKRHTAYAQNIRQLYKAETGLEIEPTKTDVLKYQLWEEQQHVCLYTGKKIGIADFLGANPKFDIEHTIPRSKGGDSTQENLTLCESKFNRDTKRDKLPTELDNYEEILARIEHWKKQCYALKLKRDGIRTHSGLEKSIKDSKIRRRHLVALEYSYLKGKYDRFTMKEVPEGFSRRQGAGIGLISKYAGLFLKSLFKDPKNPNRSNVYVVKGAITAEFRKLWGLQQVDETKSRENHTHHCIDAYTIACIGPCEYAALAAYYRSDEEFKYGRRREKPQFEKPWPTFTEDLLKLQEELLIVHQTTDKLGKRDRRKVKTPRGKFLTGGDSARGSLHQETYYGAINYDGNIKYVVRKPLDSLTEKDLDKIVDETVKGIVKGAVEAKGSLKEALADGIYMNKEKGILIKRVRMFTRVSDPIKLKQLRDISSKGYKQHIHVNKEENYLIAIYEGLNKKNQKQTETYTVDYLDAAKFYKDSKRRDKTNNLVSDYSEKYKLPLKYILKKRQMVLFYEHSPEEIRFRDKKDLSKRLYIVTCIEKDGRIQLLHHQTANTGGIKPSSSPFTNDGEHQTFYRLRASKLNILVAGVDFDINILGKITSKLQ

SEQ ID NO: 4051 - protein, 1399 aa, unidentified
  REGION 1..1399: note = Description of Unknown: Cas Enzyme sequence
MKNILGLDLGTNSIGWALIDNDDKRIVGMGSRIIPMGTDKQDYERGVGITKNADRRTARTIRKMNKRFKMRRNKLLFILNELGMLPDQFKFKNSIPPATKLQELELLPIKKGTLQLDSTQQYELRVKAFNNKIDLKEFGKILYQFNQLRGYAGGNHVDENITNKSFDSSEEETEKKTYEVITKKVFIKEVEKTDGTFKSKGGPNKGQELPIFNITIVFEDEEKEGTTFLQNLETGKEEELEIRIKQTKKGENIIFALPQKTNWRKNMEEDEDTLKKNNWTIGQYRLNDLKEIKWKKIRNRVFLRKQYQKEFDIIWNEQEKHHSLLNNCPKEKLFIIANYLYPGTKESQTKLRNQAIEGGLFHIIRNQVIYYQRPLKPQTELISNCSFEKDQKVLPESHPLFQEFRCWKQINNMFITSKVESYNERNKKTNYKYYDRYLTNEQKNELYLKLHSQKQVGFAEVSKIVALKNDRTEYLNGLNPKAKLKGCDTKLSIKQCLGEWYEALNNEDSHILEKIWYVLYNTTGNEYDERSEKVSTLIKVLEIFIKRSDAVEFSLKLAQKINYPRKYCKFSAKAIENILPLMMLNPKNIHSTVLCEYDKIKYIIETGDVTDNVNIEPYMIDYINNNPNIIETGGMMDSFAISLVYGRHTADIIKPTITTYHQIQYNPTRNLRNPVVEQLSNEIMQVIKSIWKQYNLNPKDLEIRVELARELKNSAAEREKIYKSQRTNQTHNEWIKNRMHEHKIPITDENILKYKLYEQQKYISPYSGATLTVCSFDKYEIDHIIPKSRLFDDSISNKVLVEGFLNEEKSNRTSWEYITHQTTNYKIYSVESYLKTVNEKFCGKKKRNLLLEKIPTDFIERQIKETQYISVAVRNELAKIVGSTNVKTTTGEVTSFLRSSWGLKKLFMELTEERFKQMELWDNSKQWVKKYYDKEQNKNIYEIEHWSKRYDHRHHSIDALVVALTDQGHIQRLNNLNKELQDWLIKHKDEIKLDVNEGETFIEAFFNLEENRRITIQKKIEGFRKFENPFDDLVKQAKEKLETMIVSHKPKDSLSIQYNIKTKKKELKIRGALHEATLYGKHNGQDTKTINISNLTPKDILKIVDKGKSVLKKEIENHWKKYDSMKEAFSGEGLKNFNNERGANNKPPVYKVKVYYNNKEVIESSLQRLYENNDKLSVKTGGNYLFIVMNKTNKDGVEERVYDSVSLFDSAQIAKEEWKNKNENFVQKILDLRLKEKNAFEVLFTLQQNELVYMPENIEDPVLNITSQEFKDWLSVIENKVLFAKRIYKVVKFSGNDCYFIPNSYANTIEIPRDFAEEEILELKKKYGEKKLPNKEKNFVEFGSNGNSSKFIVNEDYVKSLKDKNYKYNPIKIIDHCIKLKNDWLGNITEVNGKKINFQ

SEQ ID NO: 4052 - protein, 1239 aa, unidentified
  REGION 1..1239: note = Description of Unknown: Cas Enzyme sequence
MKKILGLDLGSASIGWALISENDENGVVKREILGMGSRIVPYEGTEGKDFEKGTGESRNFTRTKMRTARKGYDRYQLRRKYLADALVNSRMFPDEVEKNLSKNQLWQLRNNAVTSKVSLKELGRLLLWLNQKRGYKSGRSEANMDKKDTEYVAEVKSRHQHIQELNLTIGQYFYQQLAADHFFRVKENIFPREAYIEEFETICKQQQLHYPDVVTQEFIQKLRDEIIYFQRPLKSQKGLVSVCDFEGFWHKTDEKKEFFVGPRVAPRSSPLFQLAKTWEIVNSISIENKYGSKIELTLDEKNALFNHLDNNGKLTKTDIQNILGLKKDDCFFNKQITNGIKGNVTKVAIRSCFDKPEKYNHLFKFDFDIIKSDALSYLYDKDTGEILDEKNVKFIDPKIENEPYYRLWHTIYSISDIDECSKVLQSNFGIEEGIADKLSRLDLTKGGFGNKSAKAIRKILPYLMEGYVYSDAMSFAGYNHSNSLTKDENIQRKLLDKLKPIPNNSLRQPIVEKILNQMVNVTNAIVDEYGKPDEIRVELARELKQSREERSDTSKFITKRERENAQIVKKLEEFGLRATRNNIVKWRLYEEMDNEDKKLNAICIYCGQPISITETIKGNDVDIEHIIPKSKLFDDSQSNKTLAHRRCNSDKGDRTAYDFMKGKSEQVLAAYVDRVNKLFTSKVIGKAKRDKLLMTGKSIPDNFISRQLRESQYIARKAREILQTICLNVWATSGMVTSELRHLWGWDDVTMNLQFPKYKQLGLTEIREWDSEHGKNKHSKEVVAGWSKRDDHRHHAIDALTVACSKQGYIQRFNTLSSSKTREDLKRIVDDRSIEYREKLNLLQKYIVSEQPFSVKQVEDKTANILISFKAGKKVAVTGKRKVGKRGHKKVVQTGIIVPRGALSEESVYGKIKKVERNKSLKYLFENPAQIVNPRIKHLVEQRLNEFNDDTKKAITSIKKSPIYLDDDKNVILEHGSVFSDEYVIKYTVDTNFNKVDKVVDGYVKQILQQRLEKFNGKPKEAFKDVQHNNKILKWYEDEGLSRPIRSVRCYTGLSAVVPLRKDDNGREIGFVKPGNNHHIVIYSDAEGEMVEHICTFWHAVERKKYGIPVVISNTNEVWDMVQQQPEGTYSESFLKLLPEPNLTLEISMQQNQMFVLGMTNEEYENAKAESDYSLISDKLYRVQKLAEKNWVFRHHLETQIVDDANAQNSKRYISVRSIGALYSLNPIKVKVSCIGNLV

SEQ ID NO: 4053 - protein, 1538 aa, unidentified
  REGION 1..1538: note = Description of Unknown: Cas Enzyme sequence
MKKILGLDLGTNSIGWALIERDFTNKKENTLGEGKILGMGSRIIPMSQDVLDKFGQGQSHSQTAERTSYRGVRRLRQRGLLRRERLHRVLNILNALPVHYADKIDFQNKKGQFINNVEVKLNYKETENKKFEFLFKDSFNEMADEFEQTGQETRIPYDWTIYYLRKKALENKISLQELTWVLINFNQKRGYYQLRGDEEEEDKNKLIEFHAIKVTNVTADEPNLKNEIWYSVFLENGWVYRRKSKESLNNWIGKTKEFLVTTTLNEDGTVKTDKEGEDKRSFKAVNSEEDWIAIKKSTEEKIENTKQFVGTYIYNTLLKKPSQKINGKLVRTIERHFYKEELIAILKKQTEFHRELQNDRLLEECILELYPNNYAQQNILKHKDFINLFVNDIIFYQRPLKSKKSLIDDCKYENRVFKNKEGELITKPVKAIHKSHPLYQEFRLWQFVDNIRIYERAKTIKGKMISDFDVTHDFIPDEKAKVELFEFFNNKAKIKQKPFLTNYTDMYGKKLSESEYRWNYVEDKEYPLNETRALFISRLSKDKKFDIKSFLTRENEIKLWHLLYSISDKKELENAFNNDNFKLNIPKELRQEFKRIKPFANDYGALSEKAIKKLLPLLRAGKHWNYDDIDGKTKDRIQKIINAEYDEKIRDRVREKAINLQTKNDFKGLPLWLASYIVYDRHSESSEDIKWKHPQCIDAYLKEFKQHSLRNPIVEQVITETLRLVRDSWMYYAEKNNGSFEIKKNELTEKEEKHYARIFDEIHIELGREMKNPADMRKSMTAQINKNQDTKERIRALLREFKAENIEGVIPYSPSQQEKLKIFEEDILNKYTEKELEKETYEGVNIAKITKSSDPTSKEIQKYRLWMEQKYRSPYTGNVIPLSKLFTTEYEIEHVIPQARYFDNSYGNKVICETEVNKFKGNQTAFEMISKNPGRKIELGMGNSVSLLSLETYQDFISQNFRKGSKKFKILLSEDVPEQFISRQLNDTRYISKVVKGLLSNIVRTEDEQEATSKNIVAVTGSVTTILKHDWGLNDKWNEIVRPRFERLNHITNTKDFGYFDEKSNFFRTDVPKELKKNFNKKRIDHRHHAMDALVVALATRNHVSYLSNEHAKSDKKRYDLRNKLRIVEEIKRGENTIKVSKGFFTPWQNFSVEAHNTLENIVVSFKQNLRVINKASNKYQIRKNDKIEFETQKGTNWAIRKPMHKETVFGRVNLRLKKAVAINFAIDNNPILVDKKHNSLVKKLRKDGYDNNYIKKTFKDLKISKVDIYQFDNGYSAVRKTVNEDFKSAKWIHESVTDTCIQTILINHLKKYNEIDEKGVTRERPDLAFSPDGVEEMNKNIVDLNNGKAHHPIYKARVYEILGNKFQVGYAGNKKDKYVEAAKGTNLFFAIYQGKNKKGEKVRQYDTIPLNIVIERQKQGLSSVPEKFSDKDGIEFGLIFTLSPNDLVYVPTLEEQDNINSVDFNNLKVTQKKRIYKVVSFTGKRLYGIPYNVAKSVFDKKEYTQLNKLESTDEKYSIKETCIKLTVNRLGNIVKVG

SEQ ID NO: 4054 - protein, 1422 aa, unidentified
  REGION 1..1422: note = Description of Unknown: Cas Enzyme sequence
MKKILGLDLGTTSIGFAHVLEAENPAKSSIEQIGVRIIPLSTDEETDFAKGKPITINADRTLKRSMRRNLDRYQLRRSNLIGLLKEHHIINEQTILAEHDKNSTHSTYALRALAVSEQITKEDFARVLLAINKKRGYKSSRKTRNEEDGQAIDGMETARRLYEDDITPGQLTLQLLQEGKKHMPDFYRSDLQAELDKIWYFQAQFHPDILTPEFKKQLEGKGQRATSAAFWGTFGFNIAENKGRREEKKLQAYTWRVRALTEKLSAEEVAYVITEINNDLNKSSGYLGAISDRSKELYFKKQTVGQYLYARLKKNPHTSLRNMVFYRQDYLDEFERIWEKQAQFYPELTFDLKKEIRDMVIFYQRKLKSQKSLVSFCEFESREVVIEKEGQRTKKRIGLKVTPKSSPLFQEFKIWQVLQNLEFKNKKSREILKPDQEARQLLFEELNMKGNLSSAKILEILGYKPEDWEANYSVLEGNRTNKAIYDVLLRIMELEGYDEDLLKPAKNDDLDIALLSATSKELKAMFSSILSALEIDVSILDFNAELEGKDFERQASYQLWHLLYSYEEDQSVSGNEHLYKLLAGKFGFRREHAVLLSGIRLADDFGNLSAKAIRKIYPYIRENGYSQACEQAGYRHSASSLTKEEIENRPLQDKLDLLKKNSLRNPVVEKILNQLVNVVNTLIESNSKKDKDGNITHYYRFDEIRIELARELKKNAKERQEMSIANNEAKRKHDAICKILINDFGISNPSRNDIIRYKLYEELKNNGYKDMYTNTYIPREILFSNQIDIDHIIPQARLFDDSFSNKVLCFRHNNLKKGERTAIDYIESEFGSEATDDFIERIKHLRECNKKNSEEGIGNTKFMKLQKRISEIGDGFIERDLRNSQYIARAARNLLLSITRNVVATTGEVTARLREDWGLVNLMQELNMDKYRAVGLTAMVMKKDGTSRERILNWTKRNDHRHHAIDALTVAFTKHSYIQYLNHLSARKNEAHKMHVHIFAIEAKETEQIVDDKGNKKRQFILPLPRFREEAKLHLEQVLISYKAKNKVVTKNKNKVKTSGGTKIKTELTPRGQLHKETIYGKYRYYESKEEKVSAKFDTDYIQMVADPKHRMLLLKRLQENGNDPKKAFTGKNALAKNPIYTDETQSQTLPEKVKLVWLEEDFAIRKDLTPENFKDQKSIDKVIDVAVRNLLSKRLAEYGGNAKEAFSNLDKNPVWFNEEKGICIKRVRISGVKNAGALHFKKDHLGQLILDENGQHIPVDYVSTGNNHHVAIYRDADGKLQDNIVSLFEAVERSIQGLPIIDKTLNASEGWNFLFTMKQNEYFIFPDEKTGFDPNEIDLKDPDNYARISPHLFRVQKLSKVSYGNSSVREYAFRHHLETNVEEPKELKDITYKYVKSLPHLENIVKVRINHIGQIVKVGEY

SEQ ID NO: 4055 - protein, 1335 aa, unidentified
  REGION 1..1335: note = Description of Unknown: Cas Enzyme sequence
MTYNKAEGLYRKYPMEEAFEQWIKLDFDGDGVSDYSSPYQLRAELMERQFDFSLEIERMKLGRALYHIAQRRGFKSSKGETIAEQENDKKESADIDSIDVAAAMKKSETKLAGEITGYMEKHGLKTVGQAFAQLEREGQRVRNNPLYKGVRSLYMSEINEIFRFQEGLDPNGSLHEHLLSTKKGIGTIFYKKPLKSQKGNIGKCTLEPNKDRCAVSHPAFERFRALSLLNNIKIKTSADSEWQQLPIKVRDTLYSQLFTSRVKSDFKFKEIREKIEKLMGLRLSAELNTRTINYKDTQSVSGCPVTARLIKLLGEDWETATIDGSKMRTTHGSKSPNTLHRVSYTALDLWNICFNCDDPEEVDEFAAKRLQWDEEKTSALKKLWASISQGYAMLSLKAINNINKMLELGLVYSDAVMMAKVPDITHATPEQMGEIGIAYNEIKQNANSDKLIYSIVNSLIATYKSLSYEERFAHKDYEYTLQESDHKDIEQHIIDNVGAHTWANMDADEQTHIISSVTRLYQQFFADHNRDFYKMPRIEAYMKRTMATMFPNVDAKQWDKLYHHSQISVYKPQGDMSDSDRSNWRLGSPNLGSIKNPVALRTLNVLRRKINAMLDAGMISPTETRVVVETTRSLNDANMRWAIEQYQREREKENNEIKVILTELFAGRDINQTDVDTARYALEQTGNDLFDKNKNFSKLVKKYKLWLEQGFTCMYTGKVINIAQLFADSEVDIEHTVPRSKSFDNSDANLTVCVAHYNRAIKKNHLPTEMPNYEHDAVIDGQTYTAIKPRLEKWIARVEQLKNNVDFWKSQSRRAQTKDRKDQCIRQRHLWQMELDYWRNKLERFKMTEVKQGFRNSQLVDTGVITRHAVMFLKSVFTNVEVQKGSVTADFRKMLGIQELDEKKNRDMHSHHAIDAATLTAIPTAAKRDRMLELYYRLCEAKAGGHDYSAELAVLERERRSCNLGNDAGAIVQFIESHIIVNHHTKDQTFATCHRRARIRGKVVTYRDKDGNTREKWKTGDAIRCRLHEETYCGAIKMPVQEGDGIDAKPVIKDGKFVYDDTLSMVTRVDITSFTKPEDLAGIVDHTLRAQLRNIISQRMSQGMKFTEAIAQDIWLLDKNGNEIKHDKNGRPLRPVRHVRARFKVGRGYFTRKSALDIRSHTHTSTKALVNVENRDYKHRIYAKNDGNYLFLLYEGIKKGQLKRQSRIVNYYEVSLLMKNGLIDGSIEKTVMGSNEYSHMERAGVNYALSAIIKVGTRVIMWNESPDEIKDLSKEELSKRLFVAYKFNYKGADVVFIRSHINNAEVKELVPNAMNCLIEHRDFEITALGDIVLYD

SEQ ID NO: 4056 - protein, 1399 aa, unidentified
  REGION 1..1399: note = Description of Unknown: Cas Enzyme sequence
MTKNILGLDLGVSSIGWAYVQEDSKNYENSKIIKLGVRVNPLTVDEQLNFEKGKPITTNAGRTLARSARRNLQRFKLRRANLIDVLKKNYILKESDLLAEVGKNSTFQTQELRAKAAKEKIELSEFARVLLLINKKRGYKSSRKAKNEDEGQIVDGMAVAKKLYEENITPGEYSYQLLQQGKKQLPDFYRSDLQDEFDKVWNFQKQHYSEILTDDLYKELQGKNKNATWAILKEPFSLVGIKQTGTMQEKKVEKYFWRSEAVKRQLDFESLAVVFQEINSNLNNSSGYLGAISDRSKELYFHNQTVGEYLFQQLKENPHTKLKNQVFYRQDYLDEFEKIWETQSKYYKELTKELKQEIRDIIIFYQRKLKSQKGLISICEFENREIEVTENGKTKKKTVGLKVAPKSSPLFQEFKIWQVLNNLQFQNAETKEIFPIDLDFKQSIFDEVNIKGKLSAKDVLDLVGYSGKEWKTNFKDIEGNYTNESLYTAFLKIIANEGIEFPKEFKLTIDDEIKVSKIIASAEIIKLFVREKFSGLGIDTSVLDFNPELEGNDFEKQASYQLWHLLYSYEGDDSPSGNEKLYELLKGKFGFKKEHSKILAEIGFSQDYGSLSSKAMRKIYPYIKEHKYSVACNYAGYNHSKNSLTKEQLENRVLKEQLDILPKNSLRNPVVEKILNQMINLVNEISKEYGKPDEVRIELARELKLNVEERATMTSEINKATIQHQKYAEVLQREFGIKSPSRNDIIRYKLYLELANNGFKDLYTDVKIERENLFTDKYDIDHIIPQSRFFDDSFSNKVLVPRSANLKKGNFTAFDYLENEGKEKLEKFLNVIKDLYDKGFITKAKYEKLQKKGSEIGEGFIERDLRNTQYIAKKSKEILFGITNSVVSTSGRITDKLREDWNLVNTMKELNLEKYRKLGLTELIANSKGEEKERIIDWTKRNDHRHHAMDALTVAFTTYNHIQYLNYLNARKDEKYKEHQNIFAIENTITEIIEKKNGSKERKFKLPVKNFRTEAKKQLEEVLISHKAKNKVVTKNINKIKKKGSVIAKTELTPRGQLHKETIYGSSKFLKTKEEKISGKFNLETIQKVQNEKYRNALLKRLQEFGGDSKKAFTGKNVISKNPIFLNAEKTEQLPETVTLAWYETGYTIRKVVNPDNFKDFKNIEKVIDKGVRYILTERLKEFNGNSKEAFSDLEKNPIWLNKSKGISIKTVTITGINNAEALNYKKDLLGKEILDKNGQRIAVDFVSTGNNHHVAIYEDENGNLQEKVVSFYEAVERVNQNLPIIDKEYNAELGWKFLFTIKQNEMFLFPSEDFDPREADLFDDKNLSLISKNLFRVQKFGELSKSGFWFRHHLETSVDVKKELRNHSYLDFYSKDFMRNIVKVRLNHLGKIVQIGEY

SEQ ID NO: 4057 - protein, 1453 aa, unidentified
  REGION 1..1453: note = Description of Unknown: Cas Enzyme sequence
MAKNILGLDLGTNSIGWALVKQDFQNKQGEILGMGSRIIPMSQDILGEFGKGNSVSQTASRTGYRGVRRLRERFLLRRERLHRVLNLLQFLPAHYAAQIDFAKRFGKFKEETEPKLVYDANKFIFKNSFEEMLSDFKKHQPQLLENNKKVPYDWTIYYLRNKALTQKIQKEELAWILLNFNQKRGYYQLRGEEEEENPNKLVEFYSLTIVDVVADEPQKGKSDIWYSLILENGWIYRRASKTPLFDWKDKTRDFIVTTDLNDDGSVKTDKDGNEKRSFRAPSENDWTLIKKKTESEIDKSKKTVGTYIYNALLLNPKQKINGKLVRTIERKFYKEELKNILEMQKSFHPELQNDDLYNDCVRELYRNNEAHQLTLSKKDFVHFFMDDIIFYQRPLRSQKSSISNCTLEFRKYKDENGVEYTQYLKAVPKSNPYYQEFRVWQWMYNLNIYLRDDDSNVTKEFLNTTKNFENLFEFLNNRKEVDQKALLKHFKLNEKTYRWNYVEDKKYPCNETKAMISSRLDKVENISNDFFTRELEQRIWHIIYSVNDKIEYEKALKSFANKNNLDEVSFFEAFKKFPPFKSEYGSFSEKAIKKLLSLMRLGKYWNYADIDKYSKDRIQKIINGEYDENIKDKVREKAVHFTTENDFQGLQLWLAQYIVYGRHSEASLIGKWNSADDLEEFLKDFKQHSLRNPIVEQVITETLRVVKDIWIKYGNGAKDFFNEIHIELGREMKLPADEREQLTKQISENENTNLRIKALLAEMMNDHSVENVRPYSPMQQEILKIYEDGILKSNIEIDDDILKISKTAQPSTSDLKRYKLWLEQKYKSPYTGQIIPLNKLFTPEYEIEHIIPQSRYFDDSFSNKIICESAINKLKDNYIGLGFIKQFGGTIIELGFGKSVKVFEAEEYEDFVKKHYANNRGKRNKLLLEEIPEKMIERQMNDTRHISKYISGVLSNIVRAEDGSDEGVNSKNIVPGNGKITTQLKQDWGLNDVWNDLILPRFKRMNKLTNSTDFTAWNENHQKFLPTVPIEFSKGFSKKRIDHRHHALDALVIACATKDHVNLLNNQSAKSDTKRYDLKKKLMKFEKVVYNHTQTGEKIEREIPKQFLKPWDNFTVDARNNLENIIVSFKQNLRVINKATNYYEKYVEKYGVKTKERVEQKGTNWAIRKPMHKETVSGKIDLPWVKVPKGKILTATRKSLDTSFDLKSINSITDTGIQKILKNYLEFKGNSEIAFSPEGIEDMNKNIEKYNDGKQHQPINKVRVFELGSKFQVGQIGNKKDKYVEAAKGTNLFFAVYEDKNGKRSYETIPLNIVVERQKQGLNSVPLENDKGNQLLFSLSPNDLVYVPLEDEILEGNFNLYNLSKEQIQRIYKVEKTSGVECYFVRQDIAFLIKQYDAKTKIGELESQNKLQVTMTEDRIKIADVCLKINCDRLGNINFLTKEKIKQIFNGYR

SEQ ID NO: 4058 - protein, 994 aa, unidentified
  REGION 1..994: note = Description of Unknown: Cas Enzyme sequence
MTFDGQENLKKFALEKLNLDEEKATKFSKIKLQQGFATLSISAIKKILPYLQKGFLYSHSVYMANLYKVLGEGVVSETLTNHFSEEILKILNQDSANRKNSAIVNSLISEMLNDKHRYYISDNRDLDDIEKKAVLKSIVDNYGQESWDTLGEENKSEVINYVSAKYLEFLKKSFFDKKNLFVQPERIDEKIFNFLKETYHVSDDKKKYLWHPSEQENYAEAENYLEYSVGKKKYYVKEKNKDGFAKRNPEAEFKGREIKLLGNPEPLSKGFKNPMALKSLHKLKNLVNYLLQTGKIDEDTRVVIEIARELNDKNKRKAIELWQKAREKENDDYKKELAVYQEQFPHVKLIDENTLIRKIRLWHEQNKMCLYTGKTISFSDLIVGNKYDFEHTIPASISFDNELKNLTIADSGYNRLQKGKKFPTQLINYDSEQVVDGITYKAIINTIEFIFGERTVEYKEEKGKTKKIVKWKKITELEKQFDEWKKKASYASTKDYKDFCIVKYHTLKMDLDYLKSKLATFTITEYKAGWRNNQLRDTQIITKYALPYFKTLFKRVSVEKGGVTDIFKKVYKVQSKDAKKDRSAHSHHAQDAAILTLIPNAFHRERIVKAYEEEIDKRTGKTYHELPLDWETFSENYILELKDKVLINNLTDSKTIAQTCKTVRKRGKIIYDIDENGDKNKRVSSGDTIRGQLHGETFYGAIRQPVRDENNKILFDENKKMILKDEIYLAVRKPLVYKKDANSPGFKTLDEVEKIIVDKDLFKMIKKQVEESDFKTALTEGVFMLDKNGNKVNQIRTIRCYENGLKYTTAIKVHNHSFVSDKEYKKTTLATNGENSYCLFYKSDLGKAMRILSIVDVAELKLKNIEILYNEQEFSSFESGKGKNKIQLPLYSVLKSGDKVLFYKESIHELRDLEQELSNRMFKMYQFEKDGRIKFRHHLAAGIDTELKKDNPEYSSVNFDEKQIFLRLRQGQWNFAIENTDFEMALDGSIKWNF

SEQ ID NO: 4059 - protein, 1444 aa, unidentified
  REGION 1..1444: note = Description of Unknown: Cas Enzyme sequence
MGKKILGLDLGTNSIGWALINQDFENKQGEILGMGSRIIPMSQDILGEFGKGNSVSQTAERTGYRGVRRLRERYLLRRERLHRVLNIIKFLPEHFANEIDFDKRFGKFKSDNEPKIAYNTNGFIFKNSFEEMLSDFKIHLPQLLKNEKGEDKLVPYGWTIYYLRKKALSQKIEKEELAWILLNFNQKRGYYQLRGEEEEENPNKVVEFYSLKIVEVTADEQQRGKTDIWYSLILENGWVYRRASKTPLFDWKDKTRDFIVTTDLNDDGTVKKDKDGNEKRSFRAPAETDWTLVKKKTEQEIDQSHKTVGTYIYDTLLQNPKQKIKGKLVRTIERKFYKAELKEILEKQAAFHPELQNEDLYNDCVRELYKNNEAHQLTLSKKDFVHLFLEDIIFYQRPLRSQKSSISNCTLEFKKYVDKDGVEHTQYLKAIPKSNPYYQEFRIWQWMYNLNIYGKDDDENVTKEFLDSYEDLENLFEFLNGRKEIEQKALLKFLLEQKDFKGKGLTAEIEKYRWNFVEGKAYPCNETKTMIATRLGKVENIADDFLTREIEQQMWHIIYSVNDKIEYEKALKSFARKHYLDENSFFEAFKKFPPFKSEYGSFSEKAIKKLLPLMRVGKYWTYDNIDEHSKVRIQKIITGEFDENIKNKVREKAINLTTESHFQGLQLWLAQYIVYGRHSEASIIGKWNSADDLELFLKEFKQHSLRNPIVEQVITETLRVVKDIWVQYGKGSKDFFNEIHIELGREMKNTAEDRKKITNQVTENENTNLRIKALLAEMMNDVNVENVRPFSPMQQEILKIYEEGVLNSDIEIDDDILKISKTAQPSSTDLKRYKLWLEQGYKSPYTGQIIPLNKLFTPEYEIEHIIPQSRYFDDSFSNKIICESAVNKLKDNYIGLAFIKQFHGTIVDCGLGKTVKIFEADEYEEFVKKHYAKNRSKKAKLLLEEIPEKMIERQMNDTRYISKYISGVLSNIVRVEDGTDVGVNSKNIVPGNGKITTVLKQDWGLNDVWNDLILPRFERMNQLTNSTDFTAWNENHQKFLPTVPIELSKGFSKKRIDHRHHAMDALVIACVTKEHVNLLNNQSAKSDTKRYDLKKKLMKFEKAVYNDAKTGERIEKDVPKQFLKPWGNFTIDAKNSLENIVVSFKQNLRVINKATNYYEKYVEKDGVKTKERVAQTGINWAIRKPMHKESVSGKVDLPWVKLPKGKILTATRKSLDTSFDMKTIGSITDTGIQKILRNYLTAKGSSELAFSPEGIEDLNKNIRQYNDGKEHQPITKVRVFEMGSKFQVGNSGNKKDKYVEAAKGTNLFFAVYEDEKGKRSYESVPLNIVVERQKQGLDVVDLKGTNDFYLSPNDLVYLPSEDEVENLNSIDFTNFSKEMKRNIYKVVSFTGSRLYVIPYNVSVVIMNKIEYSQLNKLELTKEKEICIKLKVNRLGLISRTEKFL

SEQ ID NO: 4060 - protein, 1380 aa, unidentified
  REGION 1..1380: note = Description of Unknown: Cas Enzyme sequence
MKKILGLDLGTTSIGWALVNECEKEDEKSSIIRLGVRVNPLTTDEKGNFERGKAIATNSDRQQTHGARINLQRYKLRRKYLCDCLNKYGWIGSEPMYEDGKSSTFETYKLRAKAAVEEVSLHEFARVLFMMNKKRGYKSNRKANDKEEGKLFDGMSVAKKLYEEHLTPAEYSLQLLNKGKRFTPEYYRSDLVEEFEKIWNKQKKYYPEILTDEFKRQLETKTKTSTSKIFLGKYGIYSADLKGLDRKLQPIKWRVEALRQQVDKDVLAFVISDLKGQIANTSGLLGAISDRSKELYFNKQTIGQYLWASLKENPHISVKNQPFYRQDYIDEFEKIWKTQASFHKELTPELKQEIRDIIIFYQRPLKSKKGLISVCELEQRKVKVTIDGKEKEITIGPKVAPKSSPMFQEFRIWQNLNNIQLIDNERNSKRSLYEEERNLLYEELSIRDRLSKTEALRVLGKKNRQWDLNYKELEGNRTQATLFRCYNKIITMTGHEECNFKQLKAPEIRHYIKTIFKNLGFNTGILEFDSSLNGHELEQQPMYQLWHLLYSYESDKSRTGNEALLKKLETIFGFPKEYASVLAEVAFEDSYGNLSVKAIREILPHLQAGLDYSQACEEAGYKHSRRSLTKEELDEKEYKEKLELLSKNSLHNPVVEKILNQMINVINAVIDEYGKPDEIRIELARELKIGAAERENMTRSISQGNAENKRIREILEKEFALSYISRNDIIKYKLYEELKPNGYKTLYSNTYIPKDKLFSKDFDIEHIIPKARLFDDSLSNKTIEARDVNIAKSNKTAFDFISGKYGQQGIEAYKKKLYILLQDGSINKAKYNRLLMKEADIPSDFINRDLQNTRYITRKAYEILSDLVRVVTPTSGAVTRRLREDWQLVDIMKELNFEKYQKLGLTEIIEDRDGRKIKRIKDWTKRNDHRHHAMDALTIAFTKPSFIQYLNNLNARSNKGDSIYAIENKELHREDGKLCFNAPLPINEFRAEAKKHLKAVLVSIKAKNKVMTQNVNKIKTKHGVIKKVQLTPRGELHNATFYGTKKRPIIKMVKVGAALDEVTIKKVSSSFIRKALQDRLYEYNGDAKKAFTGRNSIDKNPIYIDEERKRIVPALVKTIEWEMYHPTRKLISPDLKIDKVIDKGIRDILKTRLAKFNGDAQKAFSNLDEEPIYKDEAKKIILKRVSLEGVSSVIPLHTLKDRSGMPITGKDSEPVLGDYVQTSNNHHVAFYIDENGNLQDNIVSFFEAVERKSQGIPVIDKNYNRDKGWHFLFTMKQNEYFVFPNEVTGFNPSEVDLMDETNYDIISPNLYRVQKMSRVVYGKSIIRDYVFRHHLETTVEANANLKGLAYKQLKSLSYLEGIVKVRINCIGKIVEVGEYD

SEQ ID NO: 4061 - protein, 1380 aa, unidentified
  REGION 1..1380: note = Description of Unknown: Cas Enzyme sequence
MRKILGLDLGTTSIGWALVNEADNDNESSSIIRLGVRVNPLTVDEKSNFEKGKAITTNSDRQQRHGARINLQRYKLRRQNLRNLLQDQGWLCNEALYEEGKGTTFETYKLRAKAAEEKISLHEFAHVLFMLNKKRGYKSNRKANNKEEGQLFDGMTIAKKLYEEHLTPAEYSFQLLSKGKKFAQDYYRSDLIAELERIWNEQKKYYPEILTDEFKQQLEGKTKVNTNKIFLAKYGIYSADLKGLDKKLQPLKWRIEALKQQVSKEILAFVISDLKGHIANTSGYLGAISDRSKELFFNKQTVGQYLWASLKENPHISIKSKPFYRQDYLDEFEKLWETQAAFHKQLTPELKHEIRDIIIFYQRPLKSKKGLISVCELEQRKVKVTIDGKEKEITIGPKVAPKSSPVFQEFRIWQNINNILLINNDTNEKHSLNEKERNLLYQELSVKVKLSKTDVLKILNKKGKQWDLNYKEVEGNRTQAILFDCYNKIISLTGREECDFKKLQASEIRHHVTTISKNLGFNTDILDFNPSLVKHELEEQPMYMLWHLLYSYESDNSRTGNEALLRKLAIAFGFPKEYATVLCDVVFEDDYSNLSVKAMRKILPYLEVGNDYSQACAYAGYKHSRRSLTKEELDQKVYKERLELLPKNSLRNPVVEKILNQMINVINTIIDEYGKPDEIRIEMARELKSSAAEREKATRAISQANAENQRIREILERDFALSYISRNDIIKYKLYQELEANGFKTLYSDTYISKEKLFSKDFDVEHIIPKARLFDDSFSNKTLEARDINLAKSNKTAFDFVQEKYGTEGAEAYKKKLDILLSKEVISRAKYNKLLMKEADIPSEFIERDLRNTQYIAKKACEILGEIVKTVTPTTGEVTSRLREDWQLVDVMKELNFEKYQKLGLAEIVEDRDGRKIKRIKDWTKRNDHRHHAMDALTIAFTKPAFIQYLNNLNARSNKSNSIYAIENKELHREDNKLKFNAPIPIHEFRAEAKRHLSAILISIKAKNKVMTQNVNKIKTKQGVIKKIQLTPRGALHNETIYGTKKRPIITMVKVGAALDEATINKISNLTIREALLKRLAEYNGDAKKAFAGKNSLEKNPIYLNEEKTKVLPALVKTVEWETYHPIRKPITPDLKIEKVIDKGIRKILKARLAKFNGDAKKAFSNLDENPIYIDEAKKIALKRVSIEGVLSAIPLHTLKDQAGKPIIGKDGKPVLGNYVQTSNNHHIAFYYDENGNLQDNAVSFFEAAERKSQGIPIVDKNYNHDKGWRFLFTMKQNEYFVFPNEATGFIPTEVNLMDEANYDMISPNLYRVQTISKIIYDKSIIRDYLFRHHLETTVERIPNLKGITYKQLKSLPHLKGIVKVRINAIGKIVAIGEYD

SEQ ID NO: 4062 - protein, 1208 aa, unidentified
  REGION 1..1208: note = Description of Unknown: Cas Enzyme sequence
MNKTLGIDLGSNSLGWAVLDETLKQVSAQGVVIFPECIGIDNKPTETPAATRRKYRMARRLKFRRKARKWKLLGILIREKMCPLTLAELDAWKTKGIYPLANKAFLGWLKATDTSNPYCDRARAAEVKVPLETLGRALYHIAQRRGFKSSRKEAPPDTGDEDENKKLMEKAQGVVESGIAELSAAIEKSGAKTLGQYFFRLLEEDRNSPEKRRVRKHYTHRVEHYEKEFAVIMDCQGIPSGSTLRKDLYSALFMQRPLRSQRHLVGMCPLEPQSPRTFAGHPLFEEFRMWAFVNNLKFESPTGEEMPLTPEDRARVAGAFDYGKTTFKFKRITDFFKKDDRFKDYGWNKPEGWHFHHYKDAETLPSRSVGYRLRKYFGSIPYDEQQVVNALMFYEDVDRLIGWLKKHYPALDDAAAKLLASIRPSEATAQYSLKAIKRIVPFLRKGYQLYDATLLAKLPDFIADFDSHEDEICRNLLEIRHRQKEAREAAYSTGEKVVPFLDVFQDYLLTHWGVTEDQFKQLYVLRDSPYKTEKEGRIPAVQLGMLRNPLVQRALTTLRRLVNYLHDHGTIDEDTAIHVEMARSVNNYATRVAWQLWQKKRQEAREEARKTIEEHGCKVTEDAIERCLLWREQDGKCLYTGKSIGIEELLGGNAFDIEHTIPRSKSGDDSLANKTICEARYNRDVKKGRIPQECPNCAEIETRLRPWRENASRLEKDFLSQKAKSKGNPEARAKALAVKFELDYWRDKLRRFEITADKLTDPREGLSKFKNRQLVDTGIMTKHAKALLETVYPRVLMVNGAATAFARKAWGLQPADEAKDRTNHMHHAKDAMVIAALTRARFNAICTALKDDAHAPKRECDVCPAPWDGFADDVRTAAETILVKHVLRRTTLKQSSKQTVLAKPHPDQKHPGRIVKYVHAKGDTVRGPLHKETFYGCIQKPGEDKKSYVVRKSLIGSLKAALKTAKDIVDPAVRDLVKEQLAALKSQNETNVEPGMIKMPSGVPVNKVRVIKGDVKNPQRLRVHAMSSRHDYKTFYYVTVAERSNFRMGVYDNDGKLSVVPDNSLEWAQNHKKTGYKTLDKRPGFIGFVYPGSLALTHATGNAEELHNLPPSELAKRLYKVRNIEGSGRLTLCLHTEARASTQLSADIKEANNHLAPGEMKKSPTGESKIDLKHPHELLRVSSGTYLKQMMFEGIHFKMMLDGTIRFL

SEQ ID NO: 4063 - protein, 1279 aa, unidentified
  REGION 1..1279: note = Description of Unknown: Cas Enzyme sequence
MKKILGLDLGVSSIGWALIDEEENKILGMGSRIIPLTTDDKDEFTKGNAISKNQKRTTKRNQRKGYDRYQLRRQNLTFILKQNNMLPDVGLIKLHKLDLWKLRSDAVEKKLSIEEIGRVLLHLNQKRGYKSSRSEANLDKKDTEYVATVKSRYEKLKEQKKTIGQKFYEELLNNEYYRIKEQVYPREAYIEEFNTILKKQQKYYPEILTDDLISKIRDEIIYYQRKLKSQKGLVSVCEFEGFWSTIKINGGEKELFIGPKVAPKSSPLFQVDKIWEMINSISLKNKIGEQIEIPLEKKNKLFEYMDSHEKLSYAELLKVLELKKDDVYGNKQLANGLPGNKVKVEMMKCFDDLAHYENLFNLEIEIEEKNEEGYLIDKESGEIVNSKQRKIVLPRIEQQPLYKLWHTVYSISDKEECKNALIKNFNLSENAALKLSSLDFTKQGFGNKSHRAIRKILPFLMEGDVYSDACSYAGYNHSNSLTKQENYERKLLDKLKPIEKNSLRQPVVEKILNQMVNIVNTIIDKYGKPEEIRIELARELKQSKEERNNIYNIINANKTINKEISNRLTELGIATTRKNIEKYKFIFPIRTVINKDGKVDSPKLKNAVVFNQCIYCGQSFSLGEALLGNEFDVDHIIPQSLLFDDSNLNKVLVHRRCNSSKLDKTAFDFIRSKGNDQLNEYLDRLHVWYQKGILTYGKLERLKVSHEDYLERKRKKKTNKGDINLWESFIDRQLRQTQYISRKAREILQSICYNVWATSGSITSELRHIWGWDEVLMNLQLPKYRELGLTETIEITNDRNTDKKEIIRNWSKRDDHRHHAIDSLTIACTKQGFIQRFNRLNSGKVRNDIMKEIDSVKYNFDKRKNLLENYILSVRPFTTKEVEKEAEKILVSFKPGKKVASIGKRKIKKGGKKIVAQIGIIIPRGSLSEESVYGKIKTIEKEKPVKYLFENPELIFKPYIKNLVEERLGLFNNDVKKAVASLKKEPIYLNKDKTKILEYGTCYKEEVVIKYPLGAGQGMLFDGKESEEKALKVLSFVIDDAIKEKLKNKLYDKDGNYLKTRDAFKDLENNPVWYNEELKIPIKTVRCLTGLSAVEPVKKDENGKEIGFVKPGNNHHLAIYIDEQGNKQLSICSFWHAVERKKYGIPIIIKNPIEVIDKILLDEDKYSEGFLEKLPDSKWIYLESFQQNEMFVIGMNEEMYEEASSNNDYKAISNYLYRVQKIFYNGEQMEIFFRHHLETQLNDDNNSKLSKRFYQIRGLSKLESLNPHKIKLNHLGEII

SEQ ID NO: 4064 - protein, 1460 aa, unidentified
  REGION 1..1460: note = Description of Unknown: Cas Enzyme sequence
MSKKILGLDLGTNSIGWALVEQNFENKYGKILGMGSRIIPMSQDIIGEFGKGNSVSQTAERTRFRSIRRLRERYLLRRERLHRVLNVLGFLPEHYAAEIDFEKRLGKFLDESEPKVAWKKNNEGKFEFLFQKSFAEMIEDFKSSGQEIKIPYDWTIYYLRKKALMAKIEKEELAWLILNFNQKRGYYQLRGEDDEIPSNIKEYVELLTVVKIEKGEPDKKNNKKYWYNITLNNGWVYSATFSSEPQWLNAEKEFLVTEELDENGDIKIVKDRKQDKEGKEKRKITPLPTFDEIDLMSKADQDKIYKKIKAKTEVTISNSGKTVGAYIYDTLLQKPQQKIRGKLIRTIERKFYKEELKDILQKQIELQPELFSNDLYNESVRELYRNNDAHQLQLSKKDFVHLFLEDIIFFQRPLRSQKSSIGNCTLEYRKYKDETGTEHTQWLKIIPKSNPYYQEYRLWQWIYNLSIYKKDDDSNVTTEFLNGPEDWEALFELLNNRKEVEQKTLIKYFLEQKGFKGKMLAAEVEKYRWNYVEDKKYPCNETKTQISSRLEKVQGISTGFLTREIEQQLWHIIYSVTDKIDYEKALKSFAFKHQLDEKSFIEVFKKFPPFKSDYGSYSEKAIKKLLPLLRLGKYWSWDAIDKNSKDRIQKILSGEYDETIRDKIRDKAFHLKQEDHFQGLQLWLAQYIVYGRHSEAAEIGKWNSVDDLEQYLQDFKQHSLRNPIVEQVVTETIRVVKDIWAKYGKGAKDFFNEIHIELGREMKLPAEERDRMTRQITENENTNLRIKALLAELMNDANVENVRPYSPMQQEILKIYEDGVLNSDIEIQEDILKISKTAQPSSSDLKRYKLWLEQKYRSPYTGEIIPLNKLFTAEYEIEHIIPQSRYFDDSLSNKVICEAAVNKLKDNHVGLAFIKNFHGQIVECGLGKKVKILEVNVYEEFVKQHYAKNRSKRNKLLLEDIPEKMIERQMNDTRYISKFISGILSNIVRAEVNDDGVNSKNLLPGNGKITSELKQDWGLNDVWNELIIPRFERMNQLTNSTHFTVWNEHHQKFLPTVPLELSKGFSKKRIDHRHHALDALVIACATRNHINLLNNQSARSDTKRYDLKRKLMRFEKVAYNHPKTGERIEREVPKGFLKPWENFTIDTKNSLENIIVSFKQNLRVINKATNRYEKWVKKDGVKTKEIVEQKGVNWAIRKPMHKDTVYGKIDLARIKVPKGKILTATRKSLDATYDLKSIEAITDTGIQKILKNYLASKGNNHELAFSPEGIEEMNKNIRSYNDGKPHQPIYKVRFFELGSKFTLGQSGNKKTKYVEAAKGTNLFFAIYENDMGKCSYETIPLNIVIERQKQGLTPVPEKNEKNEKLRFQLSPNDIVFVPTDDEIENAHNIDFANWTKKQKEQIYKIVSFTGSRLSAIPINVATTIVNKVEFTQLNKIELIKEKDVLIKLYSDRLGNISFHK

SEQ ID NO: 4065 - protein, 1449 aa, unidentified
  REGION 1..1449: note = Description of Unknown: Cas Enzyme sequence
MTKNILGLDLGITSIGFAQVIESNTPEKSEIIQIGSRIIQYDNFNKVDKSGKVSESKNPEQDFTSGKGLSPNAGRTLKRGARRNLDRFQLRRKNLVNVLEKANIITNETILTENGKHTTHETWRLRAISVTKQIEKEQLARVFLAINKKRGYKSSRKAKNEDEGQAIDGMAIAKKLYKENLTPGQLVYQLLKEEKKSIPDFYRSDLQSEFDKVWNFQKQFYPEIFNDSFYKELLGKGQRATSASFWNKYKFNTAENKAKSRDEKKLQAYKWRSDAIVKQLEKEEAAFVITEINNNLNNSSGYLGAISDRSKELYFNKETVGQNLYKQILQNPHTLLKNQVFYRQDYLDEFEAIWKEQAKHHIELTEDLKSEIRDIVIFYHRKLKSQKGLVSFCEFESQEKIIDGKKKTVGFKVAPKSSLLFQEFKIWQVLNNVLVRKKGSKKRLPKNIEQTKLFDEEKEIFDFDLETKQSLFEELNIKGNLKSSRVIEILGYKPTECEINYSELEGNRTNQVLYNAYLKILEVEGYNEDLLKLSDKDEINVNDLKTPASEIKEMVKSIFEVLGIDTLILEFDAEIDGKEFEQQASYQLWHLLYSYEGDDSPSGNEKLYELLTRKFGFKREHAQILANVTFSDDYGSLSSKAIRKIYPHIKELHYDKACVMAGYRHSASSLTKEEIAERPLKNTLELLKKNSLRNPVVEKILNQLVNVVNTIIDKNSKKDENGNVIEYFKFDEIRIELARELKKNAAERAEMTTNINAANVAHQKIFKILQSEFGIKNPSRNDIIRFRLYEELKNNGFKDLYTNTYIPRNIIFSKQIDIEHIIPQSKMFDDSFSNKTITYRKDNLDKGNKTAIDYIESKFGEIELDLYTKRIETLYELGKKNKDEGISKAKYQKLLKKEIEIGDGFIDRDLRDSQYIAKKAKNMLLEISRTVVSTSGSVTNRLREDWGLINIMQELNFEKFKSLGLTEKVEKKDGTFKERIIDWSKRNDHRHHAMDALTVAFTKHNHIQYLNYLNARKNENHKLHNIIVGIEALETKILIDDEGNKKRVFNLPLPRFRQHAKEHLENVLVSHKAKNKVVTKNKNKIKTSNGNKVKIELTPRGQLHKETVYGKYKYDVNKEEKVSSKFDANTIKKVSNPLYRKLLSERLEKNGNDPKKAFGGKNVLSKNPIYINQDKTKTLPETVKLTWLEEDYSVRKEITPENFKDAKNIEKVFDAKVKKILLDRLKQFKNDSKKAFSDLDKNPIWLNQEKGIAIKRVTISGVKNAEFLNYKKDHQGYFILDNKEEKIPVDFVSTGNNHHVAIYRDEKGKLQERVVSLFEAVQMVNAKEPIIDKQFNQGLGWEFLFTMKQNECFVFPNEKTGFNPSEMDLLDPKNKKLISPNLFRVQKISNKNYVFNNHLETKAIDGNILKNKKDLSGIMYYFIQTPNNLENIIKVRINHLGDIVGVGEY

SEQ ID NO: 4066 - protein, 1802 aa, unidentified
  REGION 1..1802: note = Description of Unknown: Cas Enzyme sequence
MKRILGLDLGTNSIGWALIEIDHENGIVKILGLGSRILPMDAGEIGDFERSGKIKSTAAQRTEKRGPRRLNERYLLRRDRLHLVLDLLDTLPKHYKLEINFTNEKNEKCGQFRKNKEPKLAYLPKEFGKKATFLFKDSYQEMLDEIGIENKRKSRIPYDWTLYFLRQKALSEKISLEELAWVLLSYNQKRGYEKTEVVDKSTKEGEIIEELDLRVKDVVPQIDKQGNQFYEVHLEGNDNFVYKEYSDIQMTFKNDLKEIIKTSKVDEQGNIDKLKTEFAVVDIYPLAIKNVEYENKEGKHIYSLTYQNGWKEIKPPKNNYTFQYKNALDKAYDYIVETVYDYKGEIKTQQGKERKLREPDLSDNSNDWTLLKKKTEKEALAYNYDNGYIDNHTKEPKKYISTKIYDVLKNDAKSGNRTKIIGGLFQVVDRDFYREELKQIIATQKQYHKTLEDKNIFEQCLKTLYPKNKNHQEALLKNKDAIQHLLVEDILMYQRPLKSKKSEIANCKYEIQYWKNIEDKNGNTIEEVDIETGEIKIKKEPVYRKVVSASHPYFQEFRIWDKLHSLRLIQLEKEVDGKKLTNQDITKEYFKSEKEYQKLFEKLNNQKSFNQHQFLTFCKEQFKIDYKAKDSNYAWNFPEDEEIKGNETRVSFATRFKRCGFAEYVDFLTQQKELELWHYLYSVSYKERTENNNKSVTTFFNNYFEGFDIADEIKEKIINDFANYPKFASKYCAYSEKALKKFLPFIRLNKREETDSWSNEKWYQKWQDSIETRKELILKKLKEIDFSNEHIDYSKVINTSVDVQKGELPFPKGLFNVFRDFEQSPDFNRLNLTQASYLIYGRHSELAFAKQWGSPKQIREELHQELKQHSLNNPVAEKVLLEMVQVVADIWEYWGVRKIDKKYEKGDGYEPLFDRIHLEVGRELKKSAKEKEAESKRMSGNKSQNKRLRQLLEEYLANSSYNANPKNFDHFERLKIVEEGAEHTKNNDKKFFDENKKLKEANISKKDIEEILKKPFISKEDFEKYKLWIEQGYRSPYSGQMIKLTELFDGNKYNVDHIFPQASITNNSLSNKVVVEVALNKLKSDKTARAFIQNQNGQPHLGIPVCSEEEFLNIVKTQFSGTKKMILLSKEIPKGFTSSQLNNSRHIARKAMELLSHIVREPGEVEFRSKNVLPVTGMVTTELKKAWKLDQVWTELVAPRFIRLNELTQSNLFGSWQTSKNGQKYFDCNLDSSIREKDESYDIKRIDHRHHALDALVVALCTEDHVNYINNINANAKSDNYGKLKQIEKYRQTLKRKIKFTKRDDEQDENNWYYMLPGEIRKKEAENSRRDSVIEMIYQYKNFQPFGQDYKKMVLIALQNTIVTFKQNLRVINKTVNRYNNSPNKNKLEIQNTEDGQKQNWSIRRSLGKDTFYGKQTIEGEEKIVIRKNLDTSFNSDKINSISDSVGFTKNILLNQLKQFDTIELPFDEAVNYFDALLEKEEFDAILNDTENKFSSIHDLFKYLKENKYKYKKVDYSILNVFINKVTEFDYRNDNRFKDKIKEHPEIAFTPDAIEEMNKPENILKLNDGKKHKPIIKVKITRGFGNQRALNEENSESVKSKQYVVNDAGSNLYLGFYERIYQDENGSQVRERKFKDIGLIELIETLKQDKSKRLNPLPSVIYDEKLNGVEFNWIFTISPLDLVYVPTDEEMANPSEVDFNNLSKEQVDRIYKYVDGSIDIANFVPYSASKPIWRFHGKNNKEIFKQLNDSGKINITEKDLIQNEFGLGSQQNKNQNMIDGKTQIKKICWKLNIDRLGNISKF

SEQ ID NO: 4067 - protein, 1349 aa, unidentified
  REGION 1..1349: note = Description of Unknown: Cas Enzyme sequence
MTKILGLDLGTNSIGWAVVEKDKESFKLIEKGVRIFQEGVKIEKGIENSKAAERTKYRSARRLKFRRKLRKIETLKVLTEYGFCPKISEEDLFNWRYKKVYPTNELFHAWWKTDEMSNRNPYYFRSICATEKLDQNVENNRFIIGRALYHIAQRRGFLSNRLEGTKESDGAVKKNIEEINIAKGEKTLGQFFYEKYLKGEKIRDQYTHREEHYLEEFDKICEVQELSDDFKNKIYKAIFFQRPLKSQKGLIGMCVFEKNKQRCSVSHPLFEEYRMLCFVNNIRIQTPEDEKLRPLNEEERKKVIEKFYLKKDHFPFEDIAKALAPKNRYKYFKDRDKKAEDYIFNYQMNTTVSGNPVSARFKSIFGDDFLNWHIEHVRKKDGKTSMINIDDVWHVLMTFNNDEKLVEFAKNKLKLDDEQIAEFSRIKLKNEFASLSLKALKNILPYLRSGLIYSHAVVLANMSNALPQEIWTDEIKRNKINGEIINIIETQNEEKAIIEIINGIIKNCRENGECWSDESISYYHNDLVKGLLSYFGEKTYNSFPDEIKKRIESRALSQLKTQMIKNLGRGDFLKIQTIDERVKDFLLNNYKADIKKLDNIYHPSAIEVYKPAKKDDNGKKYLGSPLISSIRNPMAMRALHQLRKVINELINNEIIDENTKVNIEMSRGLLNANERKALQTWQRDRETIRKKYYESILEHYKAQGMTTQPSEDDVLKYQLWEEQGHKCIYTGEEIALSEFLGSNPQYDIEHTIPRSLSFDNSQENKTLCNNRFNRSIKKNNLPSEISNYDEIKERVERLWLAKIEELDKQVQAAIRASKGAAEKDSKDRAIQKRHRLCFERDYYRNKLSRFFMIDVPQGFKNSQLVDMGIIAKYGRLYMKTVFDKVYTVKGNTVADFRKMWGLQNDYEKKERVNHVHHCIDAVVIACMTKENYENLAKYYHDRDDSFINDTKYKFNTPKPWNTFTEDLKRLEDEVLISHYTPDVLPKQSKKKLRKRGRVVKDKNGNAIYQKGDSVRGSLHKDTFYGAIEKEIVNKNGEIEKQIKYVVRKALDNNFEDSNIKNIVDERVRQIVEDGRKKEKILRSEIDNLKKKLSKAEESEESILKSEIENLEKEIQKIYSLPNKNGEPIPIKKVRIYTPSVTNPIHLKKQRDKALINPKPYKEYFHVANDSNYMMAIYEGKDENGNIKRDFELKSNLEAAEFFKYSVQKELKAQNIEGYYGLIPKAKNNGKLELPLKSIIKIGTLVILWEKSPEEVWDLEHSEIKKRLYKIIGLSNQRIIRPSGKIGEYATIVLRFHQEATQASDLKVQDGAFCIDEEHKPQRKLNHNQFNTIVEGFDFKITALGKIIQL

SEQ ID NO: 4068 - protein, 1416 aa, unidentified
  REGION 1..1416: note = Description of Unknown: Cas Enzyme sequence
MAQKILGIDLGTNSIGLSLRNVDLADNIKDQLMYFSSEIFKSGIGKDKHGEYSFAAERTKHRQPRRLKETRRRRLWATLHLLIEHKLCPLKIDSLHQWETYNKSEGLFRKYPIDDEAFAKWIALDFDADGKPDYSSPYQLRRELVTKQFDFNNIIDRYKLGRALYHIAQRRGFKSSKGETIALQEKEDIDLLGNSDIAQEMKKSESKLSEDIVSYMKEKGCNTVGEAFAYLEDEGIRIRNSRYKAIRSQYKEEIEKIFDFQEGLDPKSELFIGLISKQKDKGTIFYQKGLKSQKGLVGKCTLENTKSRCPQSHPEYEKFRALSFLNNIKYKTSVEDDWHNLSLEVRNKLFDDLFLARVKNDFPFSDIRIKLEKILNVKLVLGEKQRLINFKDNQCVAGCPVTARMVKMLGEEWESWNLNVDKWHTGRKDKSKEKHAVSYNALDLWHVCFSTSDPEILQEFAHKSLGWDDEQTQKLLRLWSSISVGYAMLSLKAIRNINKFLEYGLKYSDAVMLAKIPDIVDLDKAGIMQLIADYTGMIKNKINATKDIFVITNSLIANYKSTIVEHRYADHNTSYKLDDSDREDIMKRLIGYYGQCKWEKMDADKKIMLLEKVTDYYQQFFSSTKRQFYKVPRESDSLLDYLIEKFPAVDTKKWKKLYHPSQIGIYDIDNKTGDRSEWRLGSPNIGAMRNPVALRTLNVLRRKINSMLDDGLISYDDTRIVIETTRDLNNANMRWAIEKYQESRQEENKKIENVLKAYYPKRIINEKDVDIARYALEQSDIDLYKQTKSKNFSKDIERYKLWLEQGGVCIYTGRIINLSNLFDENAFDIEHTIPRSKSFDSSDMNLTLCDSYYNQHIKKNQLPSSLQNYDKTVIIDGKEYTAIKPRLQKWEERVERIKKNIEFWKTQSHRAQDKNRKDICIRQRHLWAMELKYWQEKLSRFKMTEVTDGFRNSQLVDTGIITRYATLFLKSIFTSVEVEKGSVTSDFRKMLGIQSLEEKKNRDHHSHHAIDATMLTVIPVAAKRDRMLQLFYKIQELEKAITFIKNKDTYSSMLYELEGLKLKLDQEKRDCHIGKNVGELVDFIDSNIITNHHVKDKALALSRRRVRARGKILGDKNQPRWHTGDSIRGKICEASYYGAITQYEKDSNGKVIVNNKVPQINPNLKYVIRRELKYKSNSQDTGFSSWDDLEKTIVNKKLVNMMKSQFDASISFKDACDKGIYMLDRHNNKINRIRHIRCYARITGLKIKEQVYKSNKEYKNYAYSTVGDLYCMCKYSDGVHTKFVIYSLYDISENRKYGLEDIPKYISDEKDNKLSLIDTIKPGDMFLLYNDSPSELYEMDHENLLKKLYKVCAFENDGLRIKLSHHVWAKDAKGESIKDFKKLPIIIRSAIGKLKYLKMGENADFQIKNGKIVFNK

SEQ ID NO: 4069 - protein, 1296 aa, unidentified
  REGION 1..1296: note = Description of Unknown: Cas Enzyme sequence
MANTVLGLDLGTNSIGWALIEIDGENNPVSILGMGSRIIPLSSDDRDQFNKGQTITKNRDRTTARTQRKGYDRRQSRKSELKEFLTQYNIFPGKELMELDKVELWKLRSKSANLDSEISAEQLGRILYMLNQKRGYKSARSEANQDKKDTDYVAEVKGRHAVLKEKNQTIGQFIFEHIQNADAESLYFRKKEMVFPREAYIEEFDTIIQAQHSKHKFLTEEVIHKLRDEIIFYQRKLKSQKGLVSVCEFEGKEIEYVKNNQLKKSFIGPKVTPISSPLFQYCKIWETVNNINLKIKNPPNSKYKWGERIPTLEEKVKIAEYLNTHDKLSHTELLKIMNLDKNEVFLNKQLLRGIQGNITYSEISKILGESELLKFEISIIPSKHNSYLVDKKTGEIYDEQEGFQVDAKFETSSYYQLWHTIYSIKEIGECKSALIKRFGIDEETAEKLAKKIDFSKYAFGNKSNKAIRKILPYLMKGYCYSDACELAGYNHSDSLTKAEKENRVLENKLELLAKNSLRQPIVEKILNQMIHIVNLIVEDHGNPDEIRVELARELKQSKDERNDSDKINNDNKKINEEIVQRLESLPGVPTTKKYIQKYKFIFQTRGEFDAKGKPMTLKLRDAKVIPVCIYCGKTFNLSEALTGDNFDVDHIIPKDLLFDDSQTNKVLVHRSCNATKLNKTAYDYIAGKGDEELNGYLARVDDWYNRGIISFAKMQRLKISHEAYKERKTHGKETESDKKLWENFIDRQLRQTQYISRKAREILSKICNNVTSSEGNVTARLRHLWGWDDILLKLQLPKYKELGQTEDVAWTSEHGKREHHKEEIINWSKRDDHRHHALDALVIACTKQAFIQRINTLNASETKNEMEREIALAKKKFGKDFDNKILDETNESVQNFNARKTLLDNYLILNKPEKFTFRYVKDEVEKILVSFKAGKRVATISKYKATGINNEKGVLVPRGALHEQSVYGKIKVIDKNKPLKFLFENPETIINPAIKSVVLERIQAHSGILKTALSSLKQSPLYMDKSKTKFLEFADCYKTVSVIKYKIESLTEKDLPDIVDKQIRKCIEARLKQHNGNAKEAFKTTVWLNEKKQIPIRTVRLFARPLADALETVKRDPNGKDIGFVIPGSNHHIAIYKDANGNFQQHACTLWHAVERKKNKLPVIIQDTNSLWSSILNLDLPQSFIEKLPADNLELFLSMQQNEMFILGLSNEEFEIAVKENNFPLISKHLYIVWSLSNNDFWFRHHLESKNTELKNINGAKESKRYFRFKSVKSLAEQNPIKIRINHLGKITKIGE

SEQ ID NO: 4070 - protein, 1088 aa, unidentified
  REGION 1..1088: note = Description of Unknown: Cas Enzyme sequence
MLKILSLDIGITSVGWAIIDDQGNIIDVGVRLFDESNPKDNLKRRASRGSRRMIRRRKQRSKELFSFLINIGLITEDFKPLGNPYELRKKGLKEQLSNEELATILLNYSKRRGSSLETVEEEGKNEVSTKTILNRNSKELINKDFIVNIQLDRLNTKGKVRGIDNNFSSNDYLNEINEVLKHQTLSVGIADKIKSYILRRRHYSHGPGSIESPSKYGRFREVGGELFGKLVSYIKENNGQKYKKERFDVTYNNIDYVVLKNGSIINKEPLNLINLMRGRCSIYQEELRAPKLSFSAELFNLLNDLNNLTINNRDENKLSLNEKNMVIDYVRSEGNITYTKFMKLLGFGKDEISGFRLGKEDKPILTEFIGYKKISDVFKKNEIKIPADLIIDKISDILTLTQVIDERKSDLGKLFDNHVLVAELSELSGFNKYHNLSLKAIYKLNDEIINTSLNQQQIITKLGLKNNNEQSKLVLSADAILSPVARRAQTQALKLVERLMKEHGHFERIIVETTRSKNSDDERKRIKEANAKNIKNKKEALETIKNYPDERLNATMVLKLRLYKEQDGKCIYTGLPIDLSKMIRDHKAYEIDHIIPISISFDDSYNNKVLVLHGANQKKQNKTPFGYFSRGDLVNGTKIKDWNSFEKSVSLNKNISARKKANLLFAEDITKYEVISKFINRNLVDTSYAVRVFMTTLKQYFEANDIDTKVITIKGQQTRRFRNTGLIMWARKHKNQDELNPFKKDRDNYIHHAMDALIMAGLANQKDIRKLYRLSEHVDEETGEVTKFADLAEDDSVIKYLMNIAKIKEEDVKFSWKIDTKPNRFIVNDTICSASISNGMAYELNKVNIYELKNKDIKKLLFNDYKNVLMYINDKRTFDKFVHAYKQYENEKYPMKVFYEKHGYITKYSKKNSNIPVKSIKVIGNKISSDYIDLSNKYEKCKSNPKIVFKKSIKPFRVDMYFNGTRYRFVTLRYIDFKKRENKYYIEEEKYKLKKIEKAIDSTYDFCFSLYKNSTIQINDDVFRFIGVVDKENKFEVKKINKIDKDSKGEPIRIRPVISKNTKYIGKFNISITGKVSKVDKEPLKLSI

SEQ ID NO: 4071 - protein, 1099 aa, unidentified
  REGION 1..1099: note = Description of Unknown: Cas Enzyme sequence
MGVNILSRKILGLDLGIGSVGWGIIDNFEIVATGVRLFEEAAKDKDNTSRRNFRSLRRQLRRRKARILRMYKYLEEIGIIMPNFKYLDNPYEIRAKGLKEKLTSNELATALLHLAKRRGSSLEIAEEPNEKEGSIKEILRLNEQKLENKFISEVQLEKLNKEGRVRGYDNLYKTSDYIKETIQILSHQDINDEQRKRIVDIIATRRLFSDGPGSESHPTIYGRYRPVDKKLKHEIVNMLKDSNHPDYLKKVFKLKYKDNEYRIMKSGMVINANPLNLIDIMKGKCSVFPNEFRAAKMSFSAELHNFLNDLNNLTINKDTKLTTEQKQEIIEIVLEKGKFSYTDLKKYLGIKDDNQLSGLRLNKEKPVLTDFKGFSKLLKVYKQHEEKLPNSNILDQIAEILTIYQAVEDRESKLSSLLSNRQVVEDLSKLTGFNGTHAFSYKALSYLNNELLHTEYNQMQILENSKIRKERNFKDINIDDDITNPVVRRVHREAFKVYKALEKEFGTFDAVIIETTRDKNSKEERKRISDIQKRNQQNKEHALSILEDSGYSVDTYLNPQLELKIRLYQEQQCKCAYTGVPLSLSELIRDPQRYQVDHIIPFSISLDDSFNNKVLVTASVNQLKGNKTPFMYFSQGLIDEGVFNDYNDFKSYVLNLNISKAKKDNLLFEQDINKYDVQKMFVSKNLVDTSYGIRSFMNYLKLYFSHHDIDTKVHTIKGKQTSLFRKLAANQWFKENPNSEIKNPLLKDRNEYRHHAIDALIVAASYNQKAIRLLYQINVTDDFKHIYNDKTGEIVQHNPLKDSELPMFYKQLFKLSDDEIRFSWKLDSKVNRSISDQTIYSTRVVNGESYVVKKYRNIYELDDKTLKKIFDDPEKSGILVYKNDKKTYEILYNAYLQYAHEKYPFKAYLEQNGLLRKYAKNKEGASVTSLKYVENRLGNHIDISKNYQTTRKVVLLQLSTYRIDVYQKGDIYKFITIRYHDVKYNHKIKAYEINEEWYHKQKLAKKISSDFEFKFSLFRNSLVEITKEDKNETETKRWRIISTNNDSKNVIELKSYAKLDEKREYLSVGSKLKELIKYNVSASGQMQRVFSERLHFIVK

SEQ ID NO: 4072 - protein, 1436 aa, unidentified
  REGION 1..1436: note = Description of Unknown: Cas Enzyme sequence
MKKILGLDLGTNSIGWAVVNEAEKADEQSSIVKLGVRVNPLTVDELTNFEKGKSITTNADRTLKRSMRRNLQRYKLRREHLIEILKANGFISDDTILSETGNRSTFETYRLRAKAASDEISLEEFARVLLMINKKRGYKSSRKAKNTEEGQLIDGMEIAKRLYDENLTPGQLSFELLKSGKIHLPDFYRSDLQAEFDKVWNVQKQFYPELLIDELKENLKGKNKTQRAICQKPFALVGIKRNTKGDEQRNENYRWRVKSLSEKLELEELAVVLQEINGQINNASGYLGDISDRSKELYFNHQTVGQYQMAQLDKNSNYSLKNQVFYRQDYLNEFERIWETQAQFHKELTPEFKKEIRDVVIFYQRPLKSQKGLISFCEFESRQIEVEVDGKKKLKTIGCRVCPKSSPLFQEFKIWQRLNDVEVSGMIVPNQQQDLFGYSKDYIYGKRRLQQEEKEMLFAELNYKEKLSKAEVLKLLFPQQKDVDMNFKDLDGNHTQAELFKAYQTIAEKIGYDVEDLSKKSAKEMVSCISEIFSTIGINTNILTFNSDLEGKDFEQQPLFCLWHLLYSFEGDNSAIGNEKLIEKLCDTFGFEKEYAAVLANVIFKDAGDYSSLSTKAIRKILPHLKDGLDYSTACEYAGYRHSKQSLTKEEIQNKVLKDKLELLPRNSLRNPVVEKILNQMINVVNSIVDEYGKPDEIRIELARELKKSAKEREELSKSINETTRLHDEYVKLLQKDFGLSHVSRNDIIRYKLYMELESNGYKTLYTNTYIPREKLFSKEFDIEHIIPQAKLFDDSFSNKTLEARQANLDKSNTTAFDFVATKYGDDFANGEYKMRIDKLLADKVISKTKYDKLLMKEADIPSGFINRDLRDSQYIAKKAREILEELVRFVVPTTGTITDRLRDDWQLVDVMQELNWNKYDQLGMTEIIEGRDGQRIRRIKDWTKRNDHRHHAMDALTIAFTKRSFIQYLNNLNARVQKGVDDWIDLDMVEIADLSKEDKTKAVYAIEKKELYRDNHGRLRFNPPMPLNEFRAEAKRQLENTLISIKAKNKVVTRNINISKKKSGANKKVQLTPRGQLHLKTIYGSSKRYETKEEKVNASFDVEKIKTVASKCYREALLSRLNQFGGDAKKAFTGKNTLDKNPIWLNALHTDKVPEKVKTVSFETIYTIRKEVSPDLKLDKVVDAHIRQILQTRLDEFSGDAKKAFSNLAEKPIWLNREKGIAIKRVTITGISNGEPLHDKRDKDGNLILDEKGNKQPVDYVNTGNNHHVAIYRKPKLDKNDQPVLDDNGDMQYELDEKIVSFYEATSRAMQHLPIIDKTYNQSEGWQFLFTMKQNEYFVFPRYDADGNMTFNPLEHDEAWFKNPENYAEISPNLFRVQSMSSKDYWFRLHLETTVISNNTLRDTTWKRIRNTEQLNTIVKVRVNHIGQIVSVGEY

SEQ ID NO: 4073 - protein, 1318 aa, unidentified
  REGION 1..1318: note = Description of Unknown: Cas Enzyme sequence
MSKILGLDLGTNSIGWAVVDKENNQFSLVDKGVRIFQEGVKIEKGIESSKAAERTKYRSARRIKYRRKLRKIQTLKVLSEYGFCPTLTESDLNMWRFKKIYPENLDFRKWWVTDDENNVNPYYYRNLAVTIKLDMSKKEERFKIGRAFYHITQRRGFLSNRLETTKESDGVVTSSINELSEKKGELTLGQYFYQKYLNLEKIRDTYTHREAHYLEEFEKICSFQELPNEFVEQLRKAIFYQRPLKSQKGLIGKCVFEKNKPRCAVSHPLFEEYRMLCFINNIKIKTPNEDKLRFLNSQERAKVVERFFLKRDNFEFEDIAKVLAPKKQYKFYKNRNINAEDYLFNYSMSTTVAGCPVTARFADLFGDQLISDNHKIVITNDGSLNKVVHDAWHALLTFDNETKLKEFSLNKLLLDCAKTEEYIKIRLKQDFASLSIKAIKKILPYLREGIIYSHAVFLANMSNCLPAEIWNLPENQYDISNQITTIINTQKQEKEIVELVNGIIKNCRENGECWSPESEDYFLKDVREVLINYFGKNTYSRFSETYKTELESKTFELLKKQMLLNNGRGEFAVIETIDERLKDFISKTYKVDSTKLLKMYHPSAIDVYKEPERSADGYRYLGSPMISAIKNPMAMRALHQLRKVINELIRNGVIDQNTRISIEMSRDLMNANERKAYQSWQRDREKLRDTYRQRIQEYYTSQNSTLTPTDDDILKYQLWEEQKHKCLYTGKEILLSGFLGANPSFDIEHTIPRSLSFDNSQVNKTLCDNVFNRSVKKNRIPFELENHSDIIIRIEDWRKKIEDFEIEISKAVRQSKNAPDKEFKDRAIQKRHKLTFERDYWYNKCKRFDMIDVPDGFKNSQIVDTGIITKYARMYLNTIFEKVYTVKGSTVADFRKIWGLQDEYIKKERSNHLHHCIDAITIACITKDNYENLAKFYHDWEEMDRAKMINKPIFEKPWSTFTEDLKNIENEVLISHYTADVLPKQSRIKLRKRGKIVKTNLGQPIIQKGDTVRGSLHKETFYGAIERKVLNKKGEEEKQIKYVVRKSILDIKAPDIDKIVDDVVTQRVLDAVESGILVFTGTNQKNKLNGKIWMSEDKGVEIKKVRIFVPSVTNPIHLKENRDKTLKNRKPHKEFTHVANDSNYAMAIYEGVDEKGKLKRDFELVNNIEAANFYKISVQRLLNQQSAGNNSELFPSFKLNGKDSLNLKGVVKIGTLVLLYEKSSNEIWDLEQNDLQKRLYKITGLSMQAIQGKYFYGVIVMKHHQEASPTSDLKLSDGTFSVNEAYIPLRKMNQNQFNALICGIDFKLTATGKIVRLN

SEQ ID NO: 4074 - protein, 1523 aa, unidentified
  REGION 1..1523: note = Description of Unknown: Cas Enzyme sequence
MNKTILGLDLGTNSIGWALIKQDLENNTGEIIKLGTRVIPMSEDILGKFDSGITESDTAKRTNFRGVRRLRERHLLRRERLHRVLNILGYLPKHYAREIDFEKRLGQFLKETEPKIAYRLNNETKAFEFVFKKAFEEMVDDFKKHQPQLLEGGKLIPYDWTIYYLRNKAITQKIEKEELAWILLNFNQKRGYYQLRGEDDDEINEDKKVEFHPLIVADIIDTKELNAKKQTLYKIVLENGWEFIKPSTIPIQWKGKLKEFVVTTTLDKAGKEKRTFRAPEENDWTLVKKKTEHIIGTSGKTVGKYIYDTLLQNPKQKINGSLVRVIERKFYKEELQQILKTQQLHHAELKDSNLYQQCLEELYEFNEDHRSNIANKNFVHLFLNDIIFYQRPLKSKKSLISDCRYESRTYKVDDIEKKEPIKCIPKSHPLFQEFRLWQWLQNLRIYEKETDLDVTSQFLQTEDDWINLFDWLNDRKEVDHKALFNYLIKPLKLKISNYRWNYVYDPIKDESKKYPCNETHSQILSKLEKVKNVPSNFLTKEIEEKLWHIFYSVNDKFEIEKAIKTFAFKHNLDEDFVEQFKKFPPYKNDYGAYSAKAIKKLLPLIRMGKYWSEANIHPQTKERIGKIISGEFDENIKDRVRDKAINLNEINHFKGLPLWLASYIVYDRHSEDGEIKHWKTVQDLENYLKEFKQHSLRNPIVEQVITESLRVVKDIWKHYGKGAENYFDEIHIELGREMKNPADKRKQMTEQITNNENTNLRIKALLAELLNDSNIENVRPYSPSQQEILRIYEDGVLSAAKEVPDDILKISKTAQPSKNDLIRYKLWLEQKYRSPYTGAIIPLNKLFTPAYEIEHIIPQSRFFDDSFSNKVICESEVNKLKSNKLGLEFIKSFGTQKVALDYGKTVEILSIDAYEDLVKNQYTKSRSKMKKLLMEDIPEAFAERQINDTRYISKMVKNLLSNIVRKDDKDNGTTSVNLLSSNGQITSALKQDWGLNDVWNEIVLPRFERLQHLRTEKAIQDGVSFLSYNKDNKIIPDLQPLDLSKGFSKKRIDHRHHALDALVIACATRNHINYLNNQNALDKKKSKDQKQQAREDLRNILCNKTKTDDKGNYKWQFKKPWQTFTQDAKENLFTTVVSFKQNLRVINKTVNKYDHWENNNGKLEKVKAIQNKGDSWAIRKPLHKDTISGLVKLRFKKTVMLGVAIENWEDIVDHELRKVIKGLVNVKYDKKMLQKYFKDRKNIFKDNDISKVEVYYWDKENVASRVKLDESFNESKIKSITDTGIQTILLNHLKKEKYQTSTDEKGKPISPELIAFSPDGIDEMNATIQELNGGRPHQPILKVRTYEPLGNKFKVGHSGNKKDKFVEAAKGTNLFFTIYKDANGKRNYASIPFNEVVESQKLSAAAKQKPQSVPQKNEAGDDLLFHLSPNDLVFVPIIEERENNNLVNFSNLSKEQMNRIYKVVSFTGNRLYAIPFRVAKSIIDKVEFTQLNKLETTIDKVSIKEFCWKLEFDRLGEIKKTIK

SEQ ID NO: 4075 - protein, 1280 aa, unidentified
  REGION 1..1280: note = Description of Unknown: Cas Enzyme sequence
MAKFILGLDIGTNSIGWVLFRDNKIFDKGVIIFPIGTNVDKNGIETTKNMERGLYRRASRTNFRYKLRRKDLKKFLASLDMLPAFSNTFEVKENYQASEIYKLRAIALDDKIPVEELGRIFLLINKHRGFKSNSKTLSEAKDEDGKVKGEISELAKSMEKYNVRTIGEYFHKMYQKAASLYKDGKWHNIDEPFDERSLMDEDNNFSLINSRGIRREGRFIGREMYATEFDLIWDNQKKYYPQLTGSKKEYDEICKLPVEEKRNKLKIFKETYYWKIKHQIIFFQRPLKSQKKFIGKCQFENNKRTAPASSLVFQEFRIWKQLADIRYTDKANDIYNQPLPPQWKQKIFDYLQTNLSLSLRPKKDNSDILALLGITNKKDFEFNYDSNEDDKTFQGNKTLYAIYTACGEDKFNQLKAENKLEKLWHILYMAKDDEWLYDTLTWKWQFEPSVATKIIEMGLEEGFANYSSKVIGKILPFLKEGKDEHDALILANYIQASDEYKETYVLQKKIKQLRNNELRNPVVEKAVGETIRLVNTILKSNDIDQEDFAIIVESTREFKKPKKEREGIRRKNLDTEKRREEYAKFLNEKKEKGELNFSRYIQKNDSIINKFELWLELGADKNDPEFKEFEKIVERRDREKYTLWLDCNRICPYTGNVISLSKLFSPEIEIEHIIPYSWSLDDSFTNKTLTFSYVNKEKANKSAYEYMQSKGKDAFKSFKERVKVFNKEKANEKFLNEKPEQTFTNAQGRNASYIAVYVRKKLQEVCRDVQFTNGFATGELRKNDWRLGSLLDKVRYQEETGIDIDKYTREFANYKRDFEQYRKRKANSTDIAKTDWRSLTQEMTTEYEAETQNPIYEWWEELQKFDAFRGAKGKKDRSDHRHHLLDAIIIGMCSRSIIQRLSTLNQLREKQGVSLYDEKGELTRERIDLPIPYSEIKEALQSVLIYHKAEQRLITAKQNRIHKKKHSKTDSAIIKQRTIAPRGSLVGDNFYGKLKTPQRQGFTKSDVYIKRVALNGDNFKDKKSLEKVYDKNIKKILELRLDKYGDKGEKAFSEEALLKDPIFAYSTKEYPNGLPISPLSKKGNTLPVIKKVRVANKNSRNLIQLVAKDEQKNIVNANRYSEADGNYVMALYESKEVDKKGKEKIKRDFEIVSFFKAVERRRKGEKLFPDEKEQKDGTFLPLMKSCPYLKAGDFVVMYENEASEIDWDVKEDLMKRLYKVTELGLNPTGDGYAVIKLVKHNLMKTVKDSYLKNGPFLKRSESINAIKVIIDRLGNIKPAI

SEQ ID NO: 4076 - protein, 1399 aa, unidentified
  REGION 1..1399: note = Description of Unknown: Cas Enzyme sequence
MTKKILGLDLGTNSIGWALINKDEQKILGMGSRIIPMGTDKLDYEKGAGITKNADRRMARTIRKMNKRYKLRRNKLLFILNELGILPDQFQFKDGIPEPNRIQDLELLPIKKGTLQLDSLNHYHLRVNALTKEIAAKDFGKILYQFNQLRGYAGGSNNDETKKKKDDTTDDETEKKKSYEVLTQKVTILNIVKSDRTYKAKGGKNKGQELPLFDVIFLLDDEEKEGNTMLQTLEVDKEEELEIRIKQTKKGENIIIALPQKTNWKKQMEATEDIIKTEKLFVGQLLLRDLLNSKWTKIRNRVILRQRYQEEFEAIWEEQAKHHSILNNCPNEKLTTIVNYLYPGSSQTQKELRQQGIEGGLKYIIKEQVIYYQRPLKSQTELISKCQFEKEEKVIAISHPLFQEFRCWKQINQLYVRTKEGTFNEKKGKTIYKYSDRYLTKEQKNTIYLKLQDQKQIGFSEVAKIVGIKNDNAEYLNGLNVKAKLKGCDTTITIKKILGEEYNTIIQKDKEIIFKIWDSLFDLKNSGSEYDQKSKKVSSLISILKIAIDEEKATAIALKLAQSISYPRKYGSISSKAIENILPLMQLNPKDVNTLTKENFEKIKHAIDTGELLEGIEPYMVDYINSNPEIIETGGMMDSFAASLVYGKHTNESIKPTIKNYHDIKYNPERNLRNPIVEQITNEALQVIKAIWKEYKFNPHDLEIRIELARDLKNSAAEREKIYKGQLNNQKQNNQIKEDLTEARIPATEENIIKYKLYKQQKFISPYSGNPLEINMFNEYEIDHIIPKSRLFDDSISNKVLVEGFLNKEKSNRTAWEYISQQNTKYQICSIERFINLVNDNYFGKKKKNLLLEKIPTDFIERQIKETQYIALAVKAELAQIVGSNNVKSSTGMITDFLRSRWGLKKLFMELTESRFKQMELWDSSNKWVNRYFDEEQKRNVYQIKNWSKRYDHRHHSIDALVVALTEQSHIQRLNNLNKELQDWLLKHKDEIKLEIKEDETILEAFFNLEEKRREEIQKGIEGFRNFDSPFNDLVRQARTHLEAMVVSHKPKDNLTIQLNEKTKKKEIKIRGSLHEATLYGKHNGQDTKTVNISNLTAKDIEKIVDPVLKAEINSHRSKSEYGSVKEALTGEGLKAFNESRFQRKKPESLKPPVYKIKIYYNNKEVKESSLQRLYDNNDKLSVKTGGNYLFLVMEKTNQKDGSKGRVFDIVSLYDAADIAKREWKNQREDFKKKIFEDYLIMNKADKVLFALKQNELVYLPENKDDPILKFTSEEFNTWISQKENKSKFNQRVYKVVKFTGGDCSFIPHNYANTISVAKDLTEEQKNELKKKYGEKDIPKKEMNFVEYGSYRDSAPVEVNEHFVKGLTDKSYKIKPMKIQDHCVKIETDWLGNIQLAKS

SEQ ID NO: 4077 - protein, 1161 aa, unidentified
  REGION 1..1161: note = Description of Unknown: Cas Enzyme sequence
PDNVSAAIKKAIYFVRPLRSQKGLVGKCTLETSKTRIPISHPAFEEFRALAFINNIQWRETDTKNPYEPLPIAIKKQILERLFFRRFEKGKNKGKVDDGGSLAFADIINTFSEKGKWEFNFKNKPNISTCPLIAGLMNVFDEEWTEKFLTEDDQFGINWTGLSIAYDVVYNGQIVKHKKLNHEAIWHLLFDFLQTKDDEQGLSTFCQKVLGWDIEKTTSFLEIGISQGYGSLSHSAILKITPYLQKGFIYSEAVLYANLSKALGKATFETNKAAIILSIKNTIQNTNTVKEKLNIVNSLIQEYFAENNSNRAKGVDNHIKEMAFHEVENKLKAFFGEMNWNRKTEIQKNSYLEFVLDKYLAFLDGKQSREEKASAGINKNPEIDYFKLPRVDKDIEDVLKTRFGATEAGLKKMYHPSDIDIYPKAKNNRLGDPNPPSKAWKNPMAMRTMYELRKLINYLLDAGKINIETKIVVEMARELNDANKRWAIQTYQRNREEENKEFAKAIIGVAKEKYPELNENDAENINKVRLWWEQLENGEEVYKTIKTLKGDIDKYRLWKEQNCQCLYTGKIIGLTDLFDGTSFDFEHTLPISASFDNSLANLTICEAAFNRTIKKNQIPTQLKNYNKPFGTYPAIKPRIQPWINKVEQLKQRIDRNKADTKKAIRAADIKRKNDLIQKRHLLEFDFDYWDKKVKTFTVDEVPNWWKNSQMVDTQIISKYARAYLKSLFTKVDVQKGTITAEFRKIYGIMGDEKKDRSKHSHHAKDAAVLTLIPGSAKREEILKNYYWALENRQKYHVKAYSGFEIAHVLKIEESVLINHVRKDQTLSPTKKKMRERGMVVFKKDDNGKFLKDETGTKIPNWIEGRSIRGQLHDTTYYGAIKPVERNENGYARKENGKYLLKQKDGIDELWIVKKEQIQEADIENMIDIPLQKHILTQIQNGIKISEVVDFNNNKIRHVRCRVRSLTASKAIFFKEHAFKSTHLHKQQYIARNTPGSNYLNILYEGVNKKNELIRAYRIINLFEFSQTGITDINLLNTDNAYNNFTKTKGSNSIKLQLKKILKVGDKVVMWHKNKEELNLLPKREILKRLYIIYKFNNQGSDYNYLQHHLEARPDKDLDDGDTVYNPDIYQPRLKLGAEKFNCLLENDDFIILADGNILFRP

SEQ ID NO: 4078 - protein, 1529 aa, unidentified
  REGION 1..1529: note = Description of Unknown: Cas Enzyme sequence
MKKILGLDLGTNSIGWALIEKDEEYNNGRIINIGSRIIPMGAEVSNFEQGNPQTKNAERRSARSIRRMGKRYKARRNKLLYVLSKTSMLPDQFKFSIPFDNPLKIQKVNLLPIKKGVSQLTALELLQLKVKALNEPIELKELGKLIFNYNQLRGYAGGCNDDEDVTEEATSENEEADFLKYEKIIAIVKVINDPIKQQAKKKGKEVFDIEIEYDGEVLKGETVLNNLKKNEDVELQIIIRRDKKGNVSSINFTLPIKTNWRKSMEELEEELNKLTEQKGSESYLCEYFLGKLLADKNYKLRNKVILRKRYQAEFDAIWESQLKFNPQFRSLVEDKEILSSIVGFIFPGNNTEKKQADYRNSAVEKGLKYLLRDQIIYYQRDLKDQSDLIGLCRFEKPETPIDKSHPNYLQLIKPFQVVAKSHPIFQEFKVWEQINKLSINTKTQKGFTKKGEPKYEYNDVPLPANCKQWLFDELQKKKEVSGKGFYTKLEKEGVIIKNESFLNGIHRDAKFKGNETYLFLKAQLKEWFDKLELNDTNALISFWDILYNAKGNEYDLDSERCKTIKNFIIDKCGLVTDIDKLTIRFAKIKFARNYSSLSLKAIEKMLPLMRAGKYFNEDLPININDNLLKILNENQEDPFLKALQGELEAYQDVLLKTGGMKPSYAAILVYGKHTAESYSGENIQTPTDIKPIPQGELRNPLAEQLINEAIKMVAEIWAANGEKPDEVRIELARELKNNADERNKIYKANDTNRKVNERVKQRLRELNKETSLGNIERYKLWSSQANEPFPLPEKANEPTKEEIEKMRLWEDQKCLSPYTMQPIPLSKLFDKGLYDIDHIIPKSRYFDDSMSNKVVCERSVNEDKGNRTSWEYFEVGSTAITNLLSKDQFTNYVNQNFFGKKRKNLLATKIPQDPVARQLKYTQYIATRVREEISKIVGSDNVKTTTGGVTDYLRNHWGVNEKFKEIVLDRYKNAQPFFAEIEFKKYEKEYDAKKKEYEKNHIAFDEPFIEKSIFISEFNKEYIKKEDNKLKIKGWTKRLDHRHHAMDALIVACTEQAHIQRLNNLNKELQNQLAKNKDLVKKGFEGTDEELLAEFVNLAAKEREIILEGMESNRSFSHPWKNFSVDAKEALETIIVSHKPKEKLLVQKVEKGEDAGKKDTLRIRGKLHDATLYGLSEGKESYRIKLAKLAGKQFATEKTIEKIIDPLIKESIKKHLEIYKGNKAEAFSAEGINELNKNRAVPIYGFKIYYKDQSEKYGLKKIGNKKSTQDSFNDILNRMIDEDLKNKLISHIDTKGGDFKEAFSETGIKELNQKLEEDFKQKNSTKSFKTINSIKLTPLKSDGEDEEIDLSLLPLERKSSYNNKLMVATGSNYAFVVLEKEGKRHYDEISFFDASNLVNKAFKNGFKNVQQIISRHFEQKHKGSKILFLLKQNEIVYLVQKDENIITDNKHPDFEAFWNDKKSRSKNVYKVVKFSGKEIYFLKHDIANTLVNKVEFGSQNCYRNVNNVSIKEHCIKLKVDRLGNIKPLL

SEQ ID NO: 4079 - protein, 1262 aa, unidentified
  REGION 1..1262: note = Description of Unknown: Cas Enzyme sequence
MDKKILGLDLGVSSIGWALICEGENNRSILGLGSRIIPLNTDEKEEFSTGNAISKNQKRTLKRTQRKGYDRYQLRRKKLVELLTEFRMMPEKELMNISSLGLYGLRNKAVKEKVELKELGRIFYHLNQKRGYKSSRSDANLDKKDTEYVAAVKSRHQQIKEAGFTIGQYFYNKLLDDKYYRIKEQVFPREAYIEEFDAICTQQKKYHPVLTDEVIHKLRNEIIYYQRKLKSQKELLSICEFEGQERNDEKGNIIFTGPKVAPRSSPLFQFCRIWETVNNISLKVKNPEGSKYKWADFIPSLEQKNEIVKYLNTHATLSNAELLKILNLKKENVYLNKQLVKGIKGNSTYTEIDAVLSNKKLLQFTVTTKELPSKAYLTDKKTGEMLMETSGCVVDASIEKEPFYQLWHTIYSIKDMDECKRALMTRFDIPEDEAEALAKIDFTKQSFGDKSAKAIRKILPYLMQGHHYADACSLAGYNHSNSLTKEEQQKRNTGDLLENLPKNSLRQPVAEKILNQMINLVNAIIDKYGKPDEIRVELARELKQSKDERNEADKQNSLNKKLNEEIAKRLRELGLPETKRFIQKYKFIFPAKDKKWNEAQAINQCIYCGETFNLTEALAGDNFDVDHIIPQALLFDDSQTNKVLVHRKCNKDKTNTTAYDYIASKGDQALADYIARVDDWFSRGVISFSKMQRLKTSYNDYLERKKQKKETQADKRLWENFIDRQLRESAYISRKARQILKKVCNQVHTTEGTVTAKLRQLWGWEDVLLQLQLPKYKELQLTEIKEWQSDHGKRKHQKEEIKEWSKRDDHRHHALDALTIACTKQGFIQRINTLNASDVRNEMNKEVEGASLEYNDRLTLLEKYLLLQRPFTTDQVKEELAKVLISFKPGKKVASSGSRKMKVNGKKQVVQKNIIVPRGPLSEESVYGKIKITEPHKPVKYLFENPHLIFKPYIKEKVEQRLAEYNGDVKKAIASLKKTPLYLDNENTKILEYGTCYKEEVVIKYPVASLKVKDIEFIVDRKVREVITQRLEQFDNKEKEAFKNLEENPIWYNKEKKIPIKTVRCFTRLAAVEPVKKDPDGNIIGFVKPGNNHHIAIYTDEHGKKQEHLCSFWHAVERKKYRLPVIIKNPKEVWDKILSQKENYPDSFLEKLPGDKWIYEVSLQQNEMFILGMTREDFEKAIKENNKAELSRYLYRVQKLTVIGKGQINIWFRHHLETELNDSGAAKISRRYINIQSIGAFLKENPMKIKVDRLGDISPVKK

SEQ ID NO: 4080 - protein, 1248 aa, unidentified
  REGION 1..1248: note = Description of Unknown: Cas Enzyme sequence
MSKKILGLDLGVTSIGWALIEELESNKKILGMGSRIVPLNTDEKTEFSTGNKISKNQTRTIKRTQRKGYDRYQQRRANLTRVLLERKMFDEQLFKLSSLELWGLRAKAVKEKISLTEIGRVLYHLNQKRGYKSSRTDANMDKKDTDYVATVKGRYQTLKDLGFTIGEKFYQELKANEYYRIKEQVFPREAYIEEYDSIMLEQSHHYPEIITKDLIHKIKFEIIYYQRPLKSQKALVSKCELVGFWTKDKTGKQIFVGPKVAPKSSPLFQLCKILETINNLSLKVKNPEISKHKWLDFYPSQEQKNTISKYLNENENLTYAELLKILGLRKEDVYANKQIINGLQGNTTVTILKKLIDKKHLQFDLKIITKEDAKQLVDRKTGEVLCEELYAEVSSSFEVEPLYQLWHTIYSIKEEKECQEVLIKKLGVDNEIALQLSKIDFTKQGFGNKSSKAIRKILPYLMRGHVYSDACEFAGYNHSKSLTKEENQKRVIAEKLELLPKNSLRQPVVEKILNQSINIVNAIINRFGKPDEIRVELARELKQSKDERNQAEQRNKANERLNAEIANRLSEFGLPGTKRYIQKYKFIFPSQSRNLKDAHVENTCIYCGKSFSIAEALTGDNFDVDHIVPKSLLFDDSQTNKVLVHRSCNASKTNQTAYDFIAKKGESELNGYIERVDEWFKRGILSYSKMQRLKVSYQEYLERKSKKKQTDSDIKLWESFIERQLRETQYISRKARYIFENICNKVSTTEGTVTAELRRLWGWDDVLMNLQLPKYKELGLTQIKEWTSDHGRKKHKKEEIIEWTKRDDHRHHAIDALVVACTKQGYIQRINTLSSSDAKDAMRKEILESALVFDEKRNLLEQYLIKESPFSTSEVEKEASKIIISFKSGKKVATKGIRKVKINGIKQVVQKNIIVPRGALSEEFVYGKIKKIEKNKPLKYLFENPSKIVELETKKLIIDRLNEFNQDTKKAIQSTKKNPLLTTKGIAIEFGNCFKDEYVIKYPLQSLKAKDIDFIVDKGVRDIIQKHLAKFDGKEKEAFKEPVWFNEEKKNQIRTVRSFTGLSAVEPVSKDKKGNDIGFVKPGNNHHIAIYKNGSGEFSEHSCTFWHAVERLKFKIAVIIKDSNQIWTDIINKELPDSFIEKLPEDNLKLEYVLQQNEMFILGMHNEELETAIINNDYSLLSNFIYLVWSIADNDYWFRHHLETKNSDLKKVTTAKDSKRYYRTSLNGFLKLNPVKIKVDCLGRIIRL

SEQ ID NO: 4081 - protein, 1247 aa, unidentified
  REGION 1..1247: note = Description of Unknown: Cas Enzyme sequence
MSKKILGLDLGVTSIGWALIKEDSNKNTILGMGSRIIPLSTDDKDEFSSGNKISKNQKRTTKRTQRKGYDRYQLRRKYLTQELIRNNLFDDTLFTLQPLELWGLRARSVTERVELKELGRILYHLNQKRGYKSSRSDANLDKKDTQYVATVKSRHQEIKEKGITIGQKFFLDLSNDQYYRTKDQVFPREAYIEEFDAILKEQSNHYPSILTQELINKLKNEIIYYQRPLKSQKGLVNVCEFAGFITKSKDGKEIFAGPKVAPKSSPISQLCKIWETVNNITLKVRNSEGSKYKWSDRTLSIKEKESVIKYLNENEHLSFSELLNILNLKKEDVYANKQILKGLQGNLTISILNKIVDPEYLRFEVKIIDSDHQALILDKKTGEILAEESPIQICSTIEQEPLYKVWHTIYSIKDIEECKKALIKKFNLEDSQAEKLAKIDFTKYAFGNKSTKAMRSILPYLMKGYMYSEACSLAGYNHSNSLTTKENELRILLDKLELLPKNSLRQPIVEKILNQAINVINSIIETHGKPDEIRVELARELKQSKDERNESDLRNKANEKLNLEISSRLKSLGVPTTKKYIQKYKFIFPSLSKNLKEATVENTCIYCGKSFSISEALTGDNFDVDHIVPKSLLFDDSQTNKVLVHRSCNALKTNQTAYDFIAKKGEAELDAYVKRVDDWFKRGMISYTKMNRLKVSFEEYIERKRTKKETEADKRLWEHFIDRQLRETQYIARKAKEIFSKICYNVTTTEGTVTAKLRELWGWDDILMNLQLPKYRELGLTQFKEWTSDHGRRVHKKEEIIGWSKRDDHRHHAIDALVIAFTKQGYIQRINTLHSSDVKDAMNREIKEAGIQYDERRNLLDQYLIKERPLSTSEVESKTAEILISFKAGKKVASKGIRKVKSNKKKEIVQRDIIIPRGSLHEDGVYGSIKTLNKERTSEKSSFTNVIVKKYILGVGAIGYLFTGKESISIKTKKNIKTGKELIIEIDQIKNTIDDIVDIGIRKKIIQRLNRGFENGQTYKDDVKKAFLNFKNLEDDPIYQNEKKMIPIKTIRMFTGLSSVEAISFDSDGNAIGFVKPGNNHHLAFYINNEGQIIEHVCTFWHAVERKKFGLPIIIKDTSKIWDTILIKDNYSEKFLEKLPSDKWIFHESLQQNEMFVLGMNEDEYADAIKRNDKKEIFNYLYRVQKISLKGSGQIDITFRFHTETHLIDSNEAKVSKRFYNIQSVTAFQKLKPKKIRINNLGEIIIK

SEQ ID NO: 4082 - protein, 1508 aa, unidentified
  REGION 1..1508: note = Description of Unknown: Cas Enzyme sequence
MKKTILGLDLGTNSIGWALIEQDFENKQGNILGMGSRIIPMSQDMMNDFGKGTSISQTAERTYYRSIRRLRERHLLRRERLHRVLNILGFLPEHYSKQIDFEKNLGQFLEETEPKIAYNNKDFIFKKSFEEMLEDFRMNQPELLNRKNKKGKDAKIPYDWTIYYLRKKGLTQKLQKEELAWLLLNFNQKRGYYQLRGEDDEDDTRSAQTRTYFDTQIISGIIDTGAIYKGLKVILIKLSNGDSGKYFSKEIPNWIGIEKNIIATIELDKDGNDKYEDDGTLKRKFSIPTEEDWEKKWKLIKIKTEREIKDSNKTVGTYIYDTLLQKPNQKIRGKLVRTIERKFYKEELKAILEKQIALQPELFTNELYNACVRELYRSNEAHQLQLSKRDFVHLFLDDIIFYQRPLRSQKSSIGNCSLEYRQYNQKDETGKEIEVKEYLKCVPKSNPYYQEFRVWQWLYNLKIYTKKEDKDVTHEFLKSNEDKENLFEFLMSKKEVNQKDILKHFFKDLKGKVQTAEIAKYRWNYVYDLGKDESKPYPMNETGYEIRKRLKEVANIPANFLTREIEQQLWHIIYSVTDKNEFETALKTFARKYQLDVNSFAENFSKFPRFKSDYGSYSEKAIKKLLPLMRIGKHWKWENIDIKTQARIDKLLTGEFDENIKDRVREKINKENLDNKEDYQGLPLWLAQYVVYNRHSEAADIGKWNSVEDLKTYLKEFKQHYLRNPIVEQVITETLRVVKDIWEKYGDGTKDFFNEIHIELGREMKNTTEDRAKITEQVSKNENTNLRIKTLLMEFAKDDSFKNQIDYSNYCKEEKNLTSYQKGNNPVRPYSQTQHDILKIYEEYALNDHTEEYLKNEKTGLTETKDGKSKEITIYDISQKSQPTKSQIEKYKLWLEQKYRSPYTGEIIPLSKLFTPAYEIEHIIPQSRYFDDSLSNKVICEEAVNKLKDNKLGLEFIKNPVLQTVEIGLGKTVNIFTEKQYREFVEEHYSKNKVKRNKLLLEEIPDKMIARQMNDTRYISKFVSAVLSNIVRADKDDDGVNSKNIVPGNGKITDRLKQDWGLNDVWNELILPRFERMNKLTNSEAFTAKNKEGHTIPAIPFELSKGFQKKRIDHRHHAMDALVIACATRDHVNLLNNQSAKSDNSRFDLQHKLQNTEKWIDKNGKERDKFTEFKKPWQNFTIDAKNELEKVVVSFKQNLRVINKSTNTYQKFENEKKVEKKQERVHWAVKKPMHEETISGIVKLSWLKVSEGEFTTATRKTLDKSFNKEKIKKITDTGIQKILLNYLREKGNDPELALSPEGIEELNKNISQYNNGKFHHPIFKVRIYEKGKGRFVLGEKGNKKSKYVQGSPNLYFAVYQEENGKRNFKSIPLNIVIERQKQGLSSVPETNEKGEKLCQECPYLSPNDLVYVPTTDELENNTKIDFKNLTNEQRKRIYNVNDFSSTCYFFPNTIAKPIAPKEIDLRYDEKENKPTGSFDTKTASLDGMQIKDVCIKLQVDRLGNISKV

SEQ ID NO: 4083 - protein, 1220 aa, unidentified
  REGION 1..1220: note = Description of Unknown: Cas Enzyme sequence
MKKILGLDLGVASIGWAFINEAENENEKSEIVDLGVRIIPIDIDSKSKFEKGQAITINQDRTLKRGARRNLDRYQLRRKSLSAVLKALNMLPDENLIKLKTIDLYSLRDKALSQKIELKEIGRVLLHLNQKRGYKSSRKEDAKNETENKGKESAYLGGISTRSTFLKENNLTIGQKIYIDFLDNYKQNDNKIVSLSIKNEVYPREDYINEFNLIWAKQMQFYPEILTESNRQKIRDEIIYHQRPLKSQKGLVSICEFEGKKVIVIKDNKQVEKFIGPKVAARSNPISQMCKIWESVNTIQLESKNGFKKVIPNIEQKNILFEYLNNNEKLGINELRSLLKLDKTYRTNQQVEKAGLKGNDTRIRIINALIQANLEEKIINSLTKFDPKFEAVDFNEILKKSINAYQPKLKSKKFSADKVVVDMHTGEEIELLQISAEIEKEPLYIIWHLLHSIDDKKELLNALLNNNTLKKLGLTEIAAYELTKVVFKSDDYGNKSCKAIRKIIPYLMNGYVYSDACALAGHNHSDTLTKEDNLKRDLLNQLPLLKKGELRQPVVEKILNQLINLVNAILKDPTMGKPDEIRIELARELQQSADERNDAYSYNNKRSAENDEIASEIEKYGLKPTAHRIKKWRVWHETKGYSLYTGKTIGLSEFLNAQAVDIEHIIPQSQLFDNSLSNWTICEREENIKKGAQTAYDWMKNKGEAALEEYVKQVNYFYQQFIEKNPKEKGIYRVGFSKRKRDYLLMPFEKIPADFISRQLNETRYITRKSSEILKQVCHNVKITSGSVTDYLRHHWGYDNILHDLNFERYKNAGLTYINEDKKERIKDWSKRMDHRHHAIDALVVACTKQSIIQRLNNLNQKKEKFQNLKEVDNKGLKKLVEDFKLFDTKTLSNKIENTLVSFKAGKRVVSRRKNKVGNQLRLEPRGPLHEESVYGLIKRVVDKPVKLNAKFKIEDVENIVSGKHKKLVKERLAAFDNNPAIAFNKLNKNPIWISEEHKNALTEVKVYEYTSAIKYKLNESFKEKDAEYIIDKAIKNLVKERFKEKGANALKDLENNPILFNGKPVKSVRCYAEVTAYEVLKFDKEKNKPKSVVKPGNNHHVTICADENGKQYEFKVVTFWEAVANSKLGLPVFSKPNGPNHKMICTLQENEIVKVPDKALINSYYRVQKITSGNYWFMNIFNTVRDESLTGKKVGTAIQFSAGSFNAKKIKVNILGKIV

SEQ ID NO: 4084 - protein, 1481 aa, unidentified
  REGION 1..1481: note = Description of Unknown: Cas Enzyme sequence
SKFFLIFFCFYFFLLSLPHQNIKRMKRILGLDLGSNSIGWALVQQDFENKQGQIMAAGSRIIPMDQSILGDFEKGNTVSQTAERTAYRSIHRLRERHLLRRERLHRVLHILGFLPPHYDSQIDFSKRYGKFIDDAEPKIAYNKGNFIFMDSFNEMIEDFRKHQPQLFYKKSNGEESRIPYDWTIYYLRKKALSQKITQQELAWLILHFNQKRGYYQLRGEEEIENPNKEIAFHSLKVVEVEAETPNKKGEIWYTIRLENGWIYRRTSKIPLDDWRGKTRDFIVTTDLNDDGTIKLDKEGKEKRSFRAPDENDWNLLKKKTEHDIDFSGKTVGAYIYDHLLQNPNQKIKGKLVRTIERKYYKDELKAILAKQIALRPEFFTENLLADCIRELYRKNQTQQQTLLSKDFLHLFVEDIIFYQRPLRSQKSTIANCALEKRSYIDKETNERKDAPIKVCAKSNPYYQEFRVLQWLQNLRIYEIETDREVTSEFIETAEDYEALFNFLMSQKEIDNEGLLKYFLLAKNPQIKDKAAKSELKKWLTIYRWNYVYDRADNSSKKYPMNETGYDLQRYLQKVEGLPANFLTFDTAYQLWHLLYSVKDKVEFEKALKKFAQKYQLDEVSFVDSFKNFKPYPNEYGSFSEKAIKKMLPLMRFGKHWNFKNIDVSTQKRIDDLINGVANEDIRTIIREKAEKYQLNNETCFQGLPLWLAQYIVYNRHAEATDIEKWTSVSDLEAYLEDFKQHSLRNPIVEQVVTETLRVVRDIWQQYGGGQANFFDEIHIELGRELKNTSKERERLSKQNQENENTNLRIKKLFAELKEDANIQNVRPYSLVQQELLKIYEEGVFSSTDEIEEDIQKIRKKAEPTTLEIQRYKLWLEQKYKLPYTGEVISLTKLFTEDYEIEHIIPQSRYYDDSLSNKVICESAVNKLKTNQLGLEFIQNHHGEKVRIAGNKEVTIFTEEQYKEFVKKYYANNLPKQQKLLLNDIPEKMVARQMNDTRYISKYVSEILSKIVRSDEKDEGVNSKNIIPCTGKITTALKQDWGLNDVWNELILPRFERMNQLTQTQLFTSYNDRLQKNLPTVPIEYSQGFQKKRIDHRHHAMDALVIACATREHINYMNNQHALDKSKDKKEKQQSRIDLRTILCEKKNNNWQFKKPWRTFTQEAKEALEHIVVSFKQNLRVINKATNYYEKWEEKNGVLVKKKVKQEGTNWAIRKPLHKETVSGKIVLDKKIGKDKILTATRKTVDITFTEKIISSITDTGIQKILLNYLKYKGSPEVAFSAEGLEELNKNIAQYNDGKKHQPIYKVRIFEEGSKFPLGETGAKATKYVEAAKGTNLFFGIYQGKEKRTYATIPLNEVIERQKQGLPSVPERNEKGEPLLFSLSPNDLVYVPMVGEATETIDFSNLSKEQKERIYKTVSFTGNECHFVKSTIASLIKSYDAKSKIGELGSLNKLEVTISGDSRIKEVCIKLKVDRLGNITKA

SEQ ID NO: 4085 - protein, 1190 aa, unidentified
  REGION 1..1190: note = Description of Unknown: Cas Enzyme sequence
MEIISSKVLSVIKKNKDKKYDKYWYDITLENGLVYKAAFYNDLVYSWIGQEREFVVKRTLLKNGDEKIELSYLPTFDEIAKMDKKQQDKFYQKIKVKTESNIGNKTVGAYIYDHLLQNPNQKIKGKLVRTIERKYYKDELKAILAKQIALQPEFFTENLLADCIRELYRKNQTQQQNLLSKDFLHLFVEDIIFYQRPLRSKKSTIANCPLEKRSYIDKETNERKDVPIKVCAKSNPYYQEFRVLQWLQNLRIYEIETDREVTAEFIGTAQDYEALFNFLMSQKEIDNEGLLKYFLLTKNPQIKDKAAKSELKKWLTTYRWNYVYDVADNSSKKYPMNETGYELQRYLQKVEGLPANFLTFDITYQLWHLLYSVKDKVEFEKALKKFAQKYQLNEASFVDSFKNFKPYPNEYGSFSEKAIKKMLPLMRFGNHWDFNHIDVHTQKRIDDLINGVANEDIRTIIREKAEKYQLNSETCFQGLPLWLAQYIVYNRHAEATDIEKWTSVSDLEAYLEDFKQHSLRNPIVEQVVTETLRVVRDIWQQYGGGQANFFDEIHIELGRELKNTSKERERLSKQNQENENTNLRIKKLLAELKEDASIQNVRPYSLVQHDLLKIYEEGVFSSTDEIDEDIQKIRKKAEPNKTELQRYKLWLEQKYRSPYTGEVISLTKLFTEEYEIEHIIPQSRYYDDSLSNKVICESAVNKLKTNQLGLEFIQNHHGEKVRIAGNKEVTIFTEEQYKEFVKKYYANNLPKQQKLLLNDIPEKMVARQMNDTRYISKYVSEILSKIVRSDEKDEGVNSKNVIPCTGKITTALKQDWGLNDVWNELILPRFERMNQLTQTQLFTSYNDRLQKNLPTVPIKYSQGFQKKRIDHRHHAMDALVIACATREHINYMNNQHALDKSKDKKEKQQSRIDLRVLVKKKVKQEGTNWAIRKPLHEETFSGKISLNREKVGKGNILTATRKAVDSSFDVKKISKITDTGIQKILLNYLKYKGSPEVAFSAEGLEELNKNIAKYNDGKKHQPIYKVRIFEEGSKFPLGETGAKATKYVEAAKGTNLFFGVYQGKGKRTYATIPLNEVIERQKQGLPSVPGRNEKGEPLLFSLSPNDLVYVPIEGEIIETIDFNNLSKEQKERIYKTVSFTGNECHFVKSTIASLIKSYDAKSKIGELGSLNKLEVTISGDSRIKEVCIRI

SEQ ID NO: 4086 - protein, 954 aa, unidentified
  REGION 1..954: note = Description of Unknown: Cas Enzyme sequence
SDKVLKLLGYSPQEWEINYNQLEGNRTQKALYEAYLKIVEMEAHDVKDILQIKSAKDDWSLDESPLSASEIKEKVKDIFQALGICTKILYFDPLLPVKEFEEQDSYQLWHLLYSYESDDSTSGNETLYRILEKKYAFKREHARILANVALQDDYGSLSTKAIRKIYPYIKENQYSTACEKAGYKHSKLSLTTEELEARELKNIIPLLKKNALRNPVVEKILNQMINVVNALIEKNSERDAEGKITKYFHFDEIRIELARELKKNAQERYEMTQNINKAKLEHQKIIEKLQKEFGIKNPTKSDIIRYRLYKELEHNGYKELYTNTYIAPDVLFSKNIEIEHIVPKARVFDDSFSNKTLTFHRINSNKGEYTAFDYITSLNNEEELNQYLTRVENAYKTKSISLTKYKNLLKKASEIGDGFINRDLRDTQYIAKKAKEILFQVTKNVLSTSGSITDRLREDWGLVDVMKELNMPKYQSLGLTEVEERKEGNKVTVIKNWTKRNDHRHHAMDALTVAFTKPSYIQYLNHLNARKDKNNKNYSVILAIEEKETIKVPTNNGKNKRVFIEPIPNFRQVAKKHLEEIFISHKAKNKVVTKNINKPADTDKQQITLTPRGQLHKETVYGKYQYYVNKEEKIGVKFDKETIAKVSNPVYREALLKRLQANDNDPKKAFAGKNALSKNPIYLDEAKTKTLTEKVNLTYLEEDFSIRKDISPDNFKDLKSIEKVIDQGVKRILIKRLQDYDNDPKKAFVDLEKNPIWLNKEKGIAIKRVTISGVSNAQPLHIGKDHLGKTTLNKEGNEIPVDYVSTGNNHHVAIYRDKEGNLQEQIVSFFEAVVRAQQGLPIVDKTYKQAEGWQFLFTMKQNEMFVFPNEATGFNPAEIDLLDPKNKKQISPNLFRVQKIATKDYFFRHHLETNVETDNILKNVTWKREGLSGLKDIVKVRMNHLGDIVSIGEY

SEQ ID NO: 4087 - protein, 1457 aa, unidentified
  REGION 1..1457: note = Description of Unknown: Cas Enzyme sequence
MKHILGLDLGSNSIGWAFVQQDFENKQGKIIATGSRIIPMDQGILGDFERGNTVSQTAERTTYRSTRRLRERHLLRRERLHRVLHILGFLPPHYDAQIDFTKRYGKFIDNAEPKIAYNNGNFIFMNSFNEMVEDFKKHQPQLFYKKSNGEESKIPYDWTIYYLRKKALSQKITQQELAWLILHFNQKRGYYQLRGEEETENPNKEVAFHSLKVVDVEAEAPNKKGEIWYTIRLENGWIYRRTSKIPLDDWKGKTRDFIVTTDLNDDGTVKLDKEGKEKRSFRAPDENDWNLLKKKTEHDIDFSGKPVGTYIYDHLLQNPNQKIKGKLVRTIERKYYKDELKAILAKQIALQPELFTETLLADCIRELYRKNETQQQNLLSKDFLHLFVEDIIFYQRPLRSKKSTIANCTLEKGSYIDKETNERKDAPIKVCAKSNPYYQEFRVLQWLQNLRIYEIETDREVTAEFIETAEDYEALFNFLMSQKEIDNEGLLKYFLFAKNPQIKDKVAKSELKKWLTTYRWNYVYDAADNSSKKYPMNETGYELQRYLQKVEGLPANFLTFDTTYRLWHLLYSVKDKVEFEKALKKFAQEYQLDEASFVDSFKNFKPYPNEYGNFSEKAIKKLLPLMRFGNHWDFNRIDVSTQKRIDDLINGVANEDIRTIIREKAEKYQLNSESCFQGLPLWLAQYVVYNRHAEATDIEKWTSVNDLEAYLEDFKQHSLRNPIVEQVVTETLRVVRDVWQQYGGGQANFFDEIHIELGRELKKTSEERKRLSDKNQENENTNLRIKKLLAELKEDASIQNVRPYSLVQQELLKIYEEGVFSATDEVEEDIQKIRKKAEPSKADLQRYKLWLEQKYKSPYTGEVISLTKLFTEEYEIEHIIPQSRYYDDSLSNKVICESAVNKLKTNQLGLEFIQNHHGEKVRITGNKEVTIFTEEQYKEFVKKHYANNSAKQQKLLLNEIPEKMVARQLNDTRYISKYISEILSKIVRSDEKDEGVNSKNVIPCTGKITTALKQDWGLNDVWNDLILPRFERMNQLTQTQLFTSYNDRLQKNLPTVPIKYSQGFQKKRIDHRHHAMDALVIACVTREHINYMNNQHALDKSKDKKEKQQSRIDLRTILCEKKNNNWQFKKPWRTFTQEAKEALEHIVVSFKQNLRVINKATNYYEKWEEKNGVLVKKKVKQEGTNWAIRKPLHEETFSGKISLNREKVGKGNILTATRKAVDSSFDVKKISKITDTGIQKILLNYLKYKGSPEVAFSAEGLEELNKNIAQYNDGKKHQPIYKVRIYEKGSGRFVLGEKGTKSKKYVQGAPNLYFGVYQGKEKRTYATIPLNEVIERQKQGLPSVPEHNEKGEPLLFSLSPNDLVYVPMEGEATEAIDFSNLSKEQKERIYKTVSFTGNECHFVKSTIASLIKSYDAKSKIGELGSLNKLEVTISGDSRIKEVCIKLKVDRLGNITKA

SEQ ID NO: 4088 - protein, 1456 aa, unidentified
  REGION 1..1456: note = Description of Unknown: Cas Enzyme sequence
YRSMRRLRERHLLRRERLHRVLHILGFLPPHYDAQIDFTKRYGKFIDNAEPKIAYNNGNFIFMNSFNEMIEDFKKHQPQLFYKKSNGEESKIPYDWTIYYLRKKALSQKITQQELAWLILHFNQKRGYYQLRGEEETENPNKEVAFHTLKVVEVEAEAPNKKGEIWYTVRLENGWIYRRTSKIPLDDWKGKTRDFIVTTDLNDDGTIKVDKEGKEKRSFRAPDENDWNLLKKKTEHDIDFSGKPVGTYIYDHLLQNPNQKIKGKLVRTIERKYYKDELKAILAKQIALQPELFTETLLADCIRELYRKNETQQQNLLSKDFLHLFVEDIIFYQRPLRSKKSTIANCTLERRSYIDKETNERKDAPIKVCAKSNPYYQEFRVLQWLQNLRIYEIETDREVTAEFIETAEDYEALFNFLMSQKEIDNEGLLKYFLFAKNPQIKDKVAKSELKKWLTTYRWNYVYDAADNSSKKYPMNETGYELQRYLQKVEGLPANFLTFDTTYRLWHLLYSVKDKVEFEKALKKFAQEYQLDEASFVDSFKNFKPYPNEYGNFSEKAIKKLLPLMRFGNHWDFNRIDVSTQKRIDDLINGVANEDIRTIIREKAEKYQLNSESCFQGLPLWLAQYVVYNRHAEATDIEKWTSVNDLEAYLEDFKQHSLRNPIVEQVVTETLRVVRDVWQQYGGGQANFFAEIHIELGRELKKTSEERKRLSDKNQENENTNLRIKKLLAELKEDASIQNVRPYSLVQQELLKIYEEGVFSATDEVEEDIQKIRKKAEPSKADLQRYKLWLEQKYKSPYTGEVISLTKLFTEEYEIEHIIPQSRYYDDSLSNKVICESAVNKLKTNQLGLEFIQNHHGEKVRITGNKEVTIFTEEQYKEFVKKHYANNSAKQQKLLLNEIPEKMVARQLNDTRYISKYISEILSKIVRSDEKDEGVNSKNIIPCTGKITTALKQDWGLNDVWNELILPRFERMNQLTQTQLFTSYNDRLQKNLPTVPIEYSQGFQKKRIDHRHHAMDALVIACATKEHINYMNNQHALDKSKDKKEKQQSRIDLRTILCEKKNNNWQFKKPWSTFTQEAKEALEHIVVSFKQNLRVINKATNYYEKWEEKNGVLVKKKVKQEGTNWAIRKKLHEDFPYGKVKYQVNFLKISENISKIDLIVDEFIKRQLEKIYVENHRKVNLTKKYLKENPIRDQKGEEVISTDFREENIKYRKRRPISVLSDRNRKTGITSIEKMLKTIAKVADNVLKRELFLYLEECNNDIDVAFSPEGIEQFNSKRKIPVYRLPFFEEGEKKNELGNKGKYVEAAKGTNLFFGVYQGKGKRTYATIPLNEVIERQKQGLPSVPERNEKGEPLLFSLSPNDLVYVPMEGEIAETIDFNNLSKEQKERIYKTVSFTGNECHFVKSTIASLIKSYDAKSKIGELGSLNKLEVTISGDSRIKEVCIKLKVDRLGNITKA

SEQ ID NO: 4089 - protein, 1450 aa, unidentified
  REGION 1..1450: note = Description of Unknown: Cas Enzyme sequence
MKHILGLDLGSNSIGWAFVQQDFENKQGKIIATGSRIIPMDQGILGDFERGNTVSQTAERTTYRSTRRLRERHLLRRERLHRVLHILGFLPPHYDAQIDFTKRYGKFIDNAEPKIAYNNGNFIFMNSFNEMIEDFKKHQPQLFYKKSNGEESKIPYDWTIYYLRKKALSQKITQQELAWLILHFNQKRGYYQLRGEEETENPNKEVAFHSLKVVDVEAEAPNKKGEIWYTIRLENGWIYRRTSKIPLDDWKGKTRDFIVTTDLNDDGTIKVDKEGKEKRSFRAPDENDWNLLKKKTEHDIDFSGKPVGTYIYDHLLQNPNQKIKGKLVRTIERKYYKDELKAILAKQIALQPELFTETLLADCIRELYRKNETQQQNLLSKDFLHLFVEDIIFYQRPLRSKKSTIANCTLEKRSYIDKETNERKDTPIKVCAKSNPYYQEFRVLQWLQNLRIYEIETDREVTAEFIETPQDCEALFNFLMSQKEIDNKGLLKYFLFAKNPQIKDKAAKSELKKWLTTYRWNYVYDAADNSSKKYPMNETGYELQRYLQKVEGLPANFLTFDTTYRLWHLLYSVKDKVEFEKALKKFAQEYQLDEASFVDSFKNFKPYPNEYGNFSEKAIKKLLPLMRFGNHWDFNRIDVSTQKRIDDLINGVANEDIRTIIREKAEKYQLNSETCFQDLPLWLAQYVVYNRHAEATDIEKWTSVSDLEAYLEDFKQHSLRNPIVEQVVTETLRVVRDIWQQYGGGQANFFDEIHIELGRELKKTAEERKQLSDKNQENESTNLRIKKLLAELKEDASIQNVRPYSLVQQELLKIYEEGVFSATDEVEEDIQKIRKKAEPSKADLQRYKLWLEQKYKSPYTGEVISLTKLFTEEYEIEHIIPQSRYYDDSLSNKVICESAVNKLKTNQLGLEFIQNHHGEKVRITGNKEVTIFTEEQYKEFVKKHYANNSAKQQKLLLNEIPEKMVARQLNDTRYISKYISEILSKIVRSDEKDEGVNSKNIIPCTGKITTALKQDWGLNDVWNKLILPRFERMNQLTQTQLFTSYNDRLQKNLPTVPIEYSQGFQKKRIDHRHHAMDALVIACATKEHINYMNNQHALDKSKDKKEKQQSRIDLRTILCEKKNNNWQFKKPWSTFTQEAKEALEHIVVSFKQNLRVINKATNYYEKWEEKNGVLVKKKVKQEGTNWAIRKPLHKETVSGKIVLDRKIGKDKILTATRKAVDITFTEKIISSITDTGIQKILLNYLKYKGSPEVAFSTEGLEELNKNIAQYNNGKKHQPIYKVRIFEEGSKFPLGETGAKATKYVEAAKGTNLFFGVYQGKGKRTYATIPLNEVIERQKQGLPSVPERNEKGEPLLFSLSPNDLVYVPMEGEIAETIDFNNLSKEQKERIYKTVSFTGNQCFFVQEAVATPIVNKMEYSPLNKMERDILGTMIKEVCIKLKVDRLGNITKA

SEQ ID NO: 4090 - protein, 1480 aa, unidentified
  REGION 1..1480: note = Description of Unknown: Cas Enzyme sequence
MKKILGLDLGTNSIGWAVVNEAENKEEKSSIVKLGVRVNPLTVDELTNFEKGKSITTNADRTLKRSMRRNLQRYKLRRENLIEIFKNSKFISDETILAETGNATTFETYRLKAKAATEEISLDEFARVLLMINKKRGYKSSRKAKGNEEGTLIDGMDVAKKLYEDNITPGQYCLKLLQNGKKCFPDFYRSDLQNEFDRIWNKQKEYYSFLTDALKEELKGKNEKATWAICAPVKAVDKNKNDNFVWKWIEAETKWNNEEGENEIIEVEKMLVGEKRNGSLTEQKIENLEWRVKALSEKIPPEQLIVVFQKINGQINGSSGYLGAISDHSKELYFKKQTVGQYQMAVLDKNPNASLRNMVFYRQDYLDEFEKLWETQRQFHKELTDELKAEIRDVVIFYQRRLKSQKGLISFCEFESRQIEVEIDGKKKVKTIGSRVIPRSSPLFQEFKIWQTLNNVEVSVKGRKKIKIDNTLSLFDDIDKFEINGRRLLEQEEKEILAKELFIRDKMSKNEVLKLLFENPQDLDLNFKKIDGNSTGYALFQTYGKIIEMSGHDAVDFKKPVNEVVNYIQAVFEGLGWNTNILNFDSDKELDVQPYYKLWHLLYSFEGDNSKTGNEKLIEKLMADYRFDKVSANILANVTFLDDYGSLSAKAIHKILPHLKEGNGYDVACVYAGYGKHSKSSLTTEEIQQKVLKEHLTILPKNSLRNPVVEKILNQMINVINQLVDEYAIPDNNGEKHFDEIRVELARELKKNAKEREELTKLINDNSKLHEEYKKILSQAPFNLSHISKTDIIRYKLWLELKANGYKTLYSNTYISPAEVFNGKFDIEHIIPQARLFDDSFSNKTLELSDINHEKGNKTAYDFVQDKYGEEGLENYLQRVERLYNIKSRAEDNDEIKLAALISKTKYNKLKMSEDDILDGFINRDLRNTQYIAKKALAMLNEITRRVMATSGSITDKLREDWCLVDIMKELNWNKYKALGLTEVIENKRLDDQGREKVNKIYRIKNWSKRNDHRHHAMDALTVAFTKDVFIQYFNNKNASFKPNSNEYAIRNQYFENGKAKSPMPDEFRAEAKRQLENILISIKAKNKVVTHNINITKKKGGNNKKTQQTPRGQLHLETIFGSQKQYFTKFEKVNASFNAEMISKVANKKEREALNKRLSEFDNDPKKAFTGKNSLEKNPVYLDEQHFVKCPDKVKTVWLEAIYTIRKDISSDLKIEKVVDKGVKSVLEKRLKEYGGDAKKAFSNLNENPIWLNKEKGIAIKRVTITGISNAIALHDKHDNLGNIILDKNGNTQPVDFVNTGNNHHVAIYKSPVIDKKGDFVKDENGNIQYELQENVVSFFEATTRSNLGLPIIDKEYNKDKGWQFLFTMKQNEYFVFPHYEKYIDGAGVEREQMIFNPLDHDEEWFKNPNNYAEISPNLFRVQKLTQGDYSFRHHLETTVENNNVLKEIIWKRYGLNKIKNIVKVRINHIGQIVQIGEY

SEQ ID NO: 4091 - protein, 1137 aa, unidentified
  REGION 1..1137: note = Description of Unknown: Cas Enzyme sequence
MAKTLGLDLGTNSIGWALVDNTENKIVGMGSRIFPEGVNELGMGQKEISKNASRTDARGTRRQFFRRRIRKIYLLKMLVKHNLCPLDITDIKTFDSKIFNNEKLVEWFKLNPYELRAKAINEKIELDELGRIFYHMIQRRGFQSNSRSAGKEEGKIYDGNTKEGKVGISETQKELNGKTLGSALYDLYPEEGQPFKDGQKRIRNRYTTRQMYINEFETMWDKQKQFHSELTDDLKTLIGGRKKEGYEVDGVLFHQRPLRSQKHLVGYCTFEPNKTKCHKSAIPFEMFRIYQRVNTVEYNGNNLTREERETVVNLLLSKEKVPFKQIRKELNRLDSYYQFNYKDDDKIVGSHTISNFSNKKFFGEKWFGFTEKEQEDIWHILYFFEDKDKLKKYAIDKWNFDEEKAEKISKFNLKDGYSNLSRKAINNILPFLKNGFLYDVAVVLGGIKNAFGDKWISLSEDDIQLIEDNTESIVRRGWKGGFIDKIKEFLSDEFKLNQKDLDKLYHHSANIGVKEILDKLPVGIEADREIQNIRNPIVITALFELRKLINEIIDLYGKLEEIKIELARDLKISKTKRNEIKREQKRLEDENDRIINELRNLNKVITHENILKYKLWEECNKICPYTGKEINLNELFDGEVQIEHIHPWSKSLNDSFMNKTLCYADENRAKGDRTPYEFYFQEQGEEKWELVKSQALSCFKNKQHYPNAYNKFKNFIKQKHDDDFVSRQLNDTRYISKEAKNYLSIICPKIMVAPGQMTANLRQKWGLNNVISDGDTKSRDDHRHHAIDALVMACSTVGHLQELSKWNRYKRSYELKDFPKPWETFFEDSKHMVSQILVSHKKTNNLLTIRNHKIKKDGRIYKNKGISARGQLHKETVYGRRKSPKEEEHAYHVRKPIESLTTRKQIDKIVDPIIRELIHNKIIKLGGFEKGEKIPQNTFFITDDKGNKKPQIFLTNKNGDPVPVRKVRIREHLGKAEQLKEEMNQYVNPRNNHHVLVYTVNGIFKSRVVSFWEAVERKKLKKPIIQLPEIDSNGDIITTVQINDMFLLGLSNDVIDWNNMKNELIVNHLYKVQKTSKKPDLTMKEICFRKSIDSRSDKEAGADYIYVKGFGDGKTGWKTFNPIKVFITPTGKIKPIK

SEQ ID NO: 4092 - protein, 1494 aa, unidentified
  REGION 1..1494: note = Description of Unknown: Cas Enzyme sequence
MRTILGLDLGTNSIGWAKVCINDDGNYVREIKLGSRIIPMSQDTLSNFDKGVTDSPTAARTGFRGIRRIRERVLQRRERLHRVLHVMGFLPSHYEKAIGWNREEATTYGKFLDNGEPKLAWERQEDGSMRFLFMDSFHEMMADFAKCQPGLVADGRKIPLDWTLYYLRKKALTQAIKKEELAWILLNFNQKRGYYQLRGEEDEEDPTKREEYYELKVVSVEAAEEGKGGNTWYNVTLENGWIYRRQSKIELNDWTGKIRQFIVTTEYEKDGITIKKDKNGEVKRSFRAPSEDDWGLRKKRTESRLEDSGKTVGEFIYDHILSEPADKIRGNFIRTIERKFYKKELEAILREQSKYHKELKDLNTLVNCIKELYPNNKAHQDSLMKKDMIYLLITDLIFYQRPLKSKKSLIADCPYEYYEYVIKETGEIKRQGIKCIAKSNPYYQEFRLWQFIINLRLFDRTNDKEITSEYLSSMEDYTKLFTYLNDRKEINQEILLKDFFIQKKVKMGMEKEFPIRWNYIEDKEKKYPCNETRHELLAALDKAGIDHSWLDDKERFYRLWHLLYSVESKEEAEGALRKLNDNEDFVNAFLKIKPFKKEYGAYSEKAIKKLLAVMRIGTQWNEDDICEQTRNRIQSIINGDIDEKIKERMGRTFSQLSDFQGLPEWLACYVVYGRHSETTDIQRWTKPENLMSYIKGFKQHSLRNPIVEQCILETLRTVHDIWKEAGHIDEIHIELGRSMKSTADQRARMSKSILQNENTNLRIKSLLMELKNAKEFENVRPYSPMQQEILRIYEEGALQELTKEDDQYPEISKISQMAQPSAKELLKYRLWLDQKYCSPYTGKPISLSKLFTSAYQIEHIIPQSRYFDDSFSNKVICEAEVNQLKSNMLGYEFIKKHSGEIVHCTMVGDVKILDAKEYYNFVTEHYANNRRKKEKLLLEDIPQEFLNRQMNDSRYISKKVMALLSNIVREEGEQEAKSKFVIACSGGITDRLKHDWGLIDVWNSIVYPRFERLNKLTNTENFGRWENKEGKQVFQTSLPLELQRGFSKKRIDHRHHAMDALVIACASNNIINYLNNESAKSQEKREDLRKKLCDKNRIIRKPWETFTQDVRTALEDVVVSFKNYVRVINKATNYYEKYDKNGKKGIAEQKGQDMWAIRKPMHKETVFGQVNLRRKVTVKLKDALEKIPAIYDKELRDYINILVAKQFNKKQILAHFKSINYRLNMKSVDKVDIWQFSDEKEPMVATRKSVDTSFDTKRIATITDTGIQKILRNYLETKDNDPNIAFTPEGIAEMNKHITEYNNGKQHQPILKVRVSEPKGAKYQVGETGNKTSKFVEAQKGTNLYFAIYEDKEGNRSYSTIPLNEVIERLKQGLSPVPDTNEKGIPLKFHLSPNDLVYVPKTDEENEIKTGQIYKFVDSSGTTANFVPHRVSNLIYNVDKKIAENFCNHEIIQNEYGIGSQQSKNQKSITGEMIKAVCWKLEVDRLGNIHKIIK

SEQ ID NO: 4093 - protein, 945 aa, unidentified
  REGION 1..945: note = Description of Unknown: Cas Enzyme sequence
MPPEELAIVIQEINGDINSSSGYLGAISDRSKNLYFNHLTVGQALMRSLETNPNTSLKNTVYYRQDYLDEFETIWHTQAKFHKELTDELKHTIRDIIIFYQRRLKSQKSLIGICEFERQDQTVVKNGKEKKIVIGRRVIPRSSPLFQEFKIWQTINNIEVSVADTKPRKNKKSPAGASLFDGVNDVDMLDVKGRRNLTQEEKELLADELSIRESMTKNEILKLLFKKPSELDLNYKAVDGNKTGCLMYKAFSDIMELSGHEPVDFKLPAKDIKAQVAEVFSALGWNVNILTFNPLLPLDEQAQYRLWHLLYSFEGDNTITGDGKLVDKIAQLCGMEKEYAKIISTISFINDYGSLSAKAIQKIMPYLKEGNQYDVACGYAGYRHSAASLTKEEIENKELKDRLELLPKNSLRNPVVEKILNQMVNVINEIIKTYGRPDEIRVELARELKKNQKERDALSKSIASATKEHESTRALLQKEFGIQHPTRNDIIRYRLYEELKPNGYKTLYSDTYIPKEKLFSKEFDIEHIIPKARLFDDSFSNKTIEAKSVNIEKSNKTAYDFVLEKYGETGLERYLKTCEDLFADKKTKLKKLKMQESEIPDGFIERDLRNTQYIAKRALTMLGEICRRVVATTGSITDQLRNDWQLVDTMKELNWEKYRALGLVEYHQDRDGRQIGHIKDWTKRNDHRHHAMDALTVAFTKDVFIQYFNNKNASSKPTTNEYAIKSKYFADGKAVAPIPLHRFRTEAKQHLANILVSIKAKNKVVTQNVNKSKGKGKERNLKIQQTPRGQLHLETVYGSHKEYEIKEEKVNASFDEAKIMTVTSPVYRAALLWRLQQYGNDSKKAFTGKNSLDKNPIWLDDEKTNSVPAKVKTTTFNTVYTIRKQIDDKLKIDKVVDLGIRRLLQERLDKYDGDAKKAFANLEEEPIWQNKEKGIKLKRVSIYGH

SEQ ID NO: 4094 - protein, 1511 aa, unidentified
  REGION 1..1511: note = Description of Unknown: Cas Enzyme sequence
MKEKHILGLDLGTNSIGWAIVKETTDANTTDAQKSIADAGSRIIPMDAAMQSDFAKGNTVSQTHDRTQYRGVRRLRERQLLRRERLHRVLTLMGFLPKHYANALTRFGKFKPEMEVRLPWNNDLEGNPQFIFMKSYEEMLQRFWSEQPELMHNNMKVPYDWTIYYLRQKALREPITGQELAWILLNFNQKRGYYQTRGEDAETDKTKEEKYYALEVIDVVDTGEKRGKDTWYNVFLENGMIYRRTASEKPDWIGKVKEFIVTTPLDENGMPKKDKEGEIKRSFRMPNSEDWGLQKIKTENDIHQSGLTIGEYIFRALLQNPKQKIIGGLVRVVERDMYKDELRQILEKQKEFIPQLRDAQLYADCIAELYQHNKAYRLSIANRDFTYLLLNDIIFYQRPLKSKKSMIDECPYEYHEYKDENGETKKRHIKCISKSHPLYQEFRLWQFVNNLKIYTSGKDAEGREIDDIDVTSDFLPDEESRANLFDFLNDITNIKQDELLTKYFKIKKPKGKGAKLPYHWNYVQDRQYPCNTTRGEIVSRLSKAHIETSFLNDKKAELHLWHILYSVCDRIELRRALSSYATQYALDKDFVEAMAKFPPFDSEYGAYFAKAIKRLLPLMRMGHHWHLEDIDPQTVERINHIIDGEVDETISERVREKAADLTEIGQYRGQPLWMACYMVYGRHSESTDSAHWRTPADIDAYLSAFRQHSLRNPVVEQVVTETLRTVRDIWEKHHHIDEIHIEMGRELKSPADKRRKDTERMLNNENANLRIKALLTEFLNPELGIENVRPYSPIQQEILRIYEDTVLNSVDELDNDISNILKKFADAKNRPSTNEVKRYKLWLEQHYVSPYTGQPIPLTRLFTPDYEIEHVIPQSRYFDDSMTNKVICESEVNKLKDNALGFEFIKQHHGETIQLSGGRHAVRILEVDSYCELIERIYHNNRTKKRKLLMDDIPAEFIERQLNDSRYISKLVKSLLSNIVREEDEQEAISKNVIVCTGSVTDRLKKDWGINDVWNHIIIPRFLRMNELTDSQNFTSNSANGHLIPAMPLELQKGFNKKRIDHRHHAMDAIVIACTTRDHVNLLSNEAASPKSNTNRYQLSRKLRRYEDIVVNRSDGPKRISVAKEFMLPWIGFQTDVERALRNIIVTFKQNLRVINKTSNHSLRIVDGKKKLVAQTSGDSWAIRKSMHKETVHGEINLRRIKTSSLKDAMQNPQRIVNSDLRAKLKELIMHGYDEKMIKKYFDTYRDSWQDVNLKKIELWYFTKETADRFFATRKSIDTSFTADAIKNKIADTAIQKIMLRHLERYNNKADLAFSPDGIDEMNRNITELNDGHFHQPIYKVRTYEKADKFAVGHTGNKKSKFVEAAKGTNLFFSIHEDDIIDKTTGDIIKKRSFKTIPLNVAIEKMKSGLPIDEEATFILSPNDLVYLPTEAERKSGKITMPIDKERVYKMVSSNKFQAFFINERVASAIQDKFEFSPLNKMERAITGEMIKETCIPLKVDRLGNIIKIGV

SEQ ID NO: 4095 - protein, 1417 aa, unidentified
  REGION 1..1417: note = Description of Unknown: Cas Enzyme sequence
MKKILGLDLGTSSIGWAIVNEAEKSNENSQIVRLGVRVNPLTTDELSNFEKGKSITTNSERTLKRSIRRNLQRYKNRRAVLIDILVRNKFIDDNSILSESGNNSTFETYRLRAKSATEKVSLYDFARILLQINKKRGYKSNRKVKTSEEGQLIDTIDVAERLYNDNLTPGQLSLMLLEEGKKYLPEFYRSDLQDEFNKIWNFQKQFYPELLVEQLFLELKGKNRSQTGAICFKLFNIDGIKRQTKGFDLKLENYRWRSNALKEKVDLEVLTIIFQELNSQINNASGYLGDISDRSKVLYLNNQTVGQYQMSELERNPHYSLKNQVFYRQDYINEFNKIWETQSIYHKELTSELKKEIFDAIFFQRPLKSQKGLISFCELESRKVEVEREGIKKEIIIGSRVCPKSSPLFQEFKIWQILNNVQVFSGRSKRFLLQEEKEILFEELNYKEKLSKNDVLKLLFKNYKDYDLNYELLDGNKTQSELFKAYETIIELSGYSKYDFTKMESKKAKQIVFDIFTKLGINTEILNFDSSLKGHELEHQSMYSLWHLLYSFADDNSKLGNEKLVEKLSEKYGFHTEHAKILANIAFQSDYGSLSAKAIRKILPYMKDGNDYSVACEYAGYQHSKKSLTKEQLNNKVLKDKLELLPRNSLRNPVVEKILNQMINVVNDLIKEYGKPDEIRIELARELKKSAKEREEMTKAINETTKLHEEYIKILKASPYNLTNVSRNDIIRYKLYMELKGNGFKTLYSNTYIPQEKLFSKEFDIEHIIPQAKLFDDSFSNKTLEVRQVNIEKSNATAYDYIVNKYGNQEALDYRNRIEKLYKDKVIGKTKHDKLLMTEDEIPSGFINRDLRDSQYIAKKAREILEELVKYVVPTTGSVTDRLREDWQLVDVMKELNWEKYDRLGMTEIVEGRDGQQVRKIKDWTKRNDHRHHAMDALTIAFTKRSYIQYLNNLNARIQKGVDDYIDLDMVELSDLSKEERAQAVYGIEKKEMYRDKHGKLRFNPPMQLNKFRVEAKHNLENILVSIKAKNKVTTKNINITKKKGGTNNKIQLTPRGPLHKETIYGCSKRCVTKLEKVNGSFDIDKIKTVAKTAYRDALLERLRMFDNEPKKAFTGKNTLEKNPLWLDNMHTQKVPEKVKTVGYETIYTIRKEISPDLKIDKVIDTRIRDILKERLAEHNGNSKVAFSNLDENPIWLNKGKGISIKRVKISGVNNAIALHDKHDKDGKLVLGVNGKKLPVDFVSTGNNHHVAIYRKPLFDKNGQQILNEKVEPQFELDERIVSFYEATSRAILGYPIVDRDYKKDEGWQFLFTMKQNEYFVFPCYDEEGNMVFNPKDYDEEWYLNPDNYAVISPNLFRVQKIATKDYVFRHHLETTVEDNNILRNITWKRITNLILLNNVIKVRINHIGNIVSVGEY

SEQ ID NO: 4096 - protein, 1460 aa, unidentified
  REGION 1..1460: note = Description of Unknown: Cas Enzyme sequence
MKNILGLDLGTNSIGWALLQTDEDGHYQPKINLGSRIIPMTQDVLSTFEGGKPIETQTAARTQKRGMRRLNERRQLRRERLLRALHILGFLPAHFDQAIGWDRTHGKTYGKFIDVVAEPKIAWARDAQGQMQFLFKDSFEEMMLDFEKYHPELVAEGKKIPYDWTLYYLREKALRFPISRQELAWILLSFNQKRGYYQLRGKDEVPEEDEDKSKRVEYCELTVKSVTFNPDEKVSDKGRWYSVELENGMIYRRQSKESLDNWIGKKREFIITTDLDEKGNEKLDKDGFVKRTFRSPKPEDWTLRKVRTEHGVEQSGLTVGAFIYKHILNDPSGKIIGKYVETIDRKFYKTELFKILAAQSEFHDELTDPKMLEAVSEELYARNEARQVSLKQKNMIYLLIEDILFYQRPLKSKKSIISECPYEYYKYVDKETGEEKIQHLKCIAKSNPYFQEFRIRQFIQNLKIYDATAIGNVDVTNKYLPDAETYEKLYQWLADQEAVGQDDFLKNFLGLKKPKGKDSVYPLRWNYVEDKKYPMGETRSLILKGLQKAGVSAELIAEPSEEYRLWHLLYSIDDFDELQGALRKYAEAKQLPVEEFVKVFAKLKPFDKDYGSYSEKAIKKLLPYLRTGVALHDAWQEVYQHWSEGLDTKKWESPSDLHSYICQFQQHSLRNPIVEQCILETLRTVGDIWQRFGHIDEIHLELGREMKNPADKRKRIADQNLRNENTNLRIKALLIELLNDGKVEGVRPNSPMQQDILRLYEEGALLELKSDDPDYKEILAISQMAQPSASQLTRYKLWLEQRYRSPYTGKVIPLAKLFTSAYQIEHVIPRARYYDDSLSNKVICEAEVNKDKTNLLAHEYICKNEGKVIQTVSGPVKVFLKGEYEEFVRDHYAGNKGKQQRLMLDDVPEEFIQRQLNDSRYISKVIKSLLSNIVRVEDEDQDISKNLIVCTGGVTDRLKKDWGMNDVWNHLVYPRYERLNQLTGTNLFGQWETKEGGKRVFQTSMPLALQKGYSKKRIDHRHHAMDALIIACASRNIVNLLSNQNASDRTQREDLKHLLCGKGGLFVKPWDSFTQDAEQALAGIVVSIKNKVRVLSRASNLYEHIDADGKKRKVSQKGENQLAVRKPLHKETIFGHVNLQRTKMVSMDAALNDVRSIVDKELRNRIIELFSQGLDKKKIKKQLAEENVGKQIEIRYFTDSDTPMVAVRKKLDDTFDTKKILAISDTGIQKILLAYLGAKGGNVKEAFSPEGIAELNENIALYNGGKNHQPILNVRVTEPMGEKFQIGYTGNKASKYAEAQGGTLLYLAIYEDCNGVRSYRNIPLMEAVERIKMKENPAPAFDDKGNPLKFILSPNDLVYVPTEDEIIQGKPEIASLNPDRIYLYRSASGTDVYFIPHRISKPILAIGKDHNVAKNGVVINEISVGNTLGKTAKSFSGEMIKSICWKLEVDRLGQIIKIIR

SEQ ID NO: 4097 - protein, 1610 aa, unidentified
  REGION 1..1610: note = Description of Unknown: Cas Enzyme sequence
LLFAEKMYCNNNLFFLHLQTLVKKLLKKKRNTMENNVFNTARKILGLDIGTNSIGWALIDENSIDNEYVEKIIASGSRILGMDTDILKKFDQGQKVSINENRRIKRGARRLQQRYKNRRKRLLQVFKLLNWLPENFKIGGSNEIPDKILIPENIKYERINKLKEFLNLTENENISDELLVYFLKFYALENQITKEEFATILYHYNQKRGFKSSRKEKKTEIIDKKEEEEEQIIENFKIKNITDTGFKTKKAQNFILKIETEERGIGTFFYSSIPNWIGKNIDFIVTEKYNKKLKKDEIYYNLPKSDDIKFGKVISIVDTNEKTRFASIFKLEFQLSDGKIIDGFANKKSLPDWIGKEMEMNIKTETNKDGEATIIFKQVDSSNISETDNAKRRDELEKYLTENPDLTVTKYFLDNLKKERNFRIKNNIVYRKRYQEELLKIYEKQKELNSDFLKVSENNLQLIAKELYKNNKQNQNAIIKNDLKYLLVNDIIYYQRPLKSQKASIGNCTFEKFNFTDKTGKEYTSYYKVCPQSSLLFQEYRIWQNIHNLKIENIRTREDVTTEILTSQNKEKLFELFDNHVKVSLKTILKTLNLTEKEYELNFKTELWGNETKNKILNKVPDDKKIIFTENHEKLHFLWHILYSLNEDKDVINAIKSNFGFDEEICKNLAKINFDLKYASISAKAIKKVLPLMRCGKYWNEKDICPQALENIDRITETDEFIKKMPDKTRTKLFELKTLNDFQGLSSYLALSVVYGSHSDLDKEETYKSWKEIQPITLNSLRNPIVEQILNETQQVVKDIWKTYFAENERPDEIRIELSRELKNNAKEREQITKAIGNSTKDNERIKQILTELKLGSSDKQRDIEKLKLFIESGGEDSQKKFNDIKSFSKEDLKFKLWLECKHVSPYTGEPIILSELFTAKYQIEHIIPKTRFFDDSMQNKTICEYFINDEKGALTAYEYMKSKSYKNCKFGSFEEYEKFVTETFKKNKAKNRFLAKEIPQDFVNRQLKDSQYIAKKATQILSRICNVTTTSGGITDFLRQNWGVNDIFKELCQERYERLTAIKPDIDWITKKIITDHETNTEREVTVYKDFSKRIDHRHHALDAIVIACTKQGFIQRINNLHQEYQKFIYDLVKKEEVKKILEKNNIEITYNFAKDILQINACEDLRQYLKDKKVKSLYKIRQPHKHFTTIVKDALENIIISHKKKNKILTKARNFYQKYEFDENGNPIKKRKFKQENTIYSVKGALHQETINGMREIRTYKSVSIKEAIIKLDKIADKKHKIKILKATADFNNDIKKIEKYFKENPLTIDGKVAIYEHTTVYTSKQELIFKNIQSKVYTRKYIGKILDKETANQMLLHLVYENIKEIPDKELLNNKLYLDYILERERPFYEIDNSTKFKLNSLIEFIDKNCEPKNAFNADGVNKFNENRKIPVLKVTVYETSKEERKCLNPDNKFNKKFVQIGNNPFFVIYEKFASETQTLKRDFESLNLYDVVTCMINGMDYIPRKEGYEKYFFLQTDDLVYVPEKDENNAEIDWNNKKEISKRIYKVVKSSGKTCYFIPHNIAKILANKIEFDTQNCIATLNGMSIKEFCFKLEIDRLGNIKPVKS

SEQ ID NO: 4098 - protein, 1692 aa, unidentified
  REGION 1..1692: note = Description of Unknown: Cas Enzyme sequence
MKRILGLDLGTNSIGWALINHNFENQQGEILGLGSRILPSDPAILSRYSSGLPLSKAKAGQAFTPTGIRTDFRGTRRLGERDALRRERLHRVLNIMGFLPQHYANEIDFEHRLGQFKKDKEPKIAYRKNSNGKFEFIFQKSFEEMVADFRETQPQLFYIKPNGEETKIPYDWTIYYLRKKALSQKIEKEELAWILLNFNQKRGYYQLRGEDDEKNNIKEYCTLLKVVSVEKGEKDKKNDNKTWYKMTFENGWEYSATFLEEPNWLNTEREFLITEEYDDEGNIKTVKDRKSDTTGKEKRKITPLPSFQEIDAMSTEAQNKIYKKIKARTEITITNSGKTVGAYIYDTLLQQPNQKIRGKLIRTIERKFYKDELKQILKEQKKHHSELRDKNLYNSCINELYEYNEDHKNNISKKDITYLFIDDIIFYQRPLRSQKSTIGNCSLEYRKHKINKKDENENPIKGVFEKDKNGNDIIVKKYLKGIPKSNPYYQEFRVWQWLYNLKIYTRADDKDVTSKFIKDTTDLEKLFEFLMAKDEVNNKDLIEYLIEETYRNNIEKEQRELFPRLNDEKINTKVRSKLKEKIKELLPKYRWNYVFDNSKDKEEDKSKKYPCNPTGSEIRKRLENVINLPADFLTKEKEYQLWHIIYSVKDKNEFEKALAKFANKNSLDEISFVESFKSFKPFESEHGSFSEKAIKKLLPLMRLGRYWEESEIPQNVIKRAKSIKEGLADIESETDIENVADDAIPKQVLKSFFKLKNSDIIDFIRGLRLYQASYLVYGRHSATSDKWIMSNDIQEFLYEFRQHSLRNPIVEQVVTETLRVVKDIWEQEAIRQNLQPTMVYDEHKKSEVKSYPKVFDEIHIELGRDLKNTAEDRQAITNNISENETTNLRIKKMLLEFSKDDCFKNQEDFSDYCKDNENPTFYQKGNNPIRPYSRSQFDILKIYEDDVLKQFSDQELKNEKFDDAGTNEAKNVFDISNKSEPTKAEILRYKLWLEQKYQSPYTGKIIPLSKLFTPAYEIDHIIPRSRYFDDSYSNRVICEAEVNLLKSNKLGLDFIKNHCGQIVQIGEKTVTIFNESEYTNFVLKHYKNNNKKRRNLLLDDIPDKMIDRQLNDTRYISKYVSGLLSNIVRKDTNDNGVNSVNLIPVTGAITSKLKHSWGLNDKWNELILPRFQRMNHLTNSEKFTTKNREGHTIPAIPLEYSKGFQMKRIDHRHHALDALVIACATREHVQYLNNENAKSQKHHLQKGLAQILRKFERIKIKQMVKDKEGNWVQSDKTEKRKVPKAYIKPWANFPADAKNQLEKVIVSFKKNNRVINKTTNYYQKWQKQSDGSMKKVLVKQEKGDSWAIRKPLHVPMPYGLKEYSFDNLKIAENVGKKDFIIDDYVRNEVEKYFNLNNRKITDTQKFLMKNPIKDKDGNVILTTDFNIRSKKFRKRMPILKLADRSNGRGITSFDSMIKFLNKISDRTLKNDLFNHLKNNNNDINTAFSIEGIEKFNSKRKIPVYNLPIAESGEKRFALGNSIGSKHKWVEAEAGTNLFYAIYIDDEGKRSYDTIPLNIVIERQKQGLPSCPELNDKGHRLLLNLSPNDLVYVPTEDEQNNPISVDFNNLTAEQVKRIYKFVSCTGGEGHFIPNTNASEIIKNENGTNSKSERVQDFYDGKTILDNSEKPIQIKSVCWKLEVNRLGQIEKIIR

SEQ ID NO: 4099 - protein, 1389 aa, unidentified
  REGION 1..1389: note = Description of Unknown: Cas Enzyme sequence
MKKILGLDLGTTSIGWAFVKEAEDDSEVSSIIKIGVRVNPLTTDEQTNFEKGKPVSVNADRTLKRGSRRNLQRYKQRRQNLFNILSKAGIINENTILAEDDKKTTHTTYSIRARAATEKVEMKEFARILFMINKKRGYKSSRKAKNEDEGQLIDGMEIALRLYNENLTPGQLCYQLLKEGKKNMPDFYRSDLQAEFNKVWDIQSQFYPDIFTTEFKKDIEGKGQRSTSATFWVKYKFNTAENKGTWEERKLRAYQWRSEAIRKQLTVEEAAFVITEINNNINSSSGYLGAISDRSKELVFNKQTVGQYLYKQLQLNPHTRMKNQVFYRKDYFDEFETIWKTQKQYHPQLTEVLKDEVRDVVIFYQRKLKSQKNSVSFCEFESKIVEIEKDGKKVKYTMGAKVCPKSSPLFQEFKIWQNLNNMEVQNKKSKEVLSLHQDARQLLFDSLNIKGNLKKDQIFTLLGYKPKEWELNFASIEGNRTAQELYQAYLKMLENDGHDDVDMETLPAAEIKTMIQVFFETQQIDTDLLKFNAELPNGAFEMQPAYQLWHLLYAYEGDDSATGNEKLYNLLSTKFGFKKEHAQILANIPMQQDYSSLSAKAIRKIFPFIKESKYSEACRLAGYNHSSYLTKEENENRPLKDCLELLPKGSLRNPVVEKILNQMVNVVNTIINDDALGRPDEIRIELARDLKKNAKEREKATLDINRAKIEHDGIRLLLIREFGIKNPTRNDIIRYKLYDELKFNGYKDLYTNEYISREELFSSKYDIEHIIPQSRVFDDSFSNKTVVPRYINLKKDNATAYDFIDNAYGEEKLSEYKIRIEAFIKFYPEKRAKYKKLLMKGDSIGEGFIERDLRDSQYIAKKAKAMLHEVCRNVVTTTGSITERLREDWDLVNVMQELNIDKYRKLGLTEMIEKKDGNFKERIIDWSKRNDHRHHAMDALTIAFTRRSHIQYLNNLNARKKEDKLGKEIYGIEQKETYFQIDDNGNKKRRFKSPLNNFREEAKEHLESVLISFKAKNKVVTKNKNKIKSAKEKEPQKTLTPRGQLHKETVYGKIQQYIVKEEKVSGKFDEATIAKVTKPKYKEALLKRLRENNNDPVKAFTGKNALTKNPIYLDVQNTVLLPEVLKLSWLEDDYAIRKDISPDLKIEKVIDKGIREILYKRLNEFGGKGKEKEAFSNLDKSPIWLNETANIAIKRVTISGVKNAEPLHFKKDHHSNDVLDKSGKPIPVDFVSTGNNHHVAIYRDENGNLQDEVVSLYKVITERVNQGLPIVDKTYNQHLGWQFLFTMKQNEYFIFPSADFYPLEIDLLNPVNNKLISSHLFRVQKFSKVMYGNSAVRDYVFRHHLETAIEDKKELKDVTYKSIKSLPYFENIVKVRINHIGQIIKVGEY

SEQ ID NO: 4100 - protein, 1305 aa, unidentified
  REGION 1..1305: note = Description of Unknown: Cas Enzyme sequence
MKFILGLDIGTNSLGWYLLRLENRKYEIVDRGVLIFPIGTIVDAVKGLEKTKHTQRRLFRLTARNRDRRKLRKWKLAELLKRIDFLPERLEKKDFHFLDTHKIKNHYQSFELYQLRTKALDEAIKKSDLGRLFFLLNNYRGFKSSSKSLSDEIDNKKNDDEGKVKGGIETLNEFMMAAEARTYGEYFFKMHLKAKDLYDRGEWHNPNEPIDERALDENGAPFLTESHGIRREHGRYTSRKIYENEFDLIWERQKQYYPDALTGSKKEYEALQEKMYEVPKEERRRLINEFKKTSYWKIKYACIYYQRPLKSAKKYIGKCQFEKNKQGAPISSYSFQSFRIWKQLSDIRYTNQIGNVFNQPLEIEWKKLIFQYLQTHGVVHLKSGKNKTGICGLLNMDEKNTSFNFDNENDDKYIKGNTTYTAIFKILGNETFDKLIKEVDRNGDNKVEKLWHLLYMKKDDEWLRITLNDKISWPELTAVNIDLLADVTLEDGYAAFSSKAINKLLPTLELGFDEHTAFKKAGYKDIDQTFDEQKWHPNSKISNIKNGELRNPVVEKAVTETIRLVNSITDQYFEIDKYTWEIHVETTRDLKKPKKERERMRRENSSKDELREEYARFLNEQRSKGRLQGVLKGEIFKNSPIINKFELWLEMGGDKNDEEFEHFVKVAKLDSEQRIKHKLWLECNRVCPYTEKVISLSQLFSSDTEIEHIIPLSRGLDNSFNNKTLTFHKTNKEKGNKTAYEYLKHDKSYEKRINSGFFSKEKKENFLRQNVPVDFTHAQLSNTSYIAKYVRVKLQEVCKPHQVYFTNGKVTAELRNHDWRLGNLLDKVRYEESSGHDIDFSLQRFNILKKYFYVFLKTREGYDVKLPKSVKDFTTDIQPCLVEEFDKKNNENLNEILKEISLFETYRSASGKKDRSDHRHHSLDALITALCSPIITKELSTINASRENSGEGLYNEYGELSREKIELQLDYNSIKQSLKNILVVNKTNQRLIVSKKNKIKTAVEILVHPSKSIRTSLHQDTYYGKLKNPALQDIDRAEAYMTRFDSFVWDFTDTEKLAVIYDKDLREILKRRIIWFKQKNIIINEQAYQQYPLFRYSPSIYPDVEPECPVSHNGKALPVVKKVRTLYKNYRNIISLPKGKYAAPDGNYIMALYELRENTKNDKIKIIRGFRLLSSFDAVHKKMNGQQLFPDEIKKNEKHLPLMEGCNYLRQGDLVIMYEDEIDKEDLDWNNQEDLKKRLFKVVMLSSEENYGLMAFLKHNISSQKMSYPKGAFQKGKKQLSMTMRHTQINAIKVKIDNLGKIWVS

SEQ ID NO: 4101 - protein, 1523 aa, unidentified
  REGION 1..1523: note = Description of Unknown: Cas Enzyme sequence
MKKHILGLDLGTNSIGWALVEVDENNKPCSIEGMGSRIIPMSQDILGNFESGNSISQTAERTAYRGTRRLRERHLLRRERLHRVLNVLGFLPEHYMNQIDFEKHLGKFFTDLEPKLAWKENANGKYEFIFQSSFNEMVSEFKKAQPYLFENGKLIPYDWTIYYLRKKALSQKIKKEELAWILLNFNQKRGYYQLRDEVDEENPNKLVEFHSLKVIDVVPDESANSKGETWYSLHLENGWIYRRSSKTPLFDWKDKVRDFIVTTDLNDDGTIKTDKEGNVRRSFRAPAEDDWTLLKKKTEADIDKSKKTVGTYIYDALLENPSQKIKGKLVRTIERKFYKEELKQILQKQQEFHPELQDEDLYNEAVRELYRSNESHQLALGKRDFTHLFLEDIIFYQRPLRSKKSSIGNCSLEYRKYRDKEGVEHIEYLKAAPKSNPYYQEFRLWQWLYNLTIYRRDDDTNVTQEFLNSVEDYENLFDFLDNRKEIRQDTLIKFLLEQKGFKGKMLANEASKYRWNFVDDKEKVYPCNETKALIVSRLAKVENLPDGFLKRETEQQLWHIIYSVTDKDEYEKALKSFAERHGLDVASFVENFKKFPPFKSEYGSFSEKAIKKLLPLIRTGKYWDWGKIDESTKKRIDKIITGEYDENIKERVREKAIHLTEEGHFQGLQLWLASYIVYDRHSEPGIAGKWNSVNDLEKYLHEFKQHSLRNPIVEQIVTEALRVIRDIWAHYGNGVKDFFSEIHIELGRQMKLPAEDRKKLSDQVLENERTNLRIKALLAEMLHYPEVENVRPYSPMQQEALKIFEDGVLSSNIEIDDDILKISKTAQPSSSELRRYKLWLEQKYRSPYTGQVIPLNRLFTADYEIEHVIPQSRYFDDSFNNKVICESAVNKLKDNQTSFEFIKNHHSEIVEVGFGKTVRIFEEEEYQKFVKEHYAKNRSKRNKLLMDEIPEKMIERQMNDTRYISKFISSILSNIVRSETNDDGINSKNIVPLNGKITGRLKQDWGLNDVWNDLILPRFERMNELTGSKGFTVYNERYQKYLPTVPLEFSKNFQKKRIDHRHHAMDALVIACATRDHVNFLNNQHALDKKKTKEEKDKTRFDLRNKLCFKNKGDDKGNYNWQFFKPWDNFTVDARNELEKIIVSFKQNLRVINKSVNYYQRYIDGEKVVDKQTKGDNWAIRKPLHKDTVSGLIQLRKTKTVSLNAALDNYCDIVDKALRKHIISLVNQNYDKKKLVKYFKERENQWNGIDITKVAIYFWDNDNVASRVNLDTSFNEKRIIETITDTGIQLILLNHLENYKGRLDDKGKEIAPESLAFTPEGIDEMNKNIVSLNNGKFHQPIFKVRTYEPKGNKFNVGYVGNKKAKYVEAAKGTNLFFAIYADDEGKRSYETIPLNIVIERLKQGLKEVPEKNDKGHNILFSLSPNDLVYVPTKEEIFDEKIDFQNLTKQQIDRIYKVEKFSGVECYFTQHCISSLIKNYDPKSKIGELESQNKLQTTMTKDRLKIIQYCYNLSVDRLGNIQLS

SEQ ID NO: 4102 - protein, 1425 aa, unidentified
  REGION 1..1425: note = Description of Unknown: Cas Enzyme sequence
MTKILAFDLGSSSIGYSLRDTDKNGENIIDQLVLYGSIIFSPGMADNGVSNAAERTKHRSSRHLYRVRRYRIWETLATLIEFGCCPLSKEDLDKWKTYDKKKSLTRQYPVDAVEFEKWIRMNPYELREELATQQLDFTKEENRFKLGRALYHIAQRRGFRSSKGETLKEQEKDINENPAEEIRIDSDLLKKSEEKKSKKLVAYMEEHSLPTVGNAFAKLIKNKVRVRASEYQAVRSQYRDEIEYIFNFQKGLDANGEFFRRIYSTGNDGTIFYQNPIRSQKGQVGKCTLEPAKPRCPISHPEYEKYRAFSFINNIKYRKSINEDWQTLTASQKIKLYKEKFLLVNDFEFDVIRKWIEKEIGLPKDISLSKEHGTINYDDRTNVSVCSVSGRLKSVFGDNWEDYVYQTAKTRKDKEGKEHTVTYTIEDIWHVCFSYDDEDAVVGFAKSIGLDAAQEKKFLNLWMNIPQGYAMLSLKAIRNINRFLVPKENNPSYKGYIYTEATLFAKIPDILGEKQWQESESDILRSLNGLMNDVRDENCILKIVNNLISDYKALDYRDLDYREHFAVNDRSYKLDDSDRKDVEMHTVSFFGKSVWEKKPEDEREEILGKVEELYQNFFSSSKRDYYNLPKLGDRIKLYLSNKFPELRCCNEDADSQSQCNCHACKKLNQLYHPSMVEFYRPVVCNGKKLLGSPVTGSFKNPMAMKVLHQLRRLVNGLIQKGLIDEDTRIVVETARELNDANMRWAIEEYDNIREKENKAIIKAIKEIRKDDSEVGDSILEKARLLIEQSPDYLFDYMDDENMIDKKGTVKKKNSGLIYEKGVTKYRLWLEQGMQCLYTGKIINLSDLFDENITDIEHTIPQSRSFDNSMANKTVCFAYYNREIKKNRMPAELEDYEEIKKRLLPWEKRVEQLKNRVEFWKKKARQALTKENKDKAIRQKHLWQMELDYWKDKLSRFTMTEVSEGFKHRQLNDTRLITKYAYHYLKSVFDKVDVQKGIITSEFRKIFGFPVKTRDNHSHHTIDATILTLIPVASRRDEMLRLFYEIQENKKLNIDTKEKEKQLEGLIKSCRIGKTVGITKHIENNILVKYVSKDRALTPAIRNKRVGGKVVWERNEKGEILIDINGKKIPKYKLTGDCIRGELHKASFYGAIRQSKRETEKKKEQEEDASYETSYNDISYVIRRKLSDFKDLNELHKVIVDEHLFNIIKKQCEGKDFKDVCNEGFYMPNCNNQIRHIRCYTYDVKNPLHIRKQTYLSKKGYKQTFHVKVGDLYAMCRYHNVNKKMRYGIVKLFDISKSRKKGYEIPEILDDEYYLDAILRPGMQVILYKDQSDYDNLLRKPLNIKLLSERLYIIERFEGDNIINLKKHLCSSSFKETGRGKAINLKSFDNGLPEKIRQSIRQLNYLLESVDFKINLEGKIVFRNKN

SEQ ID NO: 4103 - protein, 1531 aa, unidentified
  REGION 1..1531: note = Description of Unknown: Cas Enzyme sequence
MKNILGLDLGTNSIGWAVVNGTVKENGNEELVNIKATGSRIIPMDAAVLGDFNKGNSISQTAKRTEFRAKRRLYERNILRRDRLHRILDILGFLPSHYVAELDRYGKVLKDREPKLVWRKSEAGRPEFIFMDSFNEMLSDFKKNQPQLVGGNKKVPYDWTIYYLRKKALSEKISKEELAWILLNFNQKRGYYQLRGEEETDKDNKDVEFYALKVVAVEDSGEKKGKDVWYNIHLENGWVYRRTSSYPLDWVGKVKEFIVTTDIGPDGTPKKDKEGNVKRSFRAPKEDDWGLLKKKTEADIDRSHKTVGAYIYDILLQNPCQKIRGKLVRTIERKYYKDELKQILEKQMEFHPELRDRKLYASCVNELYSNNEAHRNNISARDFSYLFLDDIIFYQRPLKSKKSLIDNCPYEKNSHQDKDTGKTEYFDVKCIAKSHPLFQEFRLWQFIKNLRIYRKEMRRDTDVTGEFLRTDEDYVALFEWLNDKKEIKQDGLLKYPLFGLKKEAGNYRWNYVEDKSYPCNETRSSILLGLEKSGVPEDFLTREKEEALWHILYSVSDRQEITKALRTFAIKHELTDADAFVSVFGKCPPFEKAYGSYSAKAIKKLLPLMRMGKYWSEDAIDVSTRGRINKIISGEYDESIRNRVREKAVELTDISDFKGLPVWLACYIVYDRHSEAKEIDKWESPADIDTYLKAFKQHSLKNPIVEQVITETLRTVRDIWKQVGHIDEIHVELGREMKSPADKRARITRKILENENANLRIKYLLSEFLNPEFGIENVRPQSTSQQDILRIYEDGVLNSVSNMPEDIDGILKKFNESDIKKRPTKSEVMRYKLWLEQKYRSPYTGDVIPLGQLFTPAYEIEHVIPQSRYFDNSFSNKVICEAAVNRLKDNMLGHEFIKECHGAKVELGFGKAVTIFSVEEYEQFVKDNYSRSGGKMKKLLMDDIPDDFISRQANDSAYVSKMIKTLLSNIVREKDEQEAISKNVVPCTGGITDRLKKDWGVNDVWNRIILPRFRRMNELTGTTNFTDKNVNGHEIPTMPLELQRGFNKKRIDHRHHAMDAIVIACTTRNHVNLLNNEAARSENRANRGRLSRDLRRYEKTMINGKEREVPKEFKKPWDTFTTDMEVALRDIVVSFKQNLRVINRAKNCYCHFENGKKVLSEQVKGANWSIRKPMHKDTIFGEVNLRRKKAVSLKEAIENPKNICNKDFKERLISMLNAGFEEKKIKKYFEDDKDTWADVDLSKIEVYYFTKDTNERFFASRKPLDSSFDKDKIEKQISDTGIQKILLRHLESKENDPKIAFSPEGIDDMNRNIVALNNGKYHQPIVKVRVYEKGSKFAVGSIGNKSSKFVEAAKGTNLFFAVYRSQIVDKKTGDIQMGRIYDTIPLNVVIDRRKQGLPAVPARDKDGNRIMFVLSPGDLVYVPTAEDLKNGSIVRPIDKSRIYKMVSSDGGTVNFVPHTGANVIYSMPKLLAKEFCRTDLIIQNEFGEGSPQSKNQKALTGEMIKEICVPVKVDRLGRVLKIGDLCVGSDR

SEQ ID NO: 4104 - protein, 948 aa, unidentified
  REGION 1..948: note = Description of Unknown: Cas Enzyme sequence
MNTIGLRLSTHGIAWAVNNAGAITAEGFTRIVCKPDDMNEHTAGRNPPGMQDRRMSRAMRRNNERKKRRIAQVRTWIKRNLGLDVDAVDPDTMTKVILHRERCVREVLGAAELAVVLLTAAKRRGWKRSAEDDEDELGEFLATVERNTQAARAAGGIGAYQAQVLRTGKRVRTRTYFREMHEDEFVAMAQTQAAAFPCMTGEPLTKLRRIIFFQRPLRSMKSSVEKCSYEPDRPVCNRLDPYFQTLRVYTETEHLRVYDAYGNDKAIGDAELAAVREVLLSGKDLTALALLKLLGHKKGDAVSLNYEKGLSGHQTRKLIPQSQHLSNAELYNVWQVLHSVKEPEARKKGIAKLTGLVPEEEWATVKLPKTGYSSFSHKAVKKLIPHLAEGCTVRTALKRAGYDKPAKNAKPELRGMNLVQKKWFDHAVNLVRAVEQKHGKAQRIVVASESMLLAGRKKRARMASERRKEDKLVDQLMKEVHDTIGPRELGTKDRQRLLLWHECGGVSPLEPERPITLAHLLDGKGKDAVTVDHIVPFSRLFDDAPGNKILLRQSVNKAKGDLTALEYVRKQKQDEEAYIARIDALKLPPVKRGRLKTDQENIPRNFVTRMQPRGPFVRALSTALGRNAQWCPMAVAGHLLGRWNIKLLPGDLGNHVCQAVALTVVDEAYIERLDGLTDHPGEHLRHLDMPDLKHCAADEIRMHHYRRSSFRGKGGRMEPKVALHQDTHYGRIAPERWIDKKALKKGMEVVEERGENLKVRVPEVVVRYAVQSLVAKDLPYVVDVVARKALQDHLLKYGNDAEKAWANYEEDPPLLFDCAMRHVRLYTKLSKVRSIKGGQYIVKEGVIDHLAVYRDANGHVSFAASSPLDVAERRRKGEPLTPLALEGKGELLRVVRYGDTFDHDGTLMYVNTIDGDSGRVGLLPVMRASKEAVSVSLRKVLDLDPVDA

SEQ ID NO: 4105 - protein, 1221 aa, unidentified
  REGION 1..1221: note = Description of Unknown: Cas Enzyme sequence
MSKILGLDLGTNSIGWAITEQQDNCFTLLERGVEIFQEGVNHTKTGEEPMVKIRTDARALRRHYYRRRLRKIGLLKVLVANNLCPYLSEEQLDAWRYEKQYPLVDEFMLWLRSCDNNNPYADRFRSLTEVLDLKKINDRYILGRAFYHLSQRRGFLSNRKDNNSDEDGKVKGAIKQLDEDMAAAGCTYLGEFYYKLFLAGEKIRTGEGYGYAGRITHYEKEFNAICEKQSLSDDLRKALHRAIFFQRPLKSQKGLVGACTFEKDKARCSVSHPRFEEFRMYSFLNNVKVKTYLDDEYRPLNEEEIVKALPMFYRKSKPNFDFEDIAKAIAGKKRESYAYKEDQCDAPYRFNFRMSTSVSGCPVTAQLKEIFSDEWESYICEVYLKGEDKSQEQIVNDVWHALYFFDDNDKLFAWAKTNLQLNDEEADKFVKIRTPQDYASLSLCAINKILPWLRIGYRYDEAVFLANLPEVVSADVLRNKEKREKIISTIATVVAEGYNTKGNTKENAIYDALLDCGLCGDEIRIDRLYHPSMIETYQDAKPNKHGLALLGSPRTSSLRNPMAMRALFRMRALINHLIKEGKIDSETKINIEFARGLNNANKRKAIEVYQREQEKRHKEYAENIRKLYKEECGVDIEPTDDDVLKYQLWEEQSHLCLYTGQTIGISDFIGANPRFDIEHTVPRSRGGDNSQMNKTLCESVFNREVKKGKLPAELANHNEVLARIEQLGWGEKCEDLHKQIERTRSSFSTKEIKDAMIQKRHRLMMELDYWKGKLARFTMTEIPEGFNNRQSVDIGIIGRYARLYLKTVFKKVYVVKGATTADFRRAWGLQDEYSKKERVNHIHHCIDAITIACIDGKSYQDWAAYQKEVEYTEKCRIARPHFLKPWPTFTEDVKAVADDLLVSHYTANNLSKHTRKKLRVRGKVQLNAEGQPIYVQGDTARASLHKDTFYGVIEKDNERYFVVRKELCKESFKESDVENIVDPIVKEKVRMAVKQFGFKKIQDVSNYPIWMNEAKRVQIKKVRVYIPKTLSPIPIGNKQQRDLSKHEYKRPYYAVSDGNYCMAIYEGSDVKGKTKRTFQIVNNLEAAKFYNNKTNRYDLVPQSDDNDYPLKYILRIGTMVLFYENSPEELCDCSRAELSKRLYKITGMSSTIVQQKYRYGMMTLKYHQEARPSGELKEKKGEWKINEDYRPVIVINHNQLNALVEGYDFELTVTGEIKFKH

SEQ ID NO: 4106 - protein, 1184 aa, unidentified
  REGION 1..1184: note = Description of Unknown: Cas Enzyme sequence
MKKILGLDLGVASIGWAFIEESDKKSEIKGLGVRIIPLTTDERDEFSKGNAISKNAARRMKRGMRRNIYRRTMRKDLLRRALTEVGIVPAKDLFEKLGKEALWGLRAKAATEQITLEELGRVLYHLNQKRGFKSNRKTDGAEEDPKKESEYKAEIRMNAQVLAERNQTIGQYMYTELLNDQYFRLKGKIFPRQSYADEFNTIWECQSRHYPTVLTDSLRSRIQDEIIFHQRPLKSQKALVSRCEFEKRYAWVNEKKMDVSPRVTPKSSPLAQLAKIYEAVHNLRCKDNYGKPVELHLENRLSLAEDLKWVGGLSKNEVIKRLKVSKDITNNIGEKGIQGDTTYAAIAKAVSGLTGEAEFLKKISDYKIEIELVDDKNLTLVDEETGELFTYQSKRVSSSIEKSNYYRLWHLLYSVDNEETLIKNLQEDFGCSEEMAYKLVKLDFTKPGFSNKSAAAIKKMLPYLLDGYGYSRAMECAGYRHSDFLDKAENEARVLLDKIPLLQKNSLRQPVVEKVLNQLINVVNAIIEHPEYGRPDEIRVELARELKQSKDERNRTFSNINKQEKRNKEIEDRLRTEYGFVKVTKTLINKFKIYEEVGGVSPYTGKRLALADFLNGAGVDVEHIVPKSRLFDDSLSNKTIAESWVNKAKGNMTAYDFMKSQPIPGLQSFDDYIAMVNLWYKSGVNGAKINQTKYKRLLCPESDIPKDFIERQLRQTQYISKKASQVLRLVCRNVTATSGGVTDFLREKWGWNDVLKKVNWERYEKLGKTSIEERENGKRLYHIEGWSKRDDHRHHAIDALVVACTKQSFIQSLNRLNQTVNASGNQETLKQSEHKRFKEIAGMAPFEVDDIVELTSKIIVSFKPGKRVFSKSRNKATGHVGLIPRGALSKETVYGKIKIQETREVALNKNFNPGWLIVDKYLRVVIRERIKSHNGDVAKAFKSPIYLADGTTQVKKVAIYEWNEEAVVKYPLSSIRLKDVEYVVDPVVKAKLQAYFDKYTNEKEAVKNLGIDPIWYNEAKRIPINSVRLRTGLGKVVPQKQVSPGEAKGFVDSGNNHHLAVYEREDGSLFDVMVSFQEAFERKANGVPVYLNEYEGAKLKWKFEQNDLFEILDFSQKALYYRVQKISKTSVGTPNVFFRLITETNLIDSKENLEMNVYYNIQSLGALQNINPKAVKLNVLGQLF

SEQ ID NO: 4107 - protein, 1212 aa, unidentified
  REGION 1..1212: note = Description of Unknown: Cas Enzyme sequence
MKTLGLDLGTNSIGWAIVERDGKSVQLLDKGVHIFQEGVARVKGNEEPAVKTRTEARSIRRHYFRRRLRKVDLLRILVREGWCPKLSDEALSKWKAEKEYPLQKDFLEWQRTDDGTGKNPYHDRYVCLTRPLDLVGSVADRYTLGRALYHLNQRRGFLSNRKDKSSEEEDGNVKTGIKTLDGEIQAAGCTYLGEYFYKLYGTGQKIRKQYTARVGHYEKEFYAICEKQGLPETLVQELHRVIFYQRPLKSQKGLVGHCRFEKNKARCPLSHPDFEEFRMLSLVNNIRIARPGDESSRPLNEEERRLIGPLFYRKSKAHFDFSEIAQKLAGKKAFILYSKNEDNTDAYRFNYRESTTVSGCPFTAWMHAVFGEDWKSELMRKYTLAGSKTEQQVVNDVWHVLFNFDSDDKVIAWAKDHLGLDVKKAEEFAKTPVAEGYAALSLKAIDRILPWLREGYRYDESVMMANAAEAMGKDIRTDPAKLEEAMAIVKDTVVNYVPNPEIKNDSKYRKIEESLSNAGYFDFDMDKFYHPSMIETFPKVIPAHGERALLQSPRTDSVRNPMAMRALFRMRALVNELIKQGEIDQSTRINLELSRNLNDANRRKAIEQYQRENEKRRAEYRERIAEYFESSGKRVVPSEEDVLKYELWEEQKHICLYTGKTIRLSDFLGADPAFDIEHTIPRSVGGDDSKGNKTLCDNRFNRDVKKGSLPSELANAKEILARVESLKWEEQIDSLRREMERQKRNARAAGDKESKDRAIVRGHLARMKYDYLSDKLARFTMKEVPTGFSNRQGVDIGIIGRYARMYLLSVFDRVYTVKGETTAAFRKMWGVQNNYQKKERVNHSHHCIDAITIACIGRQEYDQWAHYKEDYDQYEFYGKPRPAPLPKPWSTFTEDVQSISEELLVSHYTPDHMNKPARKKMRVRGIIQKTPDGKPKYERGDSARGSLHLQTFYGAIERDGEIRYVVRRELASLDAKDIANIVDDAVREKVAAAVQARGIGALKEDVWMNEEKRIPIRKVRVFAPTVKNPIALKAHRDKSEQEYKSMYYVSNDANYAMGLYEGVDEKGKRKKECVVLSVLDVTKKHGQDAQSYLFPLKNEKGLDLKYVMKLGKMVLFYEKSKEELYDCTEGNLAKRLYKLVGINAPSAAYPFGKLVFVHHQEARPSGEVKKTNGQWKSGEDYRPGIVLLHTQFDAMVEGRDFILDSTGKVSFL

SEQ ID NO: 4108 - protein, 1374 aa, unidentified
  REGION 1..1374: note = Description of Unknown: Cas Enzyme sequence
MKFKHIIGLDIGTNSLGWSLIKEFEDGTIEIIKTGVHIFPIGTIIDDKSNKEKTKNEQRRGYRGASRMRYRFKLRRKNLKIILGKLGMLPDYSTLLKPYTSKEKRQIENYKRIQSYQLYKLRADAIDPNIKVPFQEIGRIFMLLNKYRGFKSNAKKLQHKDSETGKVKNGCESLQRLINKSGAKTIGEYFFKMHEKAIQWYTENKWHNLNEPVDERAYNDIGEFIAFNSNGIRRHHGRYTLRDMYTYEFDEIWAAQKNHYPQTFTGSKKEYDAITQLPYKERIQALKEFKKTNYWHIRDYCIYYQRPLKSQKKYVSNCQFERGEFELRKYSITENNIEKEKEKRIWKKKAKKTCPKSHPYFQEFRIWQKLHQINYSSVEEDVFRKPLNPEWLNILAESLMENFEIFLNKTSKIEKENKIWLGRILQEKGMIKNSDNYAFFIDKVDEDIPSEERNENRITGNITYASFLDALGEETFCQLKNATIKRIEQISKEEVIEVEESKLFQLWHHLHIAKDGLFKEDDWLKCILTEPTKWNLTQEQAQKLIEVGLEPDYASYSSKVLKAILPEMRKGLNEHEALKIIDKGYVNKDNTIGTQVKLKEQISQLHYQELRNPVVERALSKTIKLVNAILKKYKNNIDRETFEIRIESTRQFRKPRQERENERRKNAGKEKIREQYAVYLTKNKEKIGFKRDIYKYDSIVGKYELWLEMNLNEEDKVFIAEFKAFSKITKQEDKLKHRLWRECGRICPYTGNIINLTDCFSSEVEIEHIIPLSRSLDDSFNNKTLTYRNINAEKGSMTPIEYMEKKGGNALKNFKRRLKSKGNNFSDNKRELFLAENIKSDFSSNQISNTSYIATYTRKKMWEVCKNVQFTNGSATSELRNKDWSLSNLLDKIRYEEDYKINIDDYYKEFYSLKKDFIEWYKKKYNTTDFIIMWNNLSENEDVKTYIAETNNDIIYWDEGIKAFNAFRNNSGKKDRSDHRHHAIDAFITACCSPKIIKVLSTYNAAKEEQHLDYRDKVDRQFDYSKFKESIATILVSHSEKQTLIKKRKNKIKTKEGIKEHITYAPQGKLHEESLYAKRNGATVRRVELFNEQSSDKKTLYEKASDLDYSVKGIVKWHYIDDNQLYQITKSRLEQLEKKAFTKEQMENNPFYRVSPKTPDKLTSKKNNKPLPIIKSVRKRFNTDRTLINLPAKDENGDVIYENRYAENESNFIMVFYKNGNKSFARPISFFNSIKNKKNKKTLLPDEIIHKNITYGLNNELPWLKGGDIVFVCKEEENINNIKWQNINDIKGRFYKVKGFSTLITPNHKYGNYEYGNTSLLNIRNVKADDYPSQKKIEEALKLKAFTLSHDKFNAIKIRLNILGEIEAKGEECF

SEQ ID NO: 4109 - protein, 1457 aa, unidentified
  REGION 1..1457: note = Description of Unknown: Cas Enzyme sequence
LGQSSIGWLIRDTDQEGFEQFDKFGVLTFNKGVGEEKNNEYSLAAERTKYRSARRLYQSRKYKLWETLKKLKAKDYCPIDEKALQEWTTYNKELGLKRTYPVGDIGFEAWIKLDFNGDNLPDFDSPYQLRKYLVENKLDFDSPTNRYMLGRALYHIAQHRAFKSSKKVKLEDDEKESTNIGAEKKKNENLKNEFEKTGIPFDESKTIGQLLAEAEIFFKQRGYGRIRNELHPHVTRKMLQQEVEQIFKFQFGESWIDKFKAIFGTEKISKSSIFWQRPLRSQKAAVGKCTLEKNKYRCPVSHPQFEIFRAWSFINNIRYKFDDSDEYNNLSLEIKNKLYCEVFIKVNNFNFSVVRKWLTQEFGKKIQLNYRDDTNISGSPSIYYLSKILGENWETIKIQHQRIQRLKKVNGTYQRYDSKKDYYTYEDIWHVAFQLDDEEEIENIAKNKFGFNDEQTENYLKMFKNMPVDYARLSLKAIRNINYFLKKGLIYTDAVLLAKIPDILGKNVYSEENEKLIIDSLNQIINENRKKKNIINITNALISEYKLNHWHERDYDYQLKEDDLQNIKEASKNYFGKSKWNAFPEGEKNEYVEKIKNEFQSFFQDRKREYKKLPKLIDDLKTFLKDNFPTLDEKKLNKLYHPSAIDIYPKLTDKDKAKDGKLYLQSPKTGSWKNPMALKVLQELRQLINYLIKTEQIDQETKIVVEIPRELNDANKRKAYEIWQKRKEEENKEFALAIGQLLNEFKHLKANPQNDSDIDKFRIWYEQCFDEVSQEFTDKGPNELRTQKKKKKNKKGEETEYEIQTWAKNDYSEINTSLWFKILKAKDNTLEKYRLWKEQKATCIYTGKIISLSDLFNEDTIDVEHTIPYSRSLDNSLANKTVCLKEYNRKIKERRLPSECPNYDELLNRIKPWQEKIEAIKKHLEFWKNESKKASIKKRKDECIIQKHLWTWELNYWENKVERFLMKEVTSKFVNAQLVETQLISKYAFHYLKTLFENVQVQKGSVNADFAKVLGVRDKYKSKNRDKHTHHVVDAFVLSLIPDSARLKSILEKYGEIQELKKINEDAATDARENNQRRIEILESELQQLLIECRIPLNTLHKIIQKIETETINFTPHKHKIFATAKKKIKKGKLKGKYALGDTVRGQLHKESFYGKIKLVERDENGKPKRDENGNWIWAYEKDNSEFRFVKRIPLKEWYVSDKKKLDVSKIVDPEIKKLFEVTLKSKSLKDLQKEGGLIYQHPKTGKTIRIRHVRCFQKPTELLQIKQQSHKSKYDYKNYYYADNAENIYYALYEDEKGNRTFEMLNLFNALKIKKYKEINKLEDFFELTKKVGRGKNISDTKLKAVLYPNLRVIFFKEKKEELKKLSLSELSKRMYKVYSLYGKTDGRIQFQHHLEARADKDITDPSNPSKKLIGASSIDFDNLLPRYLLSPVNFNFAIEGKDFELKIDGSVSWLF

SEQ ID NO: 4110 - protein, 1263 aa, unidentified
  REGION 1..1263: note = Description of Unknown: Cas Enzyme sequence
MTKTILGLDLGTNSIGWALIKVNIDGKPIKIIAMGSRIIPLDSDSINQFQKGQAISKNKDRTISRTQRKGYDRKQLRKKDLKKLLKTLNIHLDKEIMNLPMMDLWKLRSDAVNISENISKEQLARILFMMNQKRGYKSARSEQNSDKKDTDYVAEVKGRYAQLKEKNKTIGQHFYDELKNSVNNNSYFRIKDNVYPREAYLEEFDTIMNVQKGKHTFLSNEIIEKLRNEIIFYQRKLKSQKGLLSTCEFESFKIKYLDEVTKKDKTIITGPKVAAKTSPLFQLCKIWENVNNISLKIRNPEVSKYKWSDYYPTLEEKEKIANHLNKNEKLFLTDLLNILNLKKEEVFVNKQLKNGLQGNITYNEIKKIIGENDLLKFETKLIETNKLAYLVDKKTGEVKEKLEGLVIDAKIEHEPFYQLWHTIYSIKDMAECKNALKNRFLFDEEIAEKLSKLDFNKQAFGNKSNKAMRKILPYLMQGYDYSQACSFAGYNHSNSLTTDENNKRELKEKLELLSKNSLRQPVVEKILNQMINVVNAIIETYGKPTEIRIELARELKQSKDEREDADKNNRFNTTQNKEIESRLIELGLPTTKKFIQKYKYIFPIKDKDWKKQTTINQCIYCGKSFSLSDAISGDNFDVDHIVPKALLFDDSQTNKVLVHSSCNKDKTNTTAYDYIASKGDVVLNEYLYRVDEWFKRGIIGYAKMQRLKVSHKEYIERKKLKKETETDKKLWESFLDRQLRETAYISRKALEILKQICTQVYSTEGKVTAELRKLWGWDDVLMNLQLHKYKDLGQTEIKEWTSEHGKNKHEKEIVSNWTKRDDHRHHAIDALVIACTKQGFIQRINTLNSDDTKDEMKKEIEESGKIYKEKKDTLSKYLELQKPFSTNEVEQEADKILVSFKAGKKVATKGNRKIKKDGKKIIVQKDILIPRGQLHEQFVYGKIKSIDKEKSIKYLFEHSDTIVNKEIQLKIKNKLIEFNNDIKLAIASLKKNPIYSNEKKKIVLEKADCYQLETVLKYPIQSITLKDVPFIVDEKIKKLVRTRLEEHGGKEKDAFKSTLWFNKEKQIPILSVRLYTKLSSTECIKKDENGKEIGFAILGNNHHIAIYKDEEGKYSQHSCTFWHALERKMNKLPVIIYNTTELWSHLLNTHLPDSFIQKLPSDKLTLEISMQQNEMFLLGLSKEEAEVALKENNKPLLSKHLYLVWSVSDNDYWFRHHLETKNSDLKKIEGAKESKRYYRFKSVGAFLNSNPKKVRINRLGEIY

SEQ ID NO: 4111 - protein, 1398 aa, unidentified
  REGION 1..1398: note = Description of Unknown: Cas Enzyme sequence
MKTILGLDLGTTSIGWAFVKEAENDNEVSSIIKIGVRVNPLTTDEQTNFEKGKKFSVTAGRTLARGARRSLQRYKQRRQNLINVLKKASIIDEHTILAESDRNTTHATYALRARAADEEIAKEEFARILLMINKKRGYKSSRKANSEDEGQLIDGMAIAKRLYEQKLTPGQLCYQFLKEGKKTLPDFYRSDLNAEFNSVWELQSKYYPDVFNDDLKKALAGKGQKVTSAIFWTKYSFNTAENKGTREDKKLQAYKWRSMAINTQLAVEEAAFVIADINGNINNSSGYLGAISDRSKELYFNKQTIGKYLYSQLQDNPHTRTKGQVFYRQDYFDEFETIWETQAKYHPELTNALKEEIRDIIIFYQRKLKSQKGLVSFCEFESRVVELVKDGKKTSYTIGAKVMPKSSPLFQEFKIWQNLNNLLIQNKKSKEILSFDLEAKLLLFNELNIKGNLKKEQVFKFLGYKPNEWDLNFPVVEGNRTNQLLYEAYLKMMVYEGHDDIEIEELTAADIKSAVRSFFEIQEINVAILDFNSDVEGRIFEKQLAYQVWHLLYAYEGDNSNTGNDKLFELLKSKFGIKKEHAQILAKVNLSQDYASLSAKAIRNILPFLKAGHPFAKKDKDEKIASATALAGYNHSSSITKEENDNRILKGCLELLPKNSLRNPVVEKILNQMVNVVNAIIADANLGKPDEIRIELARELKKNLKEREEATAQINKSTAEHDAIRLLLVKEFGIKNPTRNDIIRYKLYDELKFNGYKDLYTNEYISREELFSKKYDIEHIIPQSRVFDDSFSNKTIVERRINQAKDNATAYDYVDAKGAEKLSEYKLRVEAYLKEYPERKAKYKKLLIKGEAIGEGFIDRDLRDSQYIAKKAKAMLHEVCRNIVSTTGSVTQRLREDWDLVNVMQELNLEKYRKQLLTEMVEKKDGNFKERIIDWTKRNDHRHHAMDALTIAFTKHSHIQYLNNLNARKSDDKLGRAIAGIEKKETDFHIDDNGNKKRRFKSPLVNFREDAKNHLENVLVSCKAKNKVVTKNKNKIKSAKEKEPQKTLTPRGQLHKETVYGKIQQYIVKEEKVSGKFDEATIAKVTKPKYREALLKRLRENNNDPVKAFTGKNALTKKPIYLDVQNTVLLPEVLKLSWLEDDYAIRKDISPDLKIEKIIDEGIREILYKRLNEFVGKGKEKEAFSNLDKNPIWLNETAKIAIKRVTISGVKNAEPLHFKKDHHGRDVLDKSGKPTPVDFVSTGNNHHVAIYRDENGNLQDEVVSLYKVITERVNQGLPIVDKTYNHHLGWQFLFTMKQNEYFIFPSADFDPLETDLLNPVNNKLISPHLFRVQKFSKVIYGNSAVRDYVFRHHLETAIEDRKELKDVTYKSIKSLPYFENIVKVRINHIGQIIKIGEY

SEQ ID NO: 4112 - protein, 1248 aa, unidentified
  REGION 1..1248: note = Description of Unknown: Cas Enzyme sequence
MEFKKILGLDLGVTSIGWSLIKEFEGRPSEIISMGVRIIPLDTDESDEFRKDNAITKNQQRTKKRTARKLYYRYVLRRRALTKELKKHEMFDESLFNLPQLKLWELRAKAVTEKISLQELGRILYHLNQKRGYKSSKQEDTQDKKNTEYVEQILNRYEKLKLEGKTIGQKFYEELSKNHYYRTKQQVYPREAYIEEFNTIMKKQQEYYPDVLTDEFISHLRDDIIYFQRKLKSQKGLVSICEFEGFYIKTKEDKEVFTGPKVAHRSNPIFQVCKIWETINNIKIENKRKEKYQISIDQKRKIFEYLDNNEKLTKKELFEILGLNEKDGWLGNKMINKGIQGNITKVKIIEALYNKDLIDKWTKFNLNIIGMGETTYSYDLKSGEVKNETIKEYITSEFTNEPLYQLWHTIYSIPDIDECKNALMKKFGFDEETAIRLAKIDFTKLSYGNKSVKAIRKILPYLMKGYDYSESAQFAGYNHSNSMTKSDIEAKKLIDKIPLLAKNSLRQPVVEKILNQMIHIVNEIIDDKRGWVTKEERNKGLFEIRVELARELKLNKEERKNFFENINKIEKENKKIEKELIDLGLRANRKNIIKYRLFRSVSNDDAKANGMCIYTGKLFSLSDALNGNEVDVDHIIPKSLLFDDSQSNKVLTFRWINQEKGDMTAYDYMASKGKQALDEYIERVNSLFEKGVITKAKRDKLLISGKDIPQDFIERNLRETQYVSKKAREILQQISKNVWVTSGSVTQYLRRLWGWNDILQNLQLKRIKEIIPNPLEEGITEIKEFETIDGQIHHKEVIKDWDKRDDHRHHAIDALVVACTKQGYIQRLNTLSAKTTREELYKKVSERKEEFRESLSLIDKYFILEKPFLTNQVEEKVEKIIVSYKQGKKVATYGKRFIIKDGKKIPVQKNVLVPRGPLSKETIYGKIKILEKNKPLKYIFNYPHLIFKDYIRALVEQRLKEYNNDVDKALDSLKKDPIYLKDNKTKLEYATCYKEEYVVKYPLEKITKKDLPYIVDSKIREILEDKLKQHNNNEKEAFKEVYFNEEKKILIKSVRIFTGLSNVEPIKSNENNYGFVKPGNNHHLAIYLDKNGEKQIHICTFWHAVERKKYGFPTVIEETNLVWEKIENNPNLYPQSFIKKLPEPNLKLIQKFEQNELFILGIKDFDLDFNDKLNVLTKHIYRVQKIYSNGKGLDIYFRHIYETKVNDDDFTKKTLKYYRVSSLNALEDIRPIKIRVNHLGEITEINLK

SEQ ID NO: 4113 - protein, 1416 aa, unidentified
  REGION 1..1416: note = Description of Unknown: Cas Enzyme sequence
MAKILGLDLGTNSAGWAVRDTENADNQIIDHGVLTFDKGVATEKGNEFPKVQKRTESRGKRRNYQAEKYRKWELLEFLIEKQMCPLSKDELDKWKKYRKGREREYPQSEKFIQWLRFDFDGDGKPDFYLFQKDKHESYYVFRAFAIDEKYKFVYQNNPQILGRIFYQLVQRRGFRGRDEEEARTMLQGSEKTGTEGRNTIAEYIEKYRTLGAALYFYQKEKGKRIRQRYNLRKDYENELQEICKTHNISEVDYKKLWKSIIWQRPLRTQKGLVGMCIYEPNKKRAPISHPLYEEYRTWVFINNLKIEPPFGVDRNTYLLKTIYPMFYKSNDFELNSILKQLKNGAKINAKFNDKTKVVAAKLLNSFQDILGEGWKEKYKWNEIINERNRQPLKKIAGNYSFEDIWHVLNTFDGQENLKEFALKKLHLTPEKAEKFSKIKLNQGYATLSLSAIKKILPFLQKGFLYSQAVYLANLYKVIGEEKITDELINQFAGEVEKIIESNKEEKTLNAIVNSLIQDELNDEYRYSIEIDRELDDKEMNRVSKKIVEVFGEKTWNEMDDNQKTGYLNYVSNQFKNFLKKSVLSKHNVFIEQPRLHDQIFTYLKQTYNIPEERKKYLWHPSEQENYKAALEHYHYSINHKDFYINEKSRNSFSKKHPEAEYEGRSIKLLGSPEPDSKGFKNPMALKTLHKLKQLINYLLIEDKIDEDTRIVIEIARELNDANRRKAIERWNNEREKENENFRKIIREINAECGTDYNENDRTLLRKIRLWKEQEEQCMYTGKKITFCNIFNGTKYDFEHTIPASISFDSELKNLTLADTDYNRYTKGKRFPTQLPNYYESQNIEGVECTAIIKNIEVLFGKRWVEKKIIKGKEVEIVHWKKIDDLENQYDEWKNKTKGASTKEVKDACIQRYHMIKMDLDYWRAKLKTFTIEEYKIGWRNSQLIDTQIITKYALPYLKTVFKKVEVEKAEVIHAFKEIYQIKLNDEKKDRNTHSHHATDAATLTLIPPFYDRDKILEKYFEEKDKKSGKIFHEKPKDWENFSASKIKFIESQVFINNISENKTTLPTFKKVRKRGKIEYIKYKDENGKWQFKLDEDGNKIPKIAKGDAIRGQLHGESFYGAIKQPLRDEDDKILFDENGKMKLEDKIYLVIRKDLVYKKDANSPGFKSLEEIENVIVDKYLFEMIKKQVEEAEDFKTALVKGIYMLDKNGNKVNRVRHIRCKESIMKYETALKVHKHDFESDKDYKQFTLAKNGENALCLFYQKEQEKAMKILSISQVAELKLKKDQQFFIEPYYNHIEIGKGNKKSEIPLYAVLRNGHKVLFYKDSMEELKELSKEDLSKRMFKIYQFENDGRIKFKYHLAAGIDADLRRNNNEYSYFNAEENQIFLRLTQGQWKFAIENVDFEMKLDGTIKWMK

SEQ ID NO: 4114 - protein, 1556 aa, unidentified
  REGION 1..1556: note = Description of Unknown: Cas Enzyme sequence
MKKILGLDLGTNSIGWALIATDENDKPEKIEGMGSRIIPMSQDILGDFEKGNSVSQTATRTGYRGMRRLHERHLLRRERLQRVLNLLGYLPKYFANALNEYGQFKDETEVKLPYFLNDKNKFEFLFKKSYNEMLEDFRRNQPQLLANVSGKPKLIPYDWTIYYLRKKALTDKIEKEELAWLLLNFNQKRGYYQLRGEDEDKKEDDFQIITRKIISVTKGEKDKKYNKHEYISVLEDGLVYKASFYSSIENWVGQTREFILTYKIKKDKKTNTELKEPSLSYLPTIEEIEAMDATKKAKMYSKIKIKTEKDINDSNKTVGTYIYDTLLKMPQQKIKGKLVRTIERSFYKEELEKILDCQIKNHPELQDAENYKTSINVLYESNEEYKNSISNLDFKYLFVENIIFYQRPLKSKKSEISDCTFEFHPMKNKDGKLLKDENGKQILKPLKCISRSHPLFQEFRLWQWLQNVKIYEREKQVNDKWHTDINVSNEFLKNEDDYVNLYEYLNERKDVDQKAFLKHFKLNIKTHRWNFIDDDKKVYPCNETHNQITNRLAKVEKVPDEFLTKEKETALWHILYSVRDKHEIVKALTTFAKKHSLHEESFVENFKKYPLIKSEYGSYSEKAIKKLLPLMRMGKYWDKEAIHKKTRERIEKIINGEYDSTIQNRVHEKAINLTEINHFRALPLWLASYIVYDRHSESSETSKWKSLADLENYLKNFKQHSLRNPIVEQVTTETLRVVKDIWSHYGEGKENFFNEIHIELGREMKNNAEDRKAITESNIKNESTNLRIRAMLAEFAKPEFGIEGVRPYSPYQQDALKIFEDGIINSGIDIPEDIEKISKSSQPTDKEILKYKLWLEQRYRSPYTGEIIPLSRLFTSDYEIEHIIPQSIYFDDSFSNKVICESEINKLKDKQLGYEFIRNHGTEKVTLSGGKVVSILTIKDYEDFIKNNYAKNKGKAKKLMLDEIPDKMIERQLNDTRYISNMIKNLLSNLVRAEKDDDGVTSKNIISTNGTITSILKQDWGLNDVWNDLMLPRFERLNKLTGKDIFTTYNSNYQKYLPTLPLNLRKGFQLKRIDHRHHAMDALVIACATRNHVNYLNNQTALDKTKKKNKDEKQKDRYDLRNSLCFKTHPDTNENYKWQFNKPWENFTQDAKKRLETIVVSFKQNLRVINKSVNKFDSYKDDNGNLRLDKNGKPIKGKRTQIKGDNWAIRKSLHTPMPYGKKHYSFDILKITDNIGKREFIIDDNVRTIVENVYQENNKKVTTTQNYLKKNPILNQEGNPIIETAFKINNEKYRQRQPISKLSNRSSKGGILNLEQAIKYISKVADFDLQRDLLNHLKFNENNIDKAFSAEGIEKFNASRKIPIYKLPIAESGSKRFQLGEKKKYVESETNLFFAVYSNKDVERKYKTIPFNEVIENQKQGAKEKKNYIDACVPPIYIDEKSKVEYNLLFSLSPNDLVYMPTQEEIENPAFVNVKKLNTEQIKRVFTVNDFSGNIIYFSPNSHAKNIAEKEVDLSWDDNKKKLTGSFDNKTTSFSGTLIKEKCWKLKVDRLGNISL

SEQ ID NO: 4115 - protein, 1607 aa, unidentified
  REGION 1..1607: note = Description of Unknown: Cas Enzyme sequence
MEKRILGLDLGTNSIGWALIKHSFDEKKGEILGMGSRIIPMDAAKVGEFERGNPVSATADRTKFRSVRRLYERDVLRRERLHRVLHILDFLPTHYAENIDFENRPGQFMKNKEPKLPYQEISNKKYDFIFKDSFQEMVDDFRITQPQLFYLKANGSESKIPYDWTIYYLRKKALSEKIKKEELAWILLNFNQKRGYYQLRGEDEELEDNKEITFEILKVDKVIDSGEKIKNSGAILYDVYFENGWKYDKRVTKTEDWAGKTKEFIVTTSVLASGEISRSYKAVNSEEDWIAIKQKTEQDIESTNKTVGEYIYDTLLKNPSQKIRGRLIRTIERKFYKKELKLILEKQKEFHPELRNRDLYKSSIEELYTNNEAHRNNIANRDFTYLFLDDIIFYQRPLKSKKSLVSNCPFEFRYFKKEDGTVEKTGVKCIAKSHPLYQEFRLLQWLKNLRIFSKEDINEVDITNELLPTTTDREKLFEWLNDKTEIDQKSFLKYVPFNLEERIKMRLGERQFQLFKKDKEQGLDTYYRWNYVEDKKYPLNETRGEILKRLKKTGIDVNVLDKDTETHLWHILYSVEDKAEIESALNSFAKKHNLPEGFVNEFKKYPRLDKEYGSYSAKAIKKVLPLMRFGKWWDGEAIDEFTRQKIDKILTGEYDEKIKNRVREKAVDLKEEQDFQNLPLWLVSYIVYNRHSETSDVQYWKTAQDIELLKQHSLRNPIVEQIINETLQTVREIWEYYGEGKEKFFDEIHVELGRSLKEPAEKRKKVSERITENENTNIRIKSLLVELFNDDEIENVRPYSPMQQEILKIYEEGVYQNPDVTYSMVSESEINKIRKKNQPSSSDIKKYKLWLEQGYRSPYTGVIIPLSKLFTPAYEIEHIIPKAKFFDDSLSNKIICESEVNSLKDNQLAYSFIKNNRELKIELSHGRFVTLLSPEAYEANVKRYFGNNRSKLRKLLLEEIPEDFTERQLNDTRYISKVVKTLLSNIVREEDEEEAIAKNVVASTGGVTALLKQDWGLNDVWNSLITPRFERLNRMAGCEKYGSWENKNGKVVFQINTIEPDLLKLNRKRIDHRHHALDALVVACSSRNHINYINNDNANGKDKSKPRRFDLRNQLRIIEEEEVNSVVNGELQRKRIKVAKEFLKPWESFTQDAKEELNRIVVTFKKNNRVINKTVNYYQKWVKQPDGTMKKAYVEQTKGDHWAIRKPLHKETVSALVNLQMKKTVNLSVALDNSKDIVNKLLRKKIDELISEGFEKKQIQKYFKGLDNRWAGEDISKVDVYNFTNDKESTMIAASRVKLDESFSEKNIESITDTGIRKILLAHLEKYKGLLDENGNPVAPETLAFSPTGIEELNKNILNLNGGKKHAPIYKVRKFEKFGEKFNVGVSGNKKQKFVEAAKGTNLFFAVYIDEDGKRNYETIPLNEVVEYQKWRATLTRQEKDITPIIPVNREKGKFLFSLSPNDLVYIPSVEELANPGEVDFNNLDKNQVKRIYKFVSCTGNQAFFIQSHVASNIVNNFEFSALNKMEKSIEDIMIKSVCWKLETDRLGNIIKIVGEGINRMSFPDRNILEESIAYSYSNELQAFIDQNEVNEIDAEKISKLSPKEII

SEQ ID NO: 4116 - protein, 1501 aa, unidentified
  REGION 1..1501: note = Description of Unknown: Cas Enzyme sequence
MKKVLGLDIGTNSVGWAVVNQNDKGEFLSIEKIGSRIIPMSQDVMDKFGAGQTESSTAQRTQYRGVRRLRERSLLRRERLHRVLHILHFLPQHYDAAIGWNKKENKTYGKFLPGVEVNIPWVATDQGHQFIFMDSYAEMLKDLKQHQPHLFEKSSTPVPLDWTIYYLRKKALTHAISKEELAWILLNFNQKRGYYQLRGEEVEDNTKREEFYALKVVKVELDEDNTSAKTWYKVHLENGFIYPCPSDTPIDNWVGMVKDFIVTTTLEKDGSEKRTADGEIKRSFRAPKEDDWTLLKKKTESELEKSGKQVGAFIYDTLLSNPDQKIIGGLIKTIERKYYKKELEQILETQQKFIAELSDKKLFQACAEELYPLNDSHRENLLERDFKHLFVQDIIFYHRPLKTKKSLISNCTYEYRTFYKNGEKQISPIKCIAKSNPLFQEFRVWQFVQNLRILQRQRSEGDSIKYNVDVTAEFLKDENDIANLFTWLNERKVIKQDQLLKSYFKLKVNKETKELVYRWNYVDDKNKEYPCNATRTHILSFLEKCKEEKRIEDDRFVYSLWHLLYSVVEPIELRGALAKFAEREHLHPSFVDVFAQFPPLEKEYGSYSEKAIKRLLPLMRMGDYWHEDKIDVKTKQRIQRIIDGEADDDITHRSREKVENLRSITDFKGLPLWKAGYVVYNRHSESGELTKWKTPHELSNYIQNEFKQYSLRNPIVEQIVLETLRVVHDLWVKHGDFSEIHLELGRDIKNSSDKRKRMAERQQENENSRQRVLEMLIDLKKEAAFADLNPYSPSQQEKLRIVEDGVLRSNIEIPKDIEKITKSAKPTSRELTKYRLWLDQKYRSPYTGQPISLAQLFTSKYEIEHVIPQAKYFDDSFTNKVICESEVNKEKGSMLAHEFILKNGGSTVNVGGRQVQVLKNDAYVELINRLYGKNNPVKAKKLLAEDIDEVVGDFSERQLNDTRYISRVVQKLLSNIVREEDEQESTSKHVIGCSGQVTTALKKDWGLNDIWNKIIQPRFERLNEMTATEDYGVWQSPNHFQIRVPEEIQKGFTKKRIDHRHHAMDALVIACATRSHINYISNRSGQDRNAKFETTRTDLRSKLCYKENSSGNNYNYIFNKPWDTFTQDAHRALENIVVSHKQNLRVLTKTNNYTQFINKDGKKDLQKQVKGDHFAIRKPMHDEFPFGRVSIRSINKKVALKRALENWKQIVDRKLKDKIRELIGAYGKYDAQTILKYFEDRDYKFNDISIRKVDTYVYNHNRAAKRKKLDDSFSESKIKELSDESIKRILINHLDSYGGDHKVAFTQENIHRMNENIQKLNGGKFHYPIKSVRIHSDLGEKIKLCANGINKYVNVGNNPYCAIYLDKNNKCKSMSISLDEVIENLYTKQVPVLKYKEGDKLKFYLGANDLVYVPTSQELINPDLVDFKNLRIDQIRRIYKMVKSSKTDCYFLPVTVAQVIIKKIEFGSQNCTQKDDAENMIKQICWKLKVNRLGEITDVKR

SEQ ID NO: 4117 - protein, 1487 aa, unidentified
  REGION 1..1487: note = Description of Unknown: Cas Enzyme sequence
MKNVLGLDLGTNSIGWAKVSMDDDGKYLHDIKLGSRIIPMSQDILGKFDSGVTESQTAQRTGFRSVRRLRERCLLRRERLHRVLHVLGFLPKHYDRALGWDKDHPITYGKFLDDSEPKLAWKRNEDGRYHFLFMDSFKEMLDDFALHQSQLVADGRRIPLDWTLYYLRKKALLQPILKEELAWILLNFNQKRGYYQLRGEEEEEVPTKKEEYYELKVIRVEATDDKKGDAVWYHIHLENGWIYRRSSKISLDNWNGQVKAFIVTTEFEKDGVTPKLDKDGEVKRSFRAPSEDDWGLRKKRTEKQLETSGQTVGCFIYDHLLAEPSDKIRGNFVRTIERKYYKDELRAILRKQMEFHAELRDSEMLAACAKELYQKNEAHRKNLLQKDMEYLLVDDLLFYQRPLKSKKSLIDNCPYEQHMYEFVDKETGEIKKDQIQNIKCIAKSNPYFQEFRLWQFIQNLRLYRREDDAEVTGEYLQSSEDYVRLFLYLNDKKEIKMETVLKDFLGMKKAKGKDAGYPLRWNYVEEKTFPGNETRYEILSALHKAGISPDWADENNRIYRLWHLLYSVNDRLELKEALKKFKDDEAFVESFLKVKPFKKDYGAYSEKAVKKLLAVMRMGSLWHEEDICAKIRTRITNIITGNIDSKLKEKIGGNRAFTTITDFQGLPVWLACYVVYGRHSEVSEIKKWETPKQLMEYIRGFKQHSMRNPIVEQCILEALRTVHDIWKEVGHIDEIHVELGRSMKKTAVERERDMRNSMRNENTNLRIRSLLIELKNDKDIADVRPYSPTQQEILRIYEEGALQQLTKEDKEYDEIVKISQQAQPTSAQLMRYKLWLDQKYVSPYTGKTISLSKLFTSAYQIEHIIPQKRYFDDSFTNKVICEAEVNQLKSDMLGYEFIKAHGGEIVHCTMLGDVKILDEASYKELVVSHYANNNAKRKKLLAEDIPEEFLARQMNDTRYISKMVMSLLSNIVREKDEEEVTSKNVIPCTGGITDKLKKDWGLNDIWNTIVMSRFERLNELTKTEAFGRWENKEGKRVFQTDVPLELRRGFSKKRIDHRHHAMDALVIACASRNVINYLNNESAKDSKRREDLRVKLCDKNRIIRKPWETFTQDALVALENIIVSFKNYVRVINKATNYYERYDEKGKKVNVSQKGVALWAIRKPMHKETVFGEVNLRRKEIVPIAKALDTIPAICNKALRKYIYGLIANKFNKKQLLAHFKSINYRWNRQDVSKVEVIVESKNNEEMVATRKSLDTSFDNKRIMSITDTGIQKILLCYLDAKGGDPTVAFTPEGIAEMNGDISIYNGGKWHQPIFKVRVSEPKGAKFQVGEKGAKSRKFVEAQKGTNLYFAIYEDMERVRSYSTVPLDEVAERLKQGLSPVPEKNDNGVPLKFYLSPNDLVYVPSEEDLLTDTMVLDKDRIYKMVSATGNQCFFIHHRVANSIVNKMEFSPLNKMERGINKHNSPMIKDVCWKLEVDRLGNILRIIK

SEQ ID NO: 4118 - protein, 1527 aa, unidentified
  REGION 1..1527: note = Description of Unknown: Cas Enzyme sequence
MKKILGLDLGTNSIGWALVENNQEEKDGRIIAANSRIIPMDQSILGDFEKGNTISQTAERTGYRGVRRLRERSLLRRERLHRVLHILGLLPKHYENEIDFDLHPGKFVNHAEPKIAYCKSEDTGKYDFFFKSSFNEMICDFSENITQLITSQKLLPYDWTIYYLRKKALTEPIEKSELAWILLNFNQKRGYYQLRGEEEEENKNKLVELYSLKVVDVIAANEKKADVDWYNVVLENGWIYRRQSKVFLDWVGQTKDFIVTTELNDDGTVKLNKYGEEKRTFKAPEEKDWTLVKKKTEAEIEHSEKTVGEYIYDTLLANPDQKIKGKLVRTIERKFYKNELEMILNAQKQFHPELRDRDLYNACVEELYPHNYNHRDSIRNRDFTYLFIDDILFYQRPLKSKKSLISNCPYEVWKYKDKDGNEKVESIKCIAKSHPLFQEFRLWQFIQNLKVYIKETTVDGKLQTDVNVTPQFFPSEKEYVELFEWLNERKEIDQKAFLKYPPLGLKGKVAENYRWNYVEDKIYPCNETHALIKNRLNKIGIPQLKKNEEEELWHILYSVEDRQELLKALTSFSNKKNLPSDFVEEFIKFPPFKKEYGAYSAKAIKKLLSVMRLGKYWSEDGIDVLTKKRINKLIDGEWDEQIKQRTREKVSDKDLTSIEQFRGLPLWLACYVVYDRHSESGDILKWNSPDDIEHYLRDEFKQHSLRNPIVEQVITETLRVVKDVWKYYGKGKQHFFDEIHVELGRDIKNPADKRKQMTNRITENENTNLRIKAILTELKNDPTVENVRPYSPSQQEILKIFEEDIINSGIEIPDDILKISRLSQPTSTEIIRYKLWLEQKYRSPYTGEIIPLSKLFTPAYEIEHIIPQSRYFDDSFSNKVICESAVNKDKDNKLGFEYIRDNRGKKVEVGFGKEVTIFTVQAYEEFVKSRYRGNYNKMKKLLLEDIPESFITRQMNDSRYISRVVQHLLSAIVRTDDEQETVSKNLISCNGTITTRLKNDWGMNDVWNDIVYPRFVRMNDLTSSNDYGEWINKEGKKVFQTRMPLLLQKGFEKKRIDHRHHAMDAIVIACASRNHINYLNNSYANKDAQRKDLRSILCYKSKQDDKGNYQWVFNKPWHTFTQDSKEVLKTAIVSFKQNLRVINKTVNQYQKWVPNSDGVFEKKLCRQTKGDSWAIRKPMHKETVYGKISLRFKKEVNLSAALDNWESIVDKELKSAIKNLINQYGKFDKKILIKYFKDREYRLGDKNISKVEIYYFDNNISACRSVIDESFNSKRIGNVSDTGIQKILFKHLESYNEIKNNKVIEHPDLAFSADGIDTMNKNIIQLNDGVYHKPIFRVRVCEPIGNKFNVGTIGNNKNKYVEAAKGTNLFFGIYQNQEGKRSYETIPLNIVIERQKQGLSSVPEVNEKGDQLLFSLSPNDLVYLPTLDEIENQRINWDDKITLSNRIYKMVSCTEGEFHCIPYFIASPILKTIELGSNNKSERAWTGEMIKNTCVKINVDRLGNLIIKDYDKENAIFWQSGVFELKQ

SEQ ID NO: 4119 - protein, 1465 aa, unidentified
  REGION 1..1465: note = Description of Unknown: Cas Enzyme sequence
MKYIKYILGLDIGSNSIGWALIQLDLLQKTKRIIATGSRIIPMDQKVLSDFGKGITISPTAQRTSYRNARHCRERHLLRRERLHRVLHILGFLPTHYDKQIDFSKRYGKFVDNTEPKIAYNERKFLFMDSFQEMLADFKIHQPDLFYTKKNGEESKIPYDWTIYYLRKKALSRKISKEELAWIILNFNQKRGYYQLREEEEENKENDFEIISSKIISVIKKDKDKKYNKYWYDIILENGLVYQAAFYNDFVYNWINQDREFIIERTSLKNGTEKVKLSYLPTFDEIDKMDKKEQDKYYKKIKIKTENSIGNKTVGCYIYDHILQNPNEKIKGKLVRTIERKYYKEELKAILEKQIALQPELFTDQLLADCIRELYSKNEAQQRNLAARDFVHLFVEDIIFYQRPLRRQKSTIANCSLESRSYIDKDSHTRKGAPLKVCSKSNPYYQEFRVLQWLQNLKIYEIDSDQEVTHQFIKTLEDKQQLFDFLMNQKEIDCEELLKYFLNQTYPNAKEKALKSELKKWKDTYRWNYVYDIGEKSSKKYPMNETRYDLKRYLEKVANLPDDFLSSEVEYLLWHLIYSVTDKVSYEKGLKKFAQKHHLDEDSFVESFKKFKPYPSEYGSFSEKAIRKLLPLMRFGAYWDFNHIDKNTQKRIEDLITGVENEEIRTILREKAEKYQLEKETDFQDLPLWLAQYVVYNRHAEASSLEKWTSVNDLETYLNEFKQHSLRNPIVEQVVTETLRVVRDIWQQYGQGQANFFNEIHIELGRELKKTAKEREDLSKQNQKNEDTNLRIRALLAELGEDSTIENVRPYSLMQQELLKLYEEGVFSSSIEIEDDIEKIHKKATPSKAELQRYKLWLEQKYKSPYTGQIISLKRLFTEDYEIEHIIPQSRYYDDSLSNKVICESVVNKTPYKDRQLGLEFIKNQGGRIVKELSKENKTIKIFTEEQYRTFIKEHYSNNPAKTKKLLLEDIPEKMVARQMNDTRYISKYISEILSKIVREDERDEGVNSKNVILCTGNITSALKQDWGVNDVWNDLILPRFERMNSLTQSTLFTTYNERYQKYLPTVPMEYSKGFQKKRIDHRHHAMDAIIIACTTREHINYINNQHALEKGKDKKEKQEERDKVRERLCIKKYNNRSEGNYSWIFKKPWDTFTQDVRVALEGIVVSFKQNLRVINKATNYYEHWVEENDKLIKKMVKQEGTNWAIRKPLHKETVSGKITLQREKVSGGKILTATRKVIDSTFTEKVIEGITDTGIQKILLNYLKFKKSPEIAFSPEGIEELNKNIALYNDGKPHKPIYKVRIFEQGSKFPLGEVGNKSQKYVEAAKGTNLYFGVYQGKDKRSFATIPLNEVIERQKQGLPSVPEYNEKGDPLLFSLSPYDLVYVPIEGEIIEDIDFQHLSKEQKERIYKIVSFTKGRIYGIPNKVAVSIVNKMEYTQLNKIEFIKEKEVCIKLKVDRLGNICKA

SEQ ID NO: 4120 - protein, 1464 aa, unidentified
  REGION 1..1464: note = Description of Unknown: Cas Enzyme sequence
MQIYNHMKRILGLDLGSNSIGWGLIEQDFQQKEGKIIASGSRIIPMDQGILGDFEKGNTVSQTAERTFYRSTRKLRQRHLLRRERLHRVLHILGFLPTHYDKQIDFSKRYGKFIGDIEPKIAYNEGKFLFMDSFEEMLSDFKSHQPTLFYTKKNGEESKIPYDWTIYYLRKKALSLKISKEELAWIILNFNQKRGYYQLRGEEEVENPNKEVTYYSLMVTEVTAEAPNKKGEIWYSIQLENGWVYRRTSKIPLDDWKGKVRDFIVTTELEEDGSIKRDKEGKEKRSFRAPSEDDWNLLKKKTEQDINTSKKAVGTYIYDHLLQNPNEKIKGKLVRTIERKYYKEELKAILEKQIALQPELFTDQLFADSIRELYSKNKAQQRNLAARDFVHLFVEDIIFYQRALRSQKSTIANCSLESRSYIDKDSHTRKEAPLKVCPKSNPYYQEFRVLQWLQNLKIYEIDSDQEVTHQFIKTLEDKQQLFEFLMAQKEIDCEELLKYFLNQTYPNAKEKALKSELKKWKDTYRWNYVYDIGEKSSKKYPMNETRYDLKRYLEKVANLPDDFLSSEVEYLLWHLIYSVTDKVSYEKGLKKFAQKHHLDEDSFLESFKKFKPYPSEYGSFSEKAIRKLLPLMRFGSYWDFNHIDKNTQKRIDDLITGVENEEIRTILREKAEKYQLEKKTDFQDLPLWLAQYIVYNRHAEASSLEKWTSVNDLETYLNEFKQHSLRNPIVEQVVTETLRVVRDIWQQYGQGQADFFNEIHIELGRELKKTAKEREDLSKRNQKNEDTNLRIRALLAELGEDSTIENVRPYSLMQQELLKLYEEGVFSSSMEIEDDIEKIHKKATPSKAELQRYKLWLEQKYKSPYTGQIISLKRLFTEDYEIEHIIPQSRYYDDSLSNKVICESVVNKAPYKDRQLGLEFIKNQGGRIVKELSKENKTIKIFTEEQYRTFIKEHYSNNPAKTKKLLLEDIPEKMVARQMNDTRYISKYISEILSKIVREDERDEGVNSKNVILCTGNITSALKQDWGVNDVWNDLILPRFERMNNLTQSTLFTTYNERYQKYLPTVPMEYSKGFQKKRIDHRHHAMDAIIIACTTREHINYINNQHALEKGKDKKEKQEERDKVRERLCIKKYNNRSEGNYSWIFKKPWDTFTQEVRAALEGIVVSFKQNLRVINKATNYYEHWVEENDKLIKKMVKQEGTNWAIRKPLHKETVSGKITLEREKVSGGKILTATRKVIDSTFTEKVIEGITDTGIQKILLNYLKFKKSPEIAFSPEGLEELNKNIALYNDGKPHKPIYKVRIFEQGSKFPLGEAGNKSQKYVEAAKGTNLYFGVYQGKDKRSFTTIPLNEVIERQKQGLPSVPEYNEKGDPLLFSLSPYDLVYVPIEGEIIEDIDFRNLSKEQKERIYKIVSFTKGRIYGIPNKVAVSIVNKMEYTQLNKIEFIKEKEVCIKLKVDRLGNICKA

SEQ ID NO: 4121 - protein, 1388 aa, unidentified
  REGION 1..1388: note = Description of Unknown: Cas Enzyme sequence
MSKTLGIDLGTNSAGLTLREDDIFSWYGVYTFRKGVGEGKSGEFSFAAERTKHRSSRRLYNARRYRKWETLKVLIEYGFCPLKEENLKNWKNYKKGVGRVFPINDNAFDQWIKLDFDGDGKPDFSSPYQLRRLLISEKLNLSKEENRYKIGRALYHIAQRRGFKSSRKSGKNEKSAIDNGSTETKTIGRNEYKDLITENGSLGAAFAYLEDRNIRVRNRYTLRSDYQNEVHKILEFQNVADADFIENVDKAIFFQRPLRSQKGLVGKCTLEPNKSRCPISHPKFEEYRAWSFINNIKYRTEDNNQFQPIPLGLKEKLYDEAFFYKSKKELKFADLRKIIKNNGGKYWELNYSRRMDEISVPSCYVSSRLRAAFGDDWENFGKVVVRKNREGKEKTIKYTIEEIWHILFSFEDEEYFTEFLETVLEFEEEEIKELLILFNSFPVGYANLSLKAIDNILPFLREGIIYSEAVILAKLPELLGKEKFEANKSDIIRALENEIKENRHQKTIVNITNNLIFKYYALDYDEKFGWKDTSYKLAESDYKDVETASVEHYGEKTWNQLEDNFKNKLLNEVAVQYQDFFTSSKREHIKQPHLVNQIKDFLDNHFNVSQNLLDKIYHPSQIDIYPSKEGQIFLESPKTAAFKNPMAYKTLYHLRDIINYLVEIGKIDNETRIVVEIARDLNDANKRWAIEKYQRDREVENRAFASAIEELIKEPNFNGYANSKSDSDIDKFRIWTEQLENFDEVQKDVSSIENNKKISASDKDIMKYRLWKEQNCVCMYTGKMIKLTDLFDKNKIDFEHTIPRSKSFDNSLANLTVCYADYNRNVKKNKLPTELPNYEESYNGYSAIKPRLKAWENKVEDLFSQIEFWKNKSKKAMDKAEKDNAIRQRHIRQMEYDYWKNKVDRFTRTEIPKGFVNSQLTDTQIITKYAFHYLKTVFAKVDVIKGSVTSDFRKIYGIQPKGEVKNRSKHSHHAIDAAVLTLIPSLRKREEILKDYYYKEENNIKGAYPIKPFSDFNYSMIEEIEKNILINNIADKDQTLTPGIKKVRKRGRIVWLRDKDGNLLLDEKGEKIPKIAQGDSVRGELHQQTYYGKIKVAAKDENGSLKRDDEGTILYNQVDGKDEMWMVIRVSVTDSKFNVDNIVDEVLKNHVKEQLKTKKVTELTDFQGNPIRRIRSRVKSGRGYMNPDNVTVVKEQTYKSNKEYKNYIYADSGENYVFSMYENNKGDRDIISINKFEAANYLRNIGFPNGKEELFRQKEPIIIKKKEARLIHVFEVGQKVIFYNHIEELNDIQNEPQEISKRLYFIKRLHQASVGNMLFQHHLEAREDEELTKAFPKEVFKSAGKDGFSKYQTDFIAPRILFKPTNPNFIIEGKDFEMKLDGSIKFKF

SEQ ID NO: 4122 - protein, 1276 aa, unidentified
  REGION 1..1276: note = Description of Unknown: Cas Enzyme sequence
MKKILGLDLGTNSIGWALIEVDENNIPIRIIAMGSRIIPLDADARDQFQKGQAISKNKDRTTARTQRKGYDRKQLKKSDDFKYSLKKILEKLNIFPTEELLKLPSLDLWKLRSDAVSDIEDITPEQLGRILYMLNQKRGYKSARSEANADKKDTDYVAEVKGRYTELKEQNKTLGQYFFDELHLAHQNNTYFRVKEKVYPREAYIEEFDAIINAQKLKHPFLTDEVIHTLRNEIIYYQRKLKSQKGLVSICEFEGFENTYFDKKTQQDKTIFTGPKVAPRTSPLFQLCKIWEVVNNISIKTKNPEGSKYKWGDRIPTIEEKQIIANYLSVNENLSFAELLKILGLKKEQVYANKQILKGIQGNITYSAIHKIIGDSEYLKFDTQTIPSKHSAILVDKKTGEILDERDSVELSSDLEQEPFYQLWHTIYSIKELDECKNALVKRFNFDEEIAEKLSRIDFNKQAFGNKSNKAMRKMLPYLMLGYNQSDAESFAGYNRRLTKEEKSKNVLDERLQLLSKNSLRQPVVEKILNQMINVVNAIIEKYGKPYEIRVELARELKQSKDEREDADKQNGFNKKLNELVMTKLAELDLPTTKRYIQKYKFIFPAKDKNWKEAQTANQCIYCGETFNLAEALSGDNFDVDHIVPKALLFDDSQTNKVLVHRNCNSTKTNHTAYDYISKKGSEALNDYVTRVDEWFKRGIISYGKMQRLKVSFEEYQERKKVGKETEADKKIWENFIDRQLRETAYIARKAKEILGKVCYNVTTTEGNVTAKLRQLWGWDDVLMNLQLPKYREIGQTQLKEWASDHGNRKHQKEEITNWTKRDDHRHHAIDALVIACTQQGFIQRINTLSSSETKDEMQKEIDSAKKKYGENYDEKILSEKNEIVKGQKEKNNQLNIYLISQRPENFTTKYIEQEADKILVSFKAGKKVATISKFKAVGKNETTGVIVPRGALHEQGLYGKIAILSKGGKSENHIIKKYKVGISAQDHIFTGKETYSIKIDKNGNEKIEDKIKTVIDSIVDNKVKEVVLSRLNRGFSDGKDYKSDVKKALLNFKDLENDPLWFNKEKGIKIISIKLKTGLRDSVIPLRTNSDGQEITFAKTGSNHHIAIYIDNTGKHIQHLCTFWHAVERKKFRVPYIINNTNSLWNYLLDKDVPQTFLDKLPADNLELQFSMQQNEMFVLGLSKEEFDEAVQQNNKALLSKNLYLVWSLSNSDYWFRHHLETKNSELKNITGANESNRYFRFKSIGAFLSKKPIKVRLNHLGEITKIGEYRNEKL

SEQ ID NO: 4123 - protein, 450 aa, unidentified
  REGION 1..450: note = Description of Unknown: Cas Enzyme sequence
MKKILGLDLGTTSIGFAYVNESEESQRSTIERIGVRVNPLTTDEQTNFEKGKPITINADRTLKRGARRTLDRYQLRRSNLIDALAKANIITKDTILAEDGKNTTHYTFALRAKSATEKVEKEEFARILLTINKKRGYKSSRKAQNEDEGQAIDGMAIAKKLYDKNLTPGQLAHQLLKAGKKQLPDFYRSDLQIEFDKVWNFQKQIYPEILTDEFRKELAGKGQRATSALFWIKYQFNTAEIKEKTREEKKLKAYEWRNNAISQQLEKEEVAYVITEINNNLSNSSGYLGAISDRSKELYFNKQTVGQYLYKQIQDNPHTRLKNQVFYRQDYFDEFETIWEMQAKFHTELTKELKKEIRDIIIFYQRKLKSQKGLVSFCEFESKEIEIDRNGQKTKKIIGLKVAPKSSPLFQEFKIWQVLNNVLIRRKGSKKRVVKENGQDQILCLGLEDN

SEQ ID NO: 4124 - protein, 985 aa, unidentified
  REGION 1..985: note = Description of Unknown: Cas Enzyme sequence
MLRLRRQLALFNELNIKGNLASNKIIELLGYNVKDWEINYSSIEGNRTNKTLYDAYFKILELEGYDEDLLKLQSKDDIDVSELKVPASEIQDMVKRIFEALNINTNILEFDAELEGKDFEKQASYQLWHLLYSYQVDDSKTGNDTLFRLLEEKFGFKKEHAQILANIALADDYGSLSAKAMRKIYPYIKELHFDKACFQAGYKHSALSLTKEEIASRPLKDKLELLKKNSLRNPVVEKILNQVVNVVNILIETNSEKDSDGNIVKYFKFDEIRIELARDLKKNAKERAEMTTNINAAKIIHEKIFKLLQSEFGIKNPSRNDIIRYKLYEELKNNGYKDLYTNSYIAREILFSKQIDIDHIIPQAKVFDDSFSNKTVVFRKDNLDKGNKTAYDYIDSKFGKEKIIDFEHRIAFLFEQGKKNKEEGISKAKYQKLLKKEAEIGDGFIERDLRDSQYIAKKARNMLYEICRVVIPTTGSITERLREDWDLINIMQELNFDKFKQLGLTEMVEKKDGSFKERIIDWSKRNDHRHHAMDALTIAFTKHSHIQYLNFLNARKNENHKEHNSIVGIEGKETEVTIDDLGNKKRKFILPLPNFRAEAKKHLESVLVSHKAKNKVVTKNKNKTKSTQGEKTKVELTPRGQLHKETIYGKYKFYVSKEEKIGVKFDEETINKVANPTFKKLLLQRLLDNGNDVKKAFTNKNVLAKNPIYLNDLKTETLPETVKLIWLEDDYSIRKDITPENFKDTKVIEKILDEGIKRILKERLSKYNNNPKEAFSDLDKNPIWLNKEKGIAIKKVKISGVNNAEPLHYKKDHLGNEILDENKKPIPVDFVSTGNNHHVAIYKDEKGNLQERVISFYEAVERVNQGLPIIEKSLNSYLGWEFLFTMKQNEYFIFPNEQTGFNPNDIDLLDPKNNKLISPNLFRVQKFGNISTSGVWFRHHLETSVEVSNSLKGVAYRNIQSTSHLKNIIKVRINHIGEIVKMGEY

SEQ ID NO: 4125 - protein, 1402 aa, unidentified
  REGION 1..1402: note = Description of Unknown: Cas Enzyme sequence
MTKKILGLDLGTTSIGWAFVKEAETDNEHSSIVKLGVRVNPLTTDEQTNFEKGKPVSVNADRTLKRSARRNLQRYKLRRENLLHILNENNFINEESILAEDDKNSTHSTYALRAKAAIEEITKEELARVLLMINKKRGYKSSRKVNKKDETDGQAIDGMTAAKKLYEENLTPGQYAYQLLRNGKKNLPDFYRSDLQNELDKIWNYQKKFYTDILTEGFRKEIEGKGQRATSTLFWLKYKFNTSENKGNRDEKKLQAYKWRSEAINTLLTKEEAAYVITEINNNINNSSGYLGAISDRSKELYFNKETVGQYLYKQLQNNPHVKLKNQVFYRQDYLDEFESIWETQSKFHKELTSELKQEIRDVVIFYQRKLKSQKGLISICEFENKEIEIEKNGKIFTKTIGLKVAPKSSLLFQEFKIWQNLNNLKIKNKASVTETYFDLEAKQILFEELNIKGNLSKEICLNLLGYNSKECDLNFPTIEGNRTNHSLYSAFFKMMELEGHEEIEWQKLPAVEIKDTIQSFFKSQNINTKTFNFNAELEGKAFEQQPSYQLWHLLYSYVEDDSFSGTEKLLNLLEAKFGFKKDFAKILASVTFQVDYGNLSAKAIRNIYPFIQEQVYSEACNSAGYRHSASSLTKEEIENKPLKDKLEILPKNSLRNPVVEKILNQMVNVINAIIADPALGKPDEIRIELARELKKNAKEREEMTANINQATIKHDAIKKILIQEFNVPNPTRNDIIRYKLYEELKFNGYKDLYTNQYIQKEQIFSKHYDVDHILPQSRLFDDSFSNKILVPRSVNLYKGNKTGYDYILDKYGKEKLDEYLSRIEILYQENCKNKEEGISKAKLKKLQKRETEIGDGFIDRDLRDSQYIAKKARYMLQEICRTVTPTTGSVTNRLREDWDLINVMQELNFKKYKLIGLTEMVEKKDGSLKEQITNWSKRNDHRHHAMDALTVAFTKHSHIQYLNNLNARNREDKLGKEVFRIEQKETYLTIDNSGNKKRKFKSPLPNFREEAKNHLENILISQKAKNKVVTKNKNRTKSSKGEKQKVELTPRGQLHKETIYGRLKQYQTSIEKINANFHEQNILKVANTRERNALLNRLKENDNDPKKAFTGKNSPTKNPIYLDTNKTLILPEKVKMVWLEDDYNIRKDVTPENFKDIKSLEKITDIGVKRILIKRLNDYKGNAKEAFSNLDKNPIWVNKDKGISIKRVKISGVKNAEALHYKKDHYGKVILDESGEPMLTDFVSTGNNHHVAIYRDESGNLQDEVISFHKVITERINQGLPVVDKTYNRHLGWQFLFTMKQNEYFILPSTDFDPSEINLLDPANNRIISPYLFRVQKFSKVTYGNSSVRDYVFRHHHETTVDDKSELKGISYKAVKSLSYFEKIIKVRINHIGQIVKVGEY

SEQ ID NO: 4126 - protein, 1232 aa, unidentified
  REGION 1..1232: note = Description of Unknown: Cas Enzyme sequence
MSTVLGLDLGVSSIGWALVNEKEGAKYIKAMGSRIIPLSTDDSDEFSKGNAITKNQVRTTKRTQRKGYNRYQDRKKYVASVLKDNRMYPDDTLFSLSGTALFGLRDKAVSQQITLPELGRICYHLNQKRGYKSGRADANMDKKDTDYVSEVKNRYQYIKDAGITIGQYFYRQLKENQHYRTKQQVFPREAYVEEFDIIFSVQKKYYPDLLTNDFVAELRDRVIYYQRPLKSQKGLVSICEFEGRYRQGKNGKEVFTGPKVAPKSSPLFQVGKIWETINSIRLVNKRGDDFTIPNEKKVELFEYLNQNEKLTQEKLFSILGLKKSDGWYGNKQTEKGIQGNLTVTAIKKILGAGTKFDEVSRFNTNIVNAGIPTFVVDRKDGTITAENAVKYVAPECEQEPLYRLWHIIYSINDVAECTIALMKQFGFTPHVAESLASIDFVRFGFGNKSAKAIRKTLPYLMEGYGYSDAAAFAGYNHSASVTKDEREKKVLDEALQLLPKNSLRQPVVEKILNQLINVVNAIIQQHGHPDEIRVELARELKQSREERNETYRSINKKEAENKKIAERIENEYRPLGVRATRNTIVKWRLFHEINNDESKINATCLYCGKQFGLTDALKGSSVDVEHIIPKAKLFDDSQQNKILAHRKCNEDKKDATAYDFMSGKGEQELKAYVERVNWLYENRCIGKGKRDKLLMPAEKIPKNFIDRQLRETQYISRKAVEILGKVCRNVWVTSGSVTERLRRLWGWDDVLMNLQLPKYQKLEGLTEIKEWETNDGQKHQTEVITGWTKRDDHRHHAVDALVIACTQQGFIQRINRLHAQQNRDEMKAEVDRMGAAARNGLTLLDRYLIMQRPFTTAQVESEAANILVSFKPGKRVAIKGVRKIKKDGKKEIVQRGIVVPRGPLSEESVYGKIKTIDKNKREKYLLENPDLILKPYIKELIEQHLQKYNGDVKKALSALKKEPLYIDEEKTIPLTYATCYKEEVVIKYPIETIKAKDVSYIVDGRIRQLVKERLDEFGGKEKEAFKTPVWYDEQRQIPIRTVRCFTGLSAVEPVKRDAQGRDIGFVKPGSNHHIAIYTDQNGKKVEHVCTFWHAVERVKYGIQAVIEHPAAVWDKILADRETYTETFLQKLPEPTWQLVMTMQQNEMFVLGLSAEELDAAMNTNDRKKISDHLYRVQKLASNDYWFRHHLETELDSDKSAEIAKRYYRVNSIGSLQILNPVRMKIGLLGNIK

SEQ ID NO: 4127 - protein, 1448 aa, unidentified
  REGION 1..1448: note = Description of Unknown: Cas Enzyme sequence
MKKNILGLDVGTNSIGWAFIEQDFENKQGRILGMGSRIVPMGEELSKFERGQAQTKNANRRIARGARKLNKRYKQRRNKLIYVLEQLHMLPDQIKLSEPFEDPLKIDKISILPVAKKQKQYSALDLLELRVKALSHPIPLKDLGRIIYLFNQLRGYSGGGNDLEKENEDEEETESVSKKGRENYVVFGKIISVSAPEKVVLKGKELTKSSVLLETEDGQLKGDTYLDILKEGESLELLVSITTSKKFGETITFKLPNKTSWRKKMENLEKELTEASKEKGKEVYLSEYFLSILKHNRWTKIRNNVVLRSRYQSEFDAIWREQSKHHATLSNIPKENLEKMLRFIFPGTKDTQEKYRQASLEKGLYHLIRNQIIYYQRELKDQSNLISNCRFEKNEKAIPKSHPIFQEFKIWEQINKLTINTKTENGINRKGEKKHKYIDRPIPTVLKEWIFNELHCKKELSFSALLSKLKKEHGLREGIDFLNGMNPKAKLKGDETKLLLKKALGEDSWTSLNLDEKERQIELWNILYYAKGNEYELDSERTSKVLNFLKTYGGEIVDAEQNAIKISKVKFSRAYAALSLKAIEKILPLVRCGTYFDHNLSDPLNEKIMRLLNEEVNDPFEKAAQEYIENNIDLLLHGGIMNAYATILVYDRHSEKQDVDSEKIKIWQDIKRLNSGELRNPLVEQLISETLMVVKDLWRHYGKPDEIKIELARELKNNAERRAKIYKTNTENQKANEEVKNLLIELNQEITLANIEKYKLWLSQENLGDEFIKLYKDPSKSEVEKMKLWKEQGHVSPYTGKPIPLHELFNRERYDIDHIIPQSRYFDDSFSNKVICEKAVNKEKSNRTAMEYFEAGSLLHVIFSKSNFIDHVNRSFQGLKRKNLLATKVPEDPIARQIKETQYISVKVKEELSKIVGNEHVKTTSGGVTDYLRNHWGLTDKFKHLLKDRYAKVQSLAADFEYEKYASALEKKKKEYKEKGIEFKDIELNREQFIDSFNQNYFQKKNNKIIIKGWSKRIDHRHHAIDALTIACTEPSHIKRLNDLNKELQTWLDTNRNKLLPEFEGTPSELLDEILNMDAEKKDKIFREIEKFKNIEMPWKGFPENAEHQVRNIIISQKPKDKLLIQAQEDKNDSKKAGKLQIKIRGQLHEGTLYGKSQGVEAYKIPLSKFAGKQFATEKAIEKITNRYLKDIIKAHLKDYDNKKEEAFSAEGILTLNKTLAGKKNKKEKTAPHTPISSIKVFYRDPTKIRKKKGQEEVEDALQQMDRKKAFNKSLYVKTGDNYLFAVMEKNGNRIFDLISFFDAANYLKGCFNEVPNAQRSTFNKELVFKKYFEQENEATKGANLLFTLKQGDPVYMPMEHEEMIMDENSPLFDRFWSDKAARSKNIHYVTKYSGKQIYFIRHDIAEPIVKGKEFGSQNAYEIINGLSIKQKCIKLNVDRLGNIKPIL

SEQ ID NO: 4128 - protein, 1432 aa, unidentified
  REGION 1..1432: note = Description of Unknown: Cas Enzyme sequence
MNKNILGLDLGTTSIGFAHVIEGEKPEQSSIERIGVRVNPLTTDEQTNFEKGKPVSANADRTLKRGARRNLDRYQDRRKNLIETLLKANIITKDTVLAENGKNTTHSTYALRAKAVTEKIGKVEFARVLLAINKKRGYKSSRKAINEDEGQIIDGMAIAKQLYEKDLTPGQLAYQLLKTGKKYLPDFYRSDLQTEFDKVWNLQKQFYPEIFTDEFYKELNGKGQRATSAAFWGKYNFNTAENKGSREEKKLQAYKWRSDAVSVQLKKEEAAYVITEINTNLNSSSGYLGAIGDRSKELYFNRKTVGQYLYAQLQKNIHTRMKNQVFYRQDYLDEFEAIWEQQAKHHSELTNELKTEIRDIIIFYQRKLKSQKGLIRFCEFESKEIGIEKNGQIVKKRIGLKVAPKSSPLFQEFKIWQALNNLQVRKKDSKKYTANNINQALLFDGEKETFLFDLAAKQDLFDELNIKGNLSANKIIELLGYKPTEWEINYSQLEGNWTNKALYDAYLKILELEGYNEDLLKLQGKDEINVSELKTSASEIKNMVKQVFAVLGINTAVLEFDAELEGKAFENQLSYQLWHLLYSYEEDNSPNGNETLYRLLSEKFGFKREHAIVLANVALSDDYGNLSSKAMRKIYPFIKEQTYDKAAAMAGYRHSASSLTKEEIETRPLKNTLELLKKNSLRNPVVEKILNQMVNVVNALVDNENKKLKEQGLPEDFHFDEIRIELARELKKNAKERAEMTSNINASKIENEKIFKLLQTEFGIKNPTRNDIIRYRLYEELKNNGFKDLYTNRYIPRENIFSKEVDIEHIIPQSKMFDDSFSNKTIVYRQTNLEKGNKTAFDYIESKFGNEQLEEYKSRIEALYQTGLKNKEGGISKSKYHKLLKQESEIGDGFIDRDLRDSQYIAKQARNMLYEICRVVTPTTGSVTDKLREDWGLINIMQELNFNKFKALGLTEMVEKKDGTFKERIVDWSKRNDHRHHAMDALTIAFTKQSYIQYLNYLNARKDEKHKLHNNIIGIEKKDTEVKIDDEGNKKRVFKLPIKNFRVQAKEHLENVLVSHKAKNKVVTKNKNKIKSKNGENVKIELTPRGQLHKETVYGKYKFYVSKEEKIGTRFDKETISKVSNERYRELLFKRLSENGDDSKKAFSGKNILSKNPIYLDDDKTKILPETVKLTWLEEDFSIRKDITPENFNNIKTIEKVLDDGVKRILLGRLKESGNDPKKAFSDLDKNPIWLNRHKGISIKRVTISGVNNAEPLHCKKDHLGNYILDESGKKIPIDFVSTGNNHHVAIYQDEKGNLQERVVSLFDAIQLVNAGLPVIDKKFNAGLGWQFLFTMKQNEYFVFPNEKTGFNPKDIDLLDPNNYKIISPNLFRVQKLASKNYFFRHHLETTVEERIELKDIAYKPQLGLNAIKDIIKVRINHIGEIVKVGEY

SEQ ID NO: 4129 - protein, 1404 aa, unidentified
  REGION 1..1404: note = Description of Unknown: Cas Enzyme sequence
MKKTLGIDLGSNSAGWAIRNLDLRDNQIEDFGVITFEKGVASEKGNEFPKVQKRTESRGKRRNYQAEKYRKFRILQFLIEKDMCPLSVEDFNNWKTYRKGKKREYPQSEEFLNWIRFDFDGDGKPDFHLFGKDKDESYYVFRAFASNLDYKNVFNKNPQILGRVFYQLAQRRGFKGRDEEEAKTMLTGSEKNGTKGRNDIEVYIEKYKSLGAALYHHQKDFGGRIRQRYNLRKDNEAELKLICDLHNISKDDYSKLWKAIIWQRPLRTQKGLIGNCIYEKGKKRISVSHPLYEEYRTWVFINNLNIIPPVGENKQEYIQTKIYPLFYKSKPDFELIDIDKQLKKDGAKRTSKHHEKTKVLSVKLLKQFQDVFGENWKDILKWDVNGDRSPQPAKKSQVQYTFEDMWHILMTFDGQENLKKFALEKLNLDEEKAIKFSKIKLQQGFATLSLSAIKKILPYLQKGFLYSHAVYMANLYKMLGENVISETLTNHFSEEIFKILNQDSANRKNAAIVNSLISEMLNDEHRYYISDNRNLDDGEKKDVLKSCIDNYGQESWDRLEEEVKTNIIEYVSTKYLEFLKKSFFDKKNLFVQPERIDEKIFNFLKETYHVSDDMKKHLWHPSEQENYAEAENYLEYSIGKKKYYVKEKSKNSFLSRNPEAEFEGKEIKLLGNPEPLSKGFKNPMALKSLHKLKNLVNYLLQTGKIDEETRVVIEIARELNDKNKRKAIELWQKEREKENDAYRKELAAYQEEFPNVKLIDENTLIRKIRLWHEQNKICMYTGKPISFSDLIVGSKYDFEHTIPASISFDNELKNLTISDSAYNRLQKGKRFPTQLMNYDSEQVINGMTYKAIINTIEFIFGERTVEYKEEKGKTKKIVKWKKITELEKQFDEWKKKASYASTKDYKDFCIVKYHMIKMDLDYLKSKLATFTITEYKAGWRNNQLRDTQIITKYALPYFKTLFKRVSVEKGGVTDIFKKVYKVQSKDSKKDRSVHSHHAQDAAILTLIPNAFHRERIIKAYENEIDNRTGKTYHELPMDWSDFSERYILELKDKVLINNLTDNRTITQTSKTIRKRGKIVYDVDELGNKKRRIAKGDTIRGQLHGETFYGAIKQPVRDDENKILFDENKKMILKDEIYLAVRKPLVYKKDANSPGFKSLEEIEKVIVDKDLFKMIKKQVEESDFKTALTEGVYMLDKNDNKVNKIRTIRCFENGLKYGTAIKVHNHSFVSDKEYKKTTLATNGENSYCLFYKSDLGKAMKILSIVDVAELKLKNIQNLYDEPEFSSFESGKGKNKIQLSLYSILKSGDKVLFYKESIHELKDLEREELSNRMFKMYQFEKDGRIKFRHHLAAGIDTELKKLNPEYSSVNFNEKQVFLRLRQGQWNFAVENTDFDMAVDGTINWLF

SEQ ID NO: 4130 - protein, 1404 aa, unidentified
  REGION 1..1404: note = Description of Unknown: Cas Enzyme sequence
MGKILGIDLGSNSTGWAIRNTDLEGNQIEDFGVIIFEKGVASEKGNEYPKVQKRTESRGKRRNYQAEKYRKFGILQFLIEKNMCPLSIEDFNNWKTYRKGKKREYPQSEKFLNWIRFDFDGDGKPDFHLFGKDKDESYYVFRTFASNPDYKNVFYENPQILGRVFYQLVQRRGFKGRDEEEAKTMLTGSEKNGTKGRNDIEEYIEKYKTLGAALYYYQKDCGGRIRQRYNLRKDIEAELKIICDLHHISKEDYSKLWKAIIWQRPLRTQKGLIGNCIYEKGKKRIAVSHPLYEEYRTWVFINNLNIIPPADENKQEYIQAKIYPLFYKSKPDFELSDIDKQLKKDGAKRTSKHHEKTKVLSVKLLKQLQDVFGENWKEILKWDVNGDRSSQPAKKTDSEYTFEDVWHVLMTFDGQENLKKFALEKLNLDEEKATRFSKIKLQQGFATLSISAIKKILPYLQKGFLYSHAVYMANLYKMLGESVISETLTNHFSEEILKLLNQDSANRINSAIVNSLISEMLNDKHRYYISDDRDLDESEKKVVLKSIVDNYGQESWDALAEEQKEEVINYVTGKYLEFLKKSFFDKKNLFVQPERIDEKVFNFLKKTYHVSDDMKKHLWHPSEQENYAEAENYLEYSVGKKKYYVKEKNKDGFVKRNPEAEFEGREIKLLGNPEPLSKGFKNPMALKSLHKIKNLVNYLLQTRKIDEDTRVVIEIARELNDKNKRKAIELWQKEREKENDDYKKELAVYQEQFPSVKLIDENTLIRKIRLWHEQNKICLYTGKTISFVDLIVNNKYDFEHTIPASISFDNELKNLTIADSGYNRIQKGKKFPTQLINYDSEQVINGETYNAIINNIEFLFGERTVEYKEEKGKTKKIVKWKKITELEKQFDEWKKRASYASTKDYKDFCIVKYHTIKMDLDYLKSKLATFTITEYKAGWRNNQLRDTQIITKYALPYFKTLFKRVSVEKGGVTDIFKKVYRVQSKDSKKDRSVHSHHVQDAAILTLIPNAFHRERIIKAYQEEIDKRSGKTYHELPLDWEMFSENYILELKDKVLINNLTDSRTIAQTYKTVRKRGKIVYDIDNNGNKNKRVSSGDTIRGQLHGETFYGAIKQPLRDEDNKILFDENKKMILKDEIYLAVRKPLLYKKDANSPGFKTLDEVEKVIVDKNLFKMIKKQVEESDFKTALAKGVFMLDKNGNKVNKIRTIRCYENGLKYSSAIKVHNHSFVSNKDYKQTTLATNGENTYCLFYKSNSGRAMRILSIVDVAELKLKNVQNLFNESEFSTFESGKGKNKIQLPLYSVLKSGDKVLFYKESVHELRDLGQDELSNRMFKMYQFEKDGRIKFRHHLAAGIDTELKKDNPEYSSVNFDEKQIFLRLSQGQWNFAIENTDFEMALDGSIKWNF

SEQ ID NO: 4131 - protein, 1382 aa, unidentified
  REGION 1..1382: note = Description of Unknown: Cas Enzyme sequence
MKKVLGCDLGVASFGWAFVNEAEEGDREHSSIVKIGIRINPLTTEEQTNFEKGKPVSLNADRTLKRGARRNLQRYKQRRINLINVLKKAGIINDDTVLAEEDKNTTHLTYALRAKATTDKIEKDEFARILLMINKKRGYKSSRKAKNEDEGQLIDGMAVAKRLYDEKLTPGQLCYKLLKEGKKSLPDFYRSDLRAEFNKVWDLQYEFYPEIFTAELRKAIEGQGKENTRKRILAISQTYTAENKAGTRDDKKLQAYKWRSEAISKRLAVEEVAFVITEINNNINASSGYLGEISDRSKELYFNKVTVGQYLYQQLQNDPHTRMKNQVFYRQDYFDEFETIWETQAKYYDELTPALKTDIRDIIIFYQRKLRSQKGLVSFCEFESKEVEYEKDGRKLKHIIGPKVIPKSSPLFQEFKIWQNLNSLLIQNKKSKEVLAFDLETKQLLFNELNIKGNLKKEQVFKLLGYKPNDWELNFAVVEGNRTNQALYKAFIEMMEGEGHDDMDMETLSASEIVSAVQSFFELQQIDAAILSLKTNLEGKDFEQQPAYQFWHLLYAYEGDNSNTGNNKLYELLNLKFGFKTEYARILANINLPQDYGSLSAKAIRKIFPFIKESKYSDACRLAGYNHSSSVTKEENEKRILKDKLELLPKNSLRNPVVEKILNQMVNVVNTIIANPALGRPDEIRIELARELKKNAKERELATAQINKAKGEHDEIRILLIKEFGIKNPTRNDIIRYKLYDELKFNAYKDLYTNEYISQEELFSPKYDIEHIIPQSRVFDDSFSNKTVVPRYINLRKDNATAHDFIVNTYGDEKFNEYKARVESFIKFYPERKAKYKKLLIKGENIGEGFIERDLRDSQYIAKKAKEMLYEVCRHVVTTTGSITERLREDWDLVNVMQELNMDKYRKLGLTEMIEKKDGGFKERIVDWTKRNDHRHHAMDALTIAFTKRQYIQYLNNLNARSNKGGSIYAIQQQETFLDAENKRRFKPPLKNFREEAKNHLESILVSCKAKNKVATKNKNKTKSAKGDKVKIELTPRGQLHKETVYGKIRQYVIKEEKISAKFDEETIFKVTKPQYSSALLKRLKENNNDPVKAFTGKNSLAKNPIYLNDQKTAQVPEKVKLVWLEDDFTIRKDISPDLKIEKVIDIGIRNILYKRLEHFNDNAKEAFSNLDKNPIWLNEEKGIAIKRVTISGVKSAEHLHFKKDHRGKDILDSDDKPIPVDFISTGNNHHVAIFRDENGELQDEVISLHKVITERINQGLPVIDKIYNQHLGWNFLFTMKQNEYFIFPSSEFDPLEVDLLDPANNKLISPHLFRVQKFSKVTYGNSSVRDYVFRHHFETSVEDKKELKDITYKSIKSLQYFEGIIKVRINHIGQIVKVGEY

SEQ ID NO: 4132 - protein, 1448 aa, unidentified
  REGION 1..1448: note = Description of Unknown: Cas Enzyme sequence
MKKILGLDLGTNSIGWALVEQDFDNKKGQILGMGSRIIPMGEELSKFEQGQAQTKNANRRLARGARKLNKRYKQRRNKLIYVLQQLGMLPDSIKLNEPFSNPLKIDRVSILPIEKRQKQYSAVELLELRVRALSEKITLKELGKIIYLFNQLRGYAGGSNEPEKEETDEEQQEENSKKANESYVAFGKVISVSEPETITYKNKELKKIKIVFETEDGTLEGDTFLETLKQGDSLELLVSKTKHKKHGETTTFKLPSKTNWRKNMENLEKKLTDLAKEKGREVYLSEYFLSILKENKWAKIRNNVVLRSRYQSELDRIWKFQSENKDSELYALLKNLSTDKLAEILNFIFPGTKETQEKYRKTGLENGLYYVIRNQIIYYQRELKDQTHLISDCRYEKGEKAVAKSHPVFQEYKIWEQINKLVINTKTIAGVNKKGEPKYAYEDRPIPATLKEWLYNELQQKREVSFSVIFNKLKKEYGLREGIDFLNGIDSKAKLRGNETKLTLKKALGENIWQLLNLDNNNNLIQLWDILYNEKGNEYDINSDRTSKILELLKPHINELPDIHQTAIHISKIKFARNYASLSLKAIEKILPLCRAGKYFDAALTTELNEKIIRLFNENLEDPFEKSVQQFLEKNQAEVLVNGGIMNAYATMLVYNKHTAKEYTANEQLKNYKEIKRLTPGELRNPLVEQLISEALIVVRDIWKQFGTKPDEIHIELARELKNNAERRAKIAKQNRRNQKANDEVKSLLQELQQETTLANIEKYKLWLTQENLEEEYLKQYNDPSKSEIEKMRLWREQGHISPYTGKPIPLGELFDRERFDVDHIIPQSRYFDDSFGNKVICEKSVNKDKGNKTAMEYFETGSVIPSVYSKAQFIEHVNKYFNGVKRKNLLATKVPEDPVTRQIKETQYITVRLKEELNKVVGNQNVKVTTGEITDYLRNQWGLTDKFKALLLERYKNVQPLLAEMAYEKYAADFEKKEEEYTKKNIPFNDIKISKENYIKSFNADFIKKKNNKLVIKGWSKRIDHRHHAIDAVVIACTEPKHIKRLNDLNKELQTWLDKNRKDILPNFEGTPSELLDEILNLSADKRELIFKQIEKFKNIDMPWSGFPEDVEREIQKTIVSQKPKDKLLIQPNPKDPEGKLQLKIRGQLHEATLYGISQGVESYRIPLQKFAGQKFATEKTIEKITNDFLKKFIKQHLKDYDNKKEDAFSAEGILNLNKKLSEKKNKNGQLAPHTPISSVKVYYRDPSKIKKKKNQEEIEESLQKLDRAKSFNKSLYVKTGDNYLFAVMEKNGKRIFDLITFFDAANLLKAKFNATENKVAFSKELVFKNYFENENKATKGSRLLFTLKQGDPVYLPQPGEEVITDVNSPLFAPFWNDKIKRSNNIHYVTKFSGKQIYFIKHNVAAPIVKGKEFGSQNAYEKVGNRSIKEYCIKLNIDRLGNITPAV

SEQ ID NO: 4133 - protein, 1500 aa, unidentified
  REGION 1..1500: note = Description of Unknown: Cas Enzyme sequence
MKKILGLDIGTNSIGWALIEQDFENKQGKILGLGSRIIPMAQDALGEFESGAPIKTQTAERTRLRLTRRLRERHLLRRERLHRVLNVLGFLPAHYANKIDFDARLGKFLPETEVKLVYDDNCDFIFRESFEKMLADFREHQPELLNRQNKKGECAKIPYDWTIYYLRKKALKEKIGNKELGWLLLHFNQKRGYYQLRDEEDDQKDNIEVLSLKISNVTRGEKDKKYEKYWYTIYFENGWTYDASFYSNIESWVNQTRDFIITTENLKDGSIKRRISSLPTFEEIDLMPEGVKKKFYAKIKLKTENEISKSHKTVGEYIYDVLLQKPQQKIKGKLVRTIERKFYKDELKQILQTQIRLNDTLKDPGLYRRCVEELYPHNLQHQSALLNKDFSYLFIEDILYYQRPLRSQKSSISNCSLESRTFILDGIKKTEPLKCIPRSHPLYQEFRLWQWISNLRIINKDSDADETANLVQSMEDVERLFDFLNGKKEIDQKTLLRHLKLKENVYRWNYVEDKKYPGNETHAMIAGRLDKVKGIPDSFLTGGKEEELWHIIYSVTDKIEYGKALKSFAIKNGLDAESFDGAFKKFPPFPSSYGSYSAKAVKKLLPLMRTGKYWNWDSIDTKTKGRIEKLITGEFDLEVKEKVREKTQKQLMHAENDFQGLPEWLAKYVVYDRHSERGETGKWETIAELEEYLKSFRQHSLKNPIVEQVMTETLRTVKDIWQYYGEGAENYFDEIHVELGREMKNPKNEREKIAKQNTTNENTNLRIKALLTEMLNDPDVENVRPYSPLQQDILKIYEDGVLNSDIELPEDIEKISRLPQPSGSELQRYKLWLEQKYRSPYTGAVIPLNKLFTPEYEIEHIIPQQRYYDDSFSNKIICESAVNKLKDNQTGLEFIQNHHGQIVELGFGKAGKIFNEEEYTDFVKQHYSKNRSKKTKLLALDVPEKMIERQLNDTRYISRFLLQVLSNIVRADEKDDGANSKHILASNGQITTNLKQHWGVDAIWNDLILPRFERLNQITNTTRFTVYNEKHQKNLPCVPLELQKGFQKKRIDHRHHAMDALVIACATRSHINFLNNQNALDKKKSKEQKMQDRHDLRTVLCDKKYNDGSNQNYQWIFKQPWGNFVLEAKEKLQHVVVSFKQNLRIINKATNKYIVIKNGEKVVEPQNGQNWAIRKPMHKDTISGLVSLRKIKTVSLSSGLDSSENIVNVRLKRYIQKLAAKGYDKKKITEHFKDNANHLNGSDVSKVQAYYWEHDNAASRVSLDSSFDQKRIDSITDTGIQKILLGHLKNNDNNPEMAFSAEGIEDMNKNIIALNGGKFHQAIFKVRTYEPMGNKFPVGTTGNKKGKFVEAAKGTNLFFAIYIDEKGRRSYETIPLNIAIERQKQGLTSVPATNAAGQNLLMHLSPNDLIYLPTEEEGSSSGPTDFSRSSNGIANRIYKMVSASGYQCFFIRHNVATPIVNKAEFSALNKMERSLDGAMIKEHCIKLSVDRLGNVKPASP

SEQ ID NO: 4134 - protein, 1162 aa, unidentified
  REGION 1..1162: note = Description of Unknown: Cas Enzyme sequence
MHLNRKAEVPKPTDLNYRIGLDIGIASVGWAVLENNTHDEPFRIIDLGVRIFDTAEQPKTGASLALPRREARSARRRLRRRGHRLERIKKLFEAEGLINIEEFEARYKRTGLPDVYKLRYEGLDRRLTNDELAQILLHIAKHRGFKSTSKAADGADSDTGEVKKGISANKTLMQEKRYRTVGEMIYLDEKFRTDCPWNENGYILTPRNKSGDYKHTVLRDMLADEVMKIFKAQRALGNDAATEKLERAYLDIMLSQRSFDMGPGAPSRYAMEGFEDRVGLCTFEGKNGEKRAPKAAYTSEFFVALEKINHTKIVSADGSTRFFTSDERHAIIALMHRQQTVKYTAVRKTIGLAEEDKFYNLNYSQKSGSKKSPEDTDFVKMENYHKIRKALREEVASEHLSPDKIKLYDDIARILTLYKNDDSRIRRLAEHDIASECYDALLEMSPSKFHNLSLKAMGKIIPFLLQGNTYDKACELAGYDFRTENNGEKSILLKGKNITNIVNDITNPVVRRSVSQTIKVINAIILEYGSPQAVNIELAREMSKDFDERRKMKSDMETREKENDKVLSRVREYKPNPTGQDIVKFRLWEEQGGVCLYSGDKIDINDLFSSNGGYDVDHILPYSITFDDSYRNKVLVKASENRQKGNRTPYEYIMAEKGEQAWNEYETLVRNTVKDYKKQLKLLKKHISDEEKAEFKERNLTDTKYITRIIYNMIRQNLVLKPYFNLERERKKQVMAVNGAITHYLSKRWGLAGKDRRTDTHHAQDAVVIACTTDGMINRISRYSKGRELAYSRGFGFVDEETGEILNRDNFSREDWDEKFGVRLPMPWEHFVDELDIRMSRYSTMGEGVSSGTSPREFILSHRDVFNWINYPEWMFVEGRPGRRGVLDGIFVSRMPNHKVSGQAHEETIRSAKYYEDGGCGVEKGYVVYKTAITNLKLDKNGEISNYFNPESDSLLYNALVKRLKDYENDPKKAFEKAFYKPKSDGTNGPIVKKVKVFEKKTIGVLLEKVKGFANNDSMIRVDIYCVNGKYYFVPVYASDVVRDRLPNKCAAKNKNSSDWEIVDDKYFLFSLYKNDLLYIKKDKLPLKSIDECKYPIPNSSKGVYMYFGGADVSGLAFSCEAHDKSFSFRSSVVTVDKLCKCQVDVLGNVSFVKNEKRMTFN

SEQ ID NO: 4135 - protein, 1175 aa, unidentified
  REGION 1..1175: note = Description of Unknown: Cas Enzyme sequence
MEEMKQTGRKNEAPKLTDLNYRIGLDIGIASVGWAVLENNSHDEPFRIIDLGVRIFDTAEQPKTGASLALPRREARSARRRIRRRRDRIERIKKLFQAEGLINIDEFEARYKIAGLPDVYKLRYEGLDRKLTDDELAQVLLHIAKHRGFKSTSKAEEAENENDAAKKKEAGALKKGISNNKKLMEEKGYRTVGEMMYLDENFRTDCPWNENGYILTPRNKSGDYKHTVLRDMLVDEVREIFKSQRSLGNIHASEELENAYLDIMLSQRSFDMGPGAPSKYAMEGFEDRVGLCTFEGKNGEKRAAKAAYTSELFVALEKINHTKIVSDDGATRFLTTYERKSIIELMHKQQTVKYAAVRKAIGLAEEDKFYNLNYSPKAGSKKSPEDTDFVKLENYHKIRKALGENIVSEHLPAEKIKLYDSIATILTLFKNDDSRIKRFIELGIGEECFDGLLSLSPSKFHNLSLVAMGKIIPFLLDGNTYDKACELAGYDFKADNKGEKSVLLKGKNITDMVNDITNPVVIRSVSQTIKVINAIILEYGSPQAVNIELAREMSKNFDERRKLKSDMESREKENNNVIKRVKEYKLNPTGQDIVKFRLWEEQDRRCLYSGEKIDINDLFSRDGGYDVDHILPYSITFDDTYRNKVLVKASENRQKGNRTPYEYFMAEKDDDAWNAYETLVRNTVKDYKKVLKLLKKHITEDEKSEFRERNLTDTKYITRIIYNMIRQNLVLKPYLSLEKERKKQVVAVNGSITHYLSKRWGLESKDRRTDTHHAQDAVVIACTTDGMINKISRYSKGRELLYSRGFKFVDEETGEILSRDNFTREEWDEKYGVKIPIPWEHFRDELDIRMSRYNGTGDDSIDKTTPRDFILSHRDVHKWINYPEWMFVEGRPGRRGVLDGIFVSRMPNHKVSGQAHEETIRSAKYYNDGGSVFESGGYVVTKKSIQDIKLKDREIKEFFNPDSDRLLYNALVDRLNKFENDPKKAFAEPFYKPKADGTQGPIVKKIKVFEKQSSGVFVRDGKGIAANGAMVRIDVFCEEDNGKKKYYFVPIYTADVVKKKLPDRAATANKLISEWRVMKEENFIFSLYSRDLIYIESDKGVQVKDIDGKISKPVNLFAYYLGADTSTASISGKLHDSSANFRSIGIQGLRRFDKCQVDVLGNISFVNKEKRMPFN

SEQ ID NO: 4136 - protein, 1483 aa, unidentified
  REGION 1..1483: note = Description of Unknown: Cas Enzyme sequence
MKTILGLDLGTNSIGWAKVSVDDYGNYLHDIKLGSRIIPMSQDVLGNFDSGVTVSQTAQRTEFRSKRRLVQRNLQRRERLHRVLHVLDFLPAHYDAAIGWDRTEAVTYGKFLNHAEPKLAWEELGNGKRRFLFMDSFHEMVANFARCQPALVADGKKIPLDWTIYYLRKKALTQAITKEELAWILLNFNQKRGYYQLRGEEEEENPTKQEEYYELKVVSVEATDSRKGNDTWYNVHLENGWIYRRSSKISLDDWVGKVKQFIVTTEYEKDGTTLKTDKEGNVKRSFRAPNENDWGLRKKRTETLLEMSGKTVGAFIYDHLLQEPADKIRGNFIRTIERHYYKAELEAILAEQCKYHIELRDKEMLEACARELYLNNLPHQQSLMKKDMTYLLLYDLIFYQRPLKSKKTLIANCPYEYYEYVDKETGEIKRQNIKCIAKSNPYFQEFRLWQFVLNLRLFDRVEDKEVTANYLPTADDHARLFTYLNDRKEINQETLLKDYFKLKKVKIGNEKEYPIRWNYIEDKEKKYPCNETRYELLMALDRAGIEHKWLDDNNLEYRLWHLLYSVEVKSESETALRKFKNDDAFVNSFLKVKPFKKEYGAYSEKAIKRLLAVMRKGFLWNEQDICDETRKRIEIIIKGDVDEKVKERMGHAAYSFDRVSDFQGLPEWLACYVVYGRHSEAMDIQCWDSPERLMAYINNFKQYSLRNPIVEQCILETLRTVHDIWKETGQIDEIHVELGREMKSTSEERARRTQNVLRNENTNLRIKSLLIELKNDTDICNVHPYSPMQQEILRIYEEGALQELNREDEDFEEISKISQMSQPSGKELNRYKLWLEQKYRSPYTGKAISLAKLFTPAYQIEHVIPQSRYFDDSFTNKVICEAEVNTLKSNLLGYEFIKKHGGEIIHCTTLGDVRIFSESEYKAFVMDHYANNKSKKDKLLMEDIPQEFLSRQMNDSRYISKVVKTLLSNIVRMADESEATSKSVIVCTGGVTDRLKKDWGLNDVWNSIVYSRFERLNRLTGTEAFGHWENKDGKRVFQTSMPLELQRGFRKKRIDHRHHAMDALVIACASRNIVNYLNNESANNPKKREDLRRQLCDKNRVIRKPWETFTQDVYNALRNVVVSFKNYVRVINKATNRYEHYDENGKKRFVQQKGSELWAIRKPMHKETYYGHVNLRRKELVTLQKALDDIPSICDKKLRDYISALVEKHFNKRQLLAHFKSTDYYWQKQYVNKVYVWTFSDDIKPLVATRKLLDTSFDAKRIGTITDTGIQKILRNYLEAKGGNATLAFTPEGIAEMNQNISKYNDGKPHQPILKVRITEPMGAKYRVGQTGNKMAKYVEAQSGTNLYFAIYEDSEGKRSYTTVPLDEVAERLKQRLSPVPEKDENDVPLKFYLSPNDLVYVPTEEELQLCECKLNKDRIYKMVSSTGNECHFIPYYVANVIYNKVEFEAKNKIGRALTGEMIKAVCWKLEIDRLGNILKVIK

SEQ ID NO: 4137 - protein, 1147 aa, unidentified
  REGION 1..1147: note = Description of Unknown: Cas Enzyme sequence
ERKYYKKELYAILCEQSKYHEELRSGDYLNKCAEELYKNNQPHRNSLLTKDLAYLLLEDLIFYQRPLKTKKSLIAECPYESYKYVDKETGEIKRQGIKCIAKSNPYYQEFRLWQFISNLRLFNKADDKEITADYLPTQDHYVRLFAYLNDRKEINQETLLKEFFKLKKITVNSEKVFPIRWNYIEDKEKKYPCNETRHELLLALDRARIDNSWLEKPGQEYRLWHLLYSVESKEETKEALRKLKDDDAFVESFLKVKPFKREYGAYSEKAIKKLLAVMRMGSLWRETDICDTTKGNITKILQGDIDEKLKEKISASVSSYNQLSDFQGLPVWLACYVVYGRHSEAAEIQHWETPESLLAYINGFKQHSLRNPIVEQCILETLRTVHDIWKEAGHIDEIHVELGRNMKSTADQRARISENVLRNENTNLRIKSLLLELKNDPNIKDVRPYSPMQQEKLRIYEEGVLQELTKDDKDFTEITKISTMAQPSAKELQRYKLWLEQKYRSPYTGKSISLTKLFTSAYQIEHVIPQSRYFDDSFSNKVICESEVNSLKDNMLGYEFIKNHGGEIIHCTMLGDVKVLSESEYKAFVNDHYAHNKRKRENLLLEDIPQEFLNRQMNDSRYISKVVKALLSNIVRAEGEEEATSKFVVSCSGGITDRLKKDWGLNDVWNKIVYPRFERLNRLTGTEAFGQWENKDGKRVFQTAVPLELQRGFNKKRIDHRHHAMDALVIACTSRNIINYLNNESANNPKKREDLRQKLCDKNRTIRKPWETFTQDATAALEDVIVSFKNYVRIINKATNYYERYDVEGKKVIAEQRGDDMWAIRKPMHKETVFGHVNLRRKVTVKLKDALENIPAICDKDLRDYINELVKKNFNTRQLLAHFKSINYRLNRQKIEKVEVWQFSDEKEQLVATRKSLDTSFDSKHIDSITDTGIQKILKNYLQAKGGDPNVAFTPEGIMEMNQNISLYNDGKQHQPIRKIRLFEPMGAKYPVGQSGNKSAKYVEAQKGTNLYFAIYEDEEGKRSYRTIPLNEVVERLKQGLSPVPEKNDKGILLKFYLSPNDLVYVPMEEEILSDICSLDKERIYKMVSSTGIQCMFIPSRVAISIVNKMEYSSLNKMEKAITGEMIKAVCWKLEVDRLGNVIKVIK

SEQ ID NO: 4138 - protein, 1492 aa, unidentified
  REGION 1..1492: note = Description of Unknown: Cas Enzyme sequence
MDTLGLDLGTNSIGWSKRNSDLGMNIAEQLECFGVMRFEQGVGKDQGKEFSYAVKRTQFRSTRRLYQARKYRIWETLSVLIKYNLSPLSIEDLNKWKIYNKEKGLKREYPINAKEFEKWVRLDFDNDGKPEYISPYQLRAEIATKKLNLSNQIDRYKIGRALYHIAQRRGFKSSKGDTNKLQELKNDEELDEQTLKRSEEKASKGLNDYIQKKKQAGVELKTVGCAFYELEKEGFRIRDNYQAVRSQYEEEIKYIFNFQQDLVANKDLYTDIHKAIFFKRPLRSQKGLVGKCTLEPTKPRCPISHPEFEAFRAWSFINNIKYRQNNDDEWQTLDLELKHELYKEKFTNSVSKKRFQFIEIREWIEKTKCLSLSYSDKTINYKDNTNVDACPITARIKGILGDDWRTVELCSSKERYNKKRDETHKITYNWQDIWHICFSFDDEEHISEFAKTDLQFDDKKTKKLINLWATCQRGYSMLSLKAIQNTNVFLDKGLIYTNAVLLAKLPEILGKELWEKEEQSLTTKLVALQGDVRKRKQLYGIVNELIAEYKSKEINNQFANKNCEYKLCDEDKKDIEVSCINTFGEKTWKEKKTEEEKNTIRKEVARLYQEFFATSKRDYYSLPEIGKELQNYLQKTFTDIDTKTIQKLYHPSQIDFYQPSKNEIVDFDGTNRTVKLLHDPKIGAFKNPMAMRMLYMLRRLLNYLLKKGVINENTRIVVETARDLNDANMRKAIKTYQERQEKENKEIQKILEELKLDSDNSSNQDKIKILADQYEVTENGSEYIPIDKDVQKKNNKQITEKERRFPTDIDKEKYKLLREQGFRCMYTGKMISLSDIFCDTPKFDIEHTLPQSKTLDNSLANKTISDSYYNRNIKKDSLPTSMPNYYKDVTIGEDIYTAILPRLTPWFETIERLESNVLYWKNASKYATTKDRKDYTIVQRHLWQMELDYWKDKVSRFTMEEIPKGFTHRQLVDTRLISKYATLYLKSVFKNVDVQKGTVTAAFRKIIGLQNSQEKKNRSKHSHHAIDATMLTLIPMAAKRDRILSLFYEREEKKLLRKTYKDIEDKLKNEISSLHIGNANEIISKIEGNILVNNEANDTELKHAKRKARRRGQIVYLDKEKKHPKLLQGDCIRGELHAQSFYGAITQAQKDEKGNILRDDNGNMIIDSTKRYYAIRQLLKCKANNQDTGFEDWEDLEKRAVDKATIQKLKDNYKGKTLKDACAEGQLFYWNNKKEKQFVRHIRCYARITNPIKVKKQTYKSEKEYKKYYYADGGDLYAMCKYENQNQKKYIVYSLFDIAQNRKYGIEDIPNSILIRPKKGNVNLQLADKSEENYYYEDGNKLYAMYECVNQDNNDFVYIISSIAHDIKDENILNKNRVKSKQGDIKLQLACKLVKGMKVLLLDKGETIANIKKISMDNLSKRLYVFTRPERDNRVNLINHLFVDDKSKGISVNNFSKLPTKIRQHIKGLNLLVEGKDFTIIPDGQIKFIDNK

SEQ ID NO: 4139 - protein, 1404 aa, unidentified
  REGION 1..1404: note = Description of Unknown: Cas Enzyme sequence
MTRKILGLDLGTNSIGWALIDKAEAKILGMGSRIIPMGTDKLDYEKGMGITKNADRRTARTIRKMNKRYKQRRNKLLFILSELGILPDQFQFKNGIPKPSKLQDLELLPIKKGTLQLNSLSHYQLKVGALNKEVTPKEFGKILYQFNQLRGYAGGNNNNENDNKKKKDDINEDETEKKKLYEVMVQKVLILSIEKTDRTFKAKGGKNKGQEIPLFAVSFLLDEEEKEAITMLQNLEVGKEEELEIRIKQTRKGENIILALPQKTNWKKQMEATEEILQTEKLFIGQLLLKDLLNNKWTKIRNRVILRSRYQEEFDAIWEEQAKYHEIINNCPKEKLEKIAWYLFPGAGKTRDSKQDTLRKAAIEGGLKYIIKEQVIYYQRRLKPQTELISKCQFEKEENVLATSHPLFQKFRCWKQINQLYITSKESTYNEKKKKSVYKYHDRYLTNDHKKEIYLKLQHQKQVGFSEVAKIIGLKNDNTEYLCGLNVRAKLKGCETALSIKKIFKDVVGEVFFSEALKNDNEFIVHIWDALYNNTGNEYDAKSLKVSAVINVLKNITEENTATTLALKLAQNISFLRKYASLSAKAINNILPLMQLMPRNVNYRIKENFEKIRNTIETGELNEGIEPYMVDYIYNNPKILETGGMMDSFAASLVYGKHTIDNVKPTITNYHDIKYNPNRNLRNPVVEQITNEALQVIKAIWKEYKFNSEELEIRIELARDLKNSAAEREKIYKGQVNNQKQNSKIKERLAEERISITDENVIKYKLYEQQKYISPYSGNTLDVSSFNKYEIDHIIPKSRLFDDSISNKVLVEGFLNKEKSNRTAWEYISQQNTQYQICSVQAYLDLINENYFGRKKKNLLLEKIPTNFIERQIKETQYIALAVKTELAKIVGSNNVKSSTGEITSFLRSHWGLRKLFMELTESRFKQMELWDSSKQWVNRYFDEEKGKNIYEIKHWSKRYDHRHHAIDALVVALTEKKDIDKLNNLNKELQDWLVKHKYEIKLEVKEDETVLEAFFALEESRREEIQKSIEPFKKFEKPIPDLLSQAKVHLEAMVVSHKPKDNVTIQFNEKTQKKEIKIRSALHEATLYGKHNGQDAKTISISSLTVKDIEKIVDPVLKKEINSHRNRSEYGSMKEAFSGEGLKAFNESRFQRKKPKSLKPPVYKIKIYYNTKEVKESSLQRLYESNDKLRVKTGSNYLFLVMEKEGKLGKERVFDIVSLYDAADIAIREWKNQTEDFKKKIYEDYLTINKADKVLFSLQQNELVYLPENIDDPVLKFSKEDFIYWISKKENKIKFNKRVYKVVKFTGKDCFFIPHNYANTISIAKDLTQQQKAELKKQYGEKKIPKKELNFEEFGSFGTSAKSEVNSHFVSVLTGEKNDKEPLKIQDYSIKIKTDWLGTLQLA

SEQ ID NO: 4140 - protein, 1537 aa, unidentified
  REGION 1..1537: note = Description of Unknown: Cas Enzyme sequence
MFSQRNNPYCELLSGVKIEKFKNLFMKKKILGLDLGTNSIGWALVEQNFEEKQGEILGMGSRIIPMGAELSKFEVGQAQTKNANRRIARGIRKQNKRYKQRRNKLIYILQQLGMLSAQIRLSEPFDNPLRLDKISILPIEKEQKQYSALDLLELRVKSLSEPVSLEELGRIIYLFNQLRGYAGGGNEPEKEEVNEEEAEKNEKKGKESYITFGKVLMLSEPEKIIYNKKELKKYKVLVETEDGIIEGDTFLDFLKIGESFELLVNISVSKKHGETIVFKLPNKTSWRKKMENLEKELTELSIVKGREVYLSEYFLAILKENKWAKIRNNVILRSRYQAEFDKIWKTQSENSESELYKVLETLTQERLSDIVKFIFPGTKETQEKYRQAGDEKGLFHLIRNQIIYYQRELKDQSNLISDCRFEKEEKAVAKSHPVFQEFKIWEQINKLTINTKTENGTNRKGETKYKYVDKPLPSVLKEWLFDELQEKKEIGFSTVLNKLKKEYSLRDGIDFLNGMNPKAKLRGDETKQLLKKALGEELWNMLGLNDKERQIELWDILYNAKGNEYDLESERSSKVLAFLKKYSISIEDPAQTTIKISKIKFSRSYASLSLKAIEKILPLVRSGKYFDNNFSDELKEKIIKLLNENVSDPFEKAAQEYLESNVEVLAEGGIMNAYATILVYDKHTAKEYGENERIENYQKIKRLTPGELRNPLVEQLISEALIVVKDIWKQYGKPDEIRLELARELKNNAERRAKIYKSNRANQMAKDEVKNLLIEEKQEITVTNIEKYKLWLSQENLADEYVKLYKDPSKSEIEKLRLWKEQGHVSPYTGQPIPLSGLFNKGLYDKDHIIPKSRYFDDSFSNKIVAETSVNREKSNRTAMEYFEVGSAIPSVFSKENFINHVNKRFEGQKRKNLLATEMPQDPVARQMKETQYISIRAKEELNKIVGNENVKTTTGSVTDYLRNHWGLTDKFKEILKNRYEKAQPLFAEMEYDEYEKAFAKKKKEYEEKKIPLNEIELSKEEFLQSFNNNFFQKKNNKLIIKGWSKRIDHRHHAIDALIVACTEPAHVKRLNDLNKELQKWLDEHKKEILPDFEGSPSELLDEILNFEEAEREKIFKQIEKFKNIDMPWKGFPEDAEKEIQKIIVSQKPKDKLLIQPDKNGKLQIKIRGQLHEGTLYGKSQGVETYTVPLSKIADIDKVIVNEYLRNVISEHIKEFSNKKEAFSAEGILALNKKLAEKKNKKGEIASHTPITSIKVFYRDPTKIKKKKGEVEIEETLQKLNRSKAFNKSLYVKTGDNYLFAIMEKDGDRIFDLITFFDAANILKEEFNKAINKATFSKELVFKKYFEEKNKAKLLFTLKQGDPVYVPDDTEEVITDPESPLYEPFWNDKNARSKNIHYVIKFSGNVIYFINNRIADTIVKGKEFGSQNAYQNIHGKSIKANCMKIEIDRLGNISPEKKKYNKVTDTNTVSEPGALFEPKKWVLKKFDNFDEMESDQLKHFASLTTTELLANLKKLTLAAFGISNEKDMKISTRRIKF

SEQ ID NO: 4141 - protein, 1485 aa, unidentified
  REGION 1..1485: note = Description of Unknown: Cas Enzyme sequence
MRNILGLDLGTNSIGWALIDDEQKRIIKAGSRIIPMDARTQSEFEAGTLQSAASVRTGFRGTRRLYERAELRRERLLRVLNILAFLPDHFKDEIDFSEHPGKFKDHGEPLLPYRKNASGKNDFIFKDSFNEMLADFAKAQPQLVANGKKVPYDWTIYYLRKKALTKPIRRDELAWIILNFNTKRGYYQLRGEEDELATPKNEEYKVLEVSEIVKGEEDKKRRGIFWYEITYENGAVQRKSGPVPPRNVGDKVELIVTTNIDKNGNESLKLRDPKPDDWTLMKKRSENAIQESGKQVGEFIYDSLLSQPDIKVKGKLVRVIERDYYKKELIAILDKQKEFIPELSNRDMYFKCIKELYQNNDAHIESLQGKDFTDFFVNDIIFYQRPLKSKKSEIADCPYEHYQYINKETGEILHKPIKCIPKSNPLFQEFRLWQFIQNLRIYQKEKNVNGKLKINVDVTSEFLKNEDEVCSLYEWLNERDSITQEQLLKYKPFGIGKEAANYRWNYVEDKSYPCNETRYDILKCLAKVNGKPELSRQQEQALWHILYSVDDMIELKKALASFAIQNRLDSESFVMAFAKIKPFPSDFGAYSEKAIKKLLPLMRAGRYWNAEAIAPHTLSRIEHIIDGIADDTIANRVREKTIRLQSIADFKFLPLWLACYVVYDRHSETSDTERWEKPENIDDYLRCVLKQHSLRNPIVESVLQEMLRVVRDIWSTYGKIAEVHVEMGRDMKANANERKKRSENISRNERTNQRIRLLLQEFVNPEYDIENVRPHSPSQQEILKIYEEAALNDKEDVPDDILLIADSLGNPSKSVSKSDMQRYRLWLEQKYKSPYTGQTIPLSKLFTPAYEIEHVIPQSRYFDDSLSNKVICESEVNKLKDRMLGYEFIVKEGGRIIEGNLGGQIKIFSKEQYEEFVRQHYAKNRTKMQKLLMEDIPDGFIERQLNDSRYIARKTIEILSKLVREEGETEAVSKNVISTNGNITDRLKKDWGMNDVWNDIVAPRFERLNQITGTNDYGQWVNQNGKRYFQINVPIAISQGFSKKRIDHRHHAMDAIVIACATRSHVNYLNNKSALASEKDTRYDLQHKLCDKVKTDAYGNYVWQFKKPWPTFTQDARAELGSIIVSFKQNLRVITRMTNHYWHYVNGKKVLEKQESGDGWAIRKSLHKATVSGAVRLQQVKKVRLAEALKDWHQIKDKDIRAAIKEVIGMYKGFDEKIILRYFKDRKYMANGKEISKVEVYYLPEKAELSATRNVLDTSFDKKKIEKVTDSGIRAILLRHLENNGNDPKIAFSPDGIETMNRNIKLLNNGKGHKPILKVRVAEALGMKFSVGETGNKRKKYVEADKGTNLYFAVYADTDGNRDFKSIPFNEAVERLKNGLSVAPEEGADGKKLLFTLSPNDLVYIPEEGEHVDGIHNLSRVYKMVSSTGNQCFFIPFSIAYPIENPKELGANNKAEKTWSGIMIKQQCMKLEINRLGEVTKIYKQ

SEQ ID NO: 4142 - protein, 1590 aa, unidentified
  REGION 1..1590: note = Description of Unknown: Cas Enzyme sequence
MKKILGLDLGTNSIGWALVQQDFEKKEGTIDGLGSRIVPMDQAQLSDFGKGNTVSQTAQRTGYRGIRRLYQRDNLRRERLHRVLNILGFLPEHYKNEIDFVDHFGQFKKDKEPKLNYRRNEQGRFEFIFMDSFKEMVSDFKEKQPQLFYIKANGKETKIPYDWTIYYLRKKALTENISKEELAWIILNFNQKRGYYQLRGDELSKKEDDNKDEKYYALKVKSVVETDEKNAKGTWYDVVLENDWIYRRQSKESLDVWLGTIKEFIVTTITSKDGTIKRSFRAPKEDDWGLVKKKTEQEIKQSGKHICEFVYDTLLQNPTQKIRGKLIKTIEREYYKKELETILDTQLKLQPELINSSLYQKCIDELYPRNEAHQNSIKDKDFKYLFVEDIIFYQRPLKSKKSTIGGCQYESRTFMKKVFDKVTNEEKKTQVTEPIKAISKSHPLFQEFRLWQWLQNLRIYQSENTVDGKIKIDVDVTNELLPTENDRVDLFDFLCGKNDINQTQFLKYFSDKKLIAKQKKEAETHRWNYPEDKTYPMCETHASFVSKLGKVEGTQNVVDFLWETTRVGKSEKAPMISREVQLWHIIYSVKNPKEYEGALGTFAQRHQIHQESFIENFKKFSPFNSDYGSYSEKAIKKLLPLMRMGKYFDERMISHGVKERILSIMERVNTLNLDAKDLKKEYEKVTDDDILRQLIKSFIPFKEKNALSGLNTYQACYAVYDRHSESGDWQQWNSPQDIDKYLSTFKQHSLRNPIVEQIVTETLRTVRDIWIHYADKNGTPYVEKKNKLTGKKEKHYERIFDEVHIELGREMKNPADTRKKMSERNTENENTNIRIRELLKEIMNDPKVAGEVKPHSPSHQNLLKIYEEGIFQNPDTSYQKLGEDSVNKIRENKSPTKTNATPTQADIKKYKLWLEQKYISPYTGQPIPLSRLFTSDYQIEHVIPQSRYFDDSFTNKVICESDINQLKDNQTGYEFIKNHGGSIEGGDRIFKLDEYEGHCNQYFKKNRTKLKNLLSEEIPEGFINRQMNDSRYISKLVKGLLGNLVREGQEKEATSKNILPVTGSITAKLKQDWGLNDKWNELILPRFERLNTLTETNDFTYENENGVIVPTVPDQLKSKFKKKRIDHRHHAMDALMIACCTRKHIQYLNSLNNEKEKYNLQPSLMIKNKEGHFTKHFLMPWSAFPADAKADLDKAIVSFKQNLRVINKATNKTWQWVKQKDGKYKKQLVLQTKGDNWAVRKPLHTPLPYGERKYNFSILEISKNIGKRNFIEDDEIRTKVEDVLVLFDGAIGKAESYLKKNPIIDNDENPIISTIFNIAEKRYRKRQPIHKLANRRQGGIKTSKDAIKFINKVSDKIIRNDLLSHLKENEYDIDKAFSSDGIENFNSKRNVPVFKLPISEASTGKFPLGKNHDTKVKFGEAEGGTNLFFAIYRDESENERAFETISLEKVIEHQKWRATIENSEERNNTPMIPVKPEKGIFLFSLSPNDLVYVPTDEEMENPNIVDFENLNVKQVERIVVVNDFSGGTCYFTPNRIAKNIAPKEVDMSFDERKNKTTGSFDTKTASLEGNSIKDRCWKLKVDRLGNVSRC

SEQ ID NO: 4143 - protein, 1883 aa, unidentified
  REGION 1..1883: note = Description of Unknown: Cas Enzyme sequence
MSKKILGLDLGTNSIGWAYVEIDHEKWIVKIIGLGSRILPMDAGEIGDFERSGKIKSSAAQRTEKIGPRRLNERYLLRRDRLHLVLDLLNALPKHYELEIDFTNEKGEKCGHFKKNKEPKLAYLPKRKGEKAHFLFKESYQEMLDELGIENKKKSRIPYDWTLYFLRQKALFKKISLEELAWVLLSYNQKRGYEKTEVEDKSTKEGEIVEELDLRVKEVIAKVGKEGKKFYEIHLDGNDNFIYNEYSDVQMTFKDDLKEIIKSSKVDEQGNIDNKKTEFTIVDIYPLKIKDVNYEKTEGKHKYTLTYQNGWQEVKQPNNFTFRYKNALHKSYDYIVETVYDNQGKIRTQQGKERKLREPDLSDNSSDWTLLKKKTEKETLAFNIEKGYQNSNGSAKSYISPRIYNVLKNDAQSETGKRTKIIGGMFQVVDRDFYREELKQIIATQKQFHSSLNDKEVFDKCIKFLYPQNKNHQKALLKNKDAIQHLLVEDILMYQRPLKSKKSEIANCKYEIRYWKNVEDKNGNPIEKVDIETGEVKTIKEPVYIKVVSASHPYFQEFRIWDKLHNLRLIQLEKEVDGKKITNQDITKEFFKSEKEYQELFEELNNRNSLNQEQFLAYCKEKFKIDYKSKDSNFAWNFPEDEEIKRNETRVSFATRFKRCGFAEYADFLTQQKELELWHYLYSVNYKERTENNNKSITTFFNNYFAGFDINEEVKEKIIIDFKTYPKFASKYCAYSEKALKKLLPFIRLAEREQKDSWKDESWYQKWQKNLVTRESEILQKLKEIDFNAEEIDYSKVINTSVDLQKGEIPFPKGLFNVFKGFEQSEEFQHLNLTQASYLIYGRHSELAQAKYWTSPDDIRKQLHQELKQHSLNNPVAEKVLLEMMQVVADIWDYYGEGKEKFFSRIHLEVGRELKKSAKEKEAETKRMSGNKGQNKRIRQILEEFLSQSDYNANPRNQDHLERLRIVEEGAEHTKNNDKKFFVDKSYSKKDIEEILKKQKISQTDFEKYKLWIEQGYRSPYSGLMIKLTELFDGNKYNIDHIFPQASNTNNSLSNKVVVEVDLNKLKSDRTAREFIQAQKGQPHPDTKTKVCTEEEYLSIVKTQFSGTKKLILLSKEIPKGFTSSQLNNSRHIARKAMELLSHIVREPGEVEFRSKNVLPVTGMVTTELKRTWKLDQVWTELVSPRFIRMNELTQSNLFGNWQIAKNGKEYFDCNLDDTIREKDESYDIKRIDHRHHALDALIVALCTEEHVNYINNINANAKSENYGKQKQIEKYRQTLKRKIKFTKKDDEQDENNWYYMLPGEIRKAEAENSRKDSVLEMTYHYKDFDSFGQDYKKMVLNALQNTIVTFKQNLRVINKRVNYYQAEPNTKKRVAQQPKTQKDIANSTNKYNWGVRRSLGKDTFYGKQIINGEEKIVGREKLDITFDSKRINKISDSVGRTKTILLNQLEQYDTVELPFEEAIKYFDALLEKQEFEAIVNDSENEFRSVDDLMEHLKANGHKYKKVDYSKLNVFIDKISERDFRNEFAVDIKEHPEIAFAPEAIEEMNKPENIQKLNDGKNHKPIKKVKISRGFGNQRALNEENKESVKSKQFVVNDAGSNLYLGFYEGFVKDKNGNEIRDEQGRKIKERKFQDIGLIDLIESLKQDKENRINPLSDKVYDDKGNNYNLIFTLSPLDLVYVPTEEEIESPSQVDFNNLTKEQVDRVYKYVDGGSAIANFVPFTVAQPVWRFHDDKKKKEIHNQLLEKSLLTISEKELIKDEFGFGSQQTKNQNMIDGKTQIKKICWKLKVDRLGNILTPGSNYPNKRDTSNIISEPRAVYQKKWSLKSFNSFDTMEQDQLSYYASLSPIERLQVLKELTLKAFGFRQESDMNVIERKIKFEK

SEQ ID NO: 4144 - protein, 1491 aa, unidentified
  REGION 1..1491: note = Description of Unknown: Cas Enzyme sequence
MAKILGLDLGTNSIGWAVIDNEKKCIEAAGSRIIPMDAGRLGDFEKGNSVSFTAERTQYRGARRLHERYILRRERLLRILRIMRFLPDHYEAQIDRYGKFPTDKEPKLAWREGKDGKAEFLFKESFEEMAAEFRQSGNDGKIPYDWTIYYLRKKALVKPLTKEELSWILMQFNQKRGYYQLRGKLDELDTSTDSKKEEKEYHELIVLKVDDTGEKDKKGNTWCNIHLENGWIYRRACRIVPDWEGKKRGFIATFKLDKEGKRIDDQPKISSPSEDDWNLRKLKTEDDIRKSGKTIGEYIYNILLNNPQQKIIGEAVRTIDRKHYHDELVQILRKQSEYLPELKDKELYKQCIEELYPNNEAHRNSISNRDFCYLIVDDILFYQRPLKTKTSLIADCPYEERNGKPLKCIAKSRPLFQEFRLWQFLSNLRIFHQDNDITSTLLPNNEAYAELYSHLSTQKEIDQASLLHYFKIGKKDMHQYRWNYVPDKKYPAGETKSILLGGLRKAGIDEEFLDSEKELHLWHILYSVDDTTQYRKALRTFAGRQGWDDERIEAFAKAFDRLTIYKEKDYGAYSAKAIGRLLPLMRRGRYWDIDAIDPLTRQRIERLITGEVDDTISLTLRERFKHINDIKDFEGLNTWQACYIVYGRHSEAIDTQKWTKPEDIDTYLKTFRHNSLNNPVVEQVVTESLRVVRDIWKQTGNIDEIHIELGRELKKTKAERESMSQAIAEGEATNQRIRLMLAELKNPDFEIENVRPQSPSQQELLKIYEDGVMRSGVEIPDDILDIQKKFTSVKNQPTHAEIIRYKLWLDQKYISPYTGRTIPLAKLFTPAYQIEHVIPQSRWFDDSLSNKVICEAEVNALKDRELGHEFIVHHHGERVPLSMGESVDILSVEEYEKLVKNIFANNHAKRKKMMLDDIPEDFTSRQMNDSRYISRLMMHLLSNIVRNVDEDGNLEDSVTSRNVIPCSGTVTDRLKRDWGIGDVWNRIILPRFQRLNQITGTTDYTAVTAEGHTIPAVPIHLRQGFNKKRIDHRHHAMDAIVIACCTRDHVNILNNEAAKSNTRYDLQNKLRAKSTYLDKQGYKHDIFTEFIKPWPTFTEDVYHTLQGIIVSFKQNLRVINKTTNHYSIIRDVKRATTTQTQGDSWAIRKPLHKETVFGEVNLQLKKRIAIKKALNDINSIVNRELKEKVKEKKALGYTDKQVAEYLEKNKDIWSEAADGKIEVYYYTKDTGDRYFATRKDLLSLMSGCTTATAAYDAIDSITDSGIRTILRAHLTAEGNNPAEAFSADGLERMNRNIQQLNGGKDHQPIKKVRVFEQANKFSIGSTGQKATKFVEAAKGTNLFFVIYTNAKGVRGYATVPLNIIIDLQKQYENNWKEKLPERLSQDDLALMPKDAKLLYVLSPGDLVYVPMLTSNSKHSENVESSRIYKCVSMSGSVLDCVQYCISKMIADPFEYTRHNKMQRAITGEMIKDVCIPIQVDRLGNITEIGQQ

SEQ ID NO: 4145 - protein, 1503 aa, unidentified
  REGION 1..1503: note = Description of Unknown: Cas Enzyme sequence
MKKILGLDLGTNSIGWALVNEVDDNKKEILGIGSRIIPMSQDILGKFDSGNSISQTADRTGFRGVRRLRERHLLRRERLHRVLHIMGFLPKHYEKNIDFENKLGKFISDTEPKLVWKDNGNKGFEFIFKSSFNEMIEEFKTTQPQLFENDKLIPYDWTIYYLRKKAITKKIEKEELAWLLLNFNQKRGYYQLRGEEEEINPNKLVEFHSLKVVEVTEDELQKGKTDIWYSLLLENGWIYRRSSKTPLFDWKEKTKDFIVTTDLNNDGTVKEDKDGKEKRSFRAPSEDDWTLLKKKTESDIEKSKGTVGSYIFDALLQNPLQKINGKLVRTIERKYYKQELKTILEKQKEFHIELNNVELYNACLEELYGNNEAHRMSNANRDFTYLFLNDIIFYQRPLKSKKSLISNCTYESRTYIDKETGERKTNPIKCIAKTHPLYQEFRLWQFIQNLRIYERKTDSDVTFEFLKSENDYVALFDWLNDKKEIKQDNLLTTYFKIKKKKGDERLSHRWNYVEEKEYPCNETRAQILNRLLKVNHVSEKFLDKEIEIALWHILYSVEDKLEIEKALKSFAIKNELGDNFVEIFKKFPPFKKEYGAYSEKAIKKLLPLMRMGRYWDEGSIMAYTKKRIESITERLQSIHYDASLIDTISDDSIPKQVLKSFINCSNPYSGINTYQACYAVYGRHSESGDMQQWKTPADLEKYIKEFEQHSLRNPIVEQVITETLRVVKDIWKQYGRFTEIHIELGREMKNSADKRARMTAQISENENSNLRIKYLLAELINHNDVENVRPYSPSQQEILRIYEEGVLNSGIEIPEDIAKIAKTNQPSKSDLIRYKLWLEQKYRSPYTGEIIPLGKLFTSAYEIEHVIPQSRYFDDSMSNKVICEAEVNKEKDNALGYEFIKNNEGKIIELSYGKRVKIFTITQYEDFVKQYYSKSRSKMKKLLMEDIPEDFVQRQLNDTRYISKVVKGLLSNIVREDGELEATSKNVISCTGGITTILKQDWGLNDVWNSIVTPRFERINELTNSNSFGQWTNKEGKRVFQTEMPLELQKGFNKKRIDHRHHAMDALVIACATRNHINYLNNESAKPSAKVSRYELKSKLCYKSKTDDNGNYKWQFYKPWDTFTQDAKTAFENIVVSFKQNLRVINKTLNKYQSYENGKKTIKIQEKGESWAIRKSLHKDTVAGVVNLRLKKIVNLSAGIDLWEMLVEKSLKTKIKQLLNEGFDKNKIHKFFVAQEYKWMNKEISKVEVYYFTNDKEIQVALRINLDVSFNSKRIESITDTGIQKILLNHLSNYNEEKDGKIVEHPELAFSSECIEEMNKNIVLLNKGKNHQPIIKVRTYEPKGNKFNVGTSGNKIDKYVESAKGTNLFFAIYADEEGKRSFETIQLNIVIERLKQGLSEVPETNEKGYKLVFHLSPNDLVYLPTIEEIRTNSKEVEDKNRIYKIVSFTGNRLYAVQQNIATTIVDKVEFTLLNKLEFEIENNLSIKQYCIKLKVDRLGNISL

SEQ ID NO: 4146 - protein, 1472 aa, unidentified
  REGION 1..1472: note = Description of Unknown: Cas Enzyme sequence
MDNILGIDLGTNSIGLSLRNTNFNGSIQNQLEYFTSIIFPSGVGKGKSGEFSYAAERTKHRSSRRLYQARRYKKWKTLGLLIENDYCPLSMEDLEKWSKYDKAKGLKRQYPIHATNFEQWIRLDFDGDGKPDYANPYELRAELMEKQFDFTKQTNRYKLGRALYHIAQHRGFKSSKGETIKEQEQNEKDNIQDFDLAEALKKSEEKKSGKLSEYMKKYNLPTVGCAYAHLRKNGIRVRNSIYQAVRSQYKDEIKQIFEYQNGLDKNSDFYKRLLSEKKGEGTIFYKRPLRSQKGQIGYCTLEPNKPRCPISHPEFEKFRAWCLINNIRFGEDLKETLTLEQKRELFHERFLLTRSSFKFEEIRKWIERETFMRLDYKAKTINYKDKTNVSGCPISGRLKNLLGEDWEKWMCKTGITKVIKQKKDGKYTERQVEIGYSSYDLWHICFSFDEPENVETFAKEKLHFDDKQAKQLVRIFFAIQQGYSMLSLKAIKNINRFLEEGLIYSDAVLLAKLPDIFKDRWAIEKDAIVSQIDLVIENNRKQKLLFNIVNTLIANYKSLGYDDEIQFNERFADHNTTYKLQPSDYNDIKTVTIKAIGEKTWAKKDEEKQKAILEQVAVLYQNFFASEQRDYYKLPKVADDLAKLLHEKYNFLQEKDLKKIYHPSMIEFYASAKEQHLDDGRWMKLLGSPVIGAFKNPMAMRVLHVLKKQINELLKASLINGEETRIVVETARELNDANMRWAIETYQREREAENKEYEKILNEYFPNRNINDKEIEQARLMCEQHDIPESDILQQKEKIDKDKTLKSLIYKKDLTKYRLWLEQGCRCIYTGKMINITNLFDENAYDFEHTIPRSLSFDDSLANLTICDAHYNRTIKQNQMPTQLANYDKDANGYTAILPRLQPWIDKVERLKDNVEFWKTQSKRAQDKDRKNQCIRQQHLWKMELDYWKAKVDRFTMTEVTSGFRNNQLNDTRLITKYAYHYLKTVFNKVDVQKGKITSNFRKILGVQSTDEKKNRDKHSHHAIDATILTMIPSAAQRDKMLEIFYKIQEEEKLHRDTTVLKKELNKEIKKCNLPTNVSLIAPFIENNILINHVSKDQTLTPAHKRKRIRGKIVPLRDADGTIIYETNADGTVKKNKYGHPIPKAKQWITGDSIRGQLHKDSFFGAIKYPIIDKEGKPTRKNGSFIYEKESNGQDVISMVMRVPITSFTKEDELKKIVDPTIRASIAKTIAKRKEEGKSFKAAIEEPIWLLDKDGNEIKIDKNGLPISPIRHVRCKVAAGRGFFTKDKAIEVKEQTYPSKYPYKNIYYAQNDGNYLCLLYEGVKKGKVVRQFKFINYFETISLGIKNTNSLYSEPYFQKIEDRKTELKLSAVIKTGTHILMWKDSPDELESLTNEQLSRRLFVVYKFNLKGANCIYLENHLEARNEIPQKEDYTIFDTTKYQARLTLVANGFNCLIENRDFKINAIGNIEWL

SEQ ID NO: 4147 - protein, 1472 aa, unidentified
  REGION 1..1472: note = Description of Unknown: Cas Enzyme sequence
MENILGIDLGTNSIGLSLRNANVCGSIQEQLEFFTSIIFPSGVGKGKSGEFSYAAERTKHRSSRRLYQARRYRIWETLRLLIEKDYCPLSLEDLENWSKYDKTKGLKRQYPIHATHFEQWIRLDFDGDGKPDYANPFELRAELMEKQFDFTNQINRYKLGRALYHIAQHRGFKSSKGETIKEQEQNEKENIQEFDLAEALKKSEEKKSGKLSEYMQKHNLPTVGCAYAHLRKNGIRVRNSVYQAVRSQYKDEIKRIFEYQNGLDKNSDFYKKLMSEKKGEGTIFYKRPLRSQKGQVGYCTLEPNKPRCPISHPDFEKFRAWCLINNIRYGEDLKETLSLEQKRDLFHELFLQTRSSFKFEKIRRWIEKETFMHLDYKAKTINYKDNTNVSGCPISGRLKNLLGEGWQHWKYNPEITKVIKQNKDGNYTERQVEIEYSAYDLWHICYSFDEKENVETFANEKLHFDEKQTEQLVRIFFSIQQGYSMLSLKAIKNINRFLEEGLIYPDAVLLAKLPDIFKSQWANEKDVIVAEIDTIIRNNREQKQLYNIANTLIANYKSLGYDDEKQFDERFADHNTEYKLQPSDYNDIRTVTIKAIGEKTWTKKGEEKQKDILEHVAILYQNFFASIQRDYYKLPKVSDDLARFLYEKYNYLSEKDLKKIYHPSMIEFYTPAKEQQLDDGRWMKLLGSPVIGAFKNPMAMRVLHTLKKQINALLKASLINGEDTRIVVETARELNDANMRWAIEAYQREREAENKEFEKILNEYFPNRDINDKDIEQARLMCEQHDIPEGDIFQHKEEINKEKALQSPIYKKELTKYRLWLEQGCRCIYTGKMINITNLFDENAYDFEHTIPRSLSFDDSLENLTICDAHFNRTVKQNQLPTQLPNYNKDANGYTAILPRLQPWIDKVERLKDNVEFWKTQSKRAQDKDRKNQCIRQQHLWKMELDYWKAKVDRFTMTEVTSGFRHNQLNDTRLITKYAYHYLKTVFNKVDVQKGKITSNFRKILGVQSTDKKKNRDKHSHHAIDATILTMIPPAAQRDKMLELFYKIQEEEKLHRDTTVLKKELSKEIKKCNLPINVSLIAPFIENNILIKHVSKDQTLTPAHKRKRIRGKIVPLRDADGKIIYETNADGTVKKNKYGHPVPRAKQWITGDSIRGQLHKDSFFGAIKYPIIDKEGKPTRKNGSYVYEKDSKGSDIISLVMRVPITSFTKEDELKKIVDPTIRESIAKTIAKRKEDGKSFKAAIEEPIWLLGKDGNEIKIDKNGLPISPIRHVRCKVAAGRGFFTKDKAIEVKEQTYPSKYPYKNIYYAQNDGNYLCLLYEGIKKGKVVRQFKFINYFEIVELGIKKTNDIYNEPYFQKIEDGKTELKLSAIIKTGSHVLMWKESPDELESLTKELLNRRLFIVYKFNNSGSDYVFIQNQIEARQDNELGDGDTIYNSNTYQSRLKLNANKFNCLIENRDFIIDNLGNIEWL

SEQ ID NO: 4148 - protein, 1433 aa, unidentified
  REGION 1..1433: note = Description of Unknown: Cas Enzyme sequence
MKKILGLDLGTTSIGFAHVIEDKTPEHSSIERVGVRVNPLTTDEQTNFEKGKPVSVNADRTLKRGARRNLDRYQDRRTNLIDALLKADIITRDTILAENGKNTTHSTFELRAKAVTEKIENEELARVLLAINKKRGYKSSRKAKNEDEGQAIDGMAIAKRLYEESLTPGQLSYQLLKEGKKNLPDFYRSDLQTEFDKVWNFQKQFNPEIFTDELYKALQGKGQRATSAIFWNSYKFNTAENKGSREEKKLQAYKWRSEAVSVQLKKDEAAYVITEINNNLNSSSGYLGAISDRSKELYFNHQTVGQYLYAQLQQNPHTPTKNQVFYRQDYLDEFEAIWNEQAKHHSELTDELKTEIRDIIIFYQRKLKSQKGLISFCEFESTDIEIEKNGQVLKKKIGLKVAPKSSPLFQEFKIWQVLNNVLIRKKGSKKRVVKETNQTSSFNNEKEIFVFDLDAKQTLFDELNIKGNLSANKIIELLGYKPTEWEINYSHLEGNRTNKALYDAYLKILELEGYNEDLLKLQGKDNIDVSELKSPVSEIKEMVKQIFKILSINTEILEFNAELDGKSFENQASYQLWHLLYSYEGDNSPSGNETLYRLLGEKFGFKKEHAQILTNVALSDDYGNLSSKAMRKIYPFIKEQTYDKAAAMAGYNHSAASLTKEEIETRPLKNKLELLKKNSLRNPVVEKILNQMVNVVNTLIETENRKLKAQGLPENFHFDEIRIELARELKKNAKERAEMTTNINASKIAHEKIFRLLHTEFGIKNPTRNDIIRFRLYEELKNNGYKDLYTNKYIPRELLFSKQVDVEHIIPQAKMFDDSFSNKTIIYKDENIKKGKKGNKTGYDYIESEYGEKALEEYKARIEVLYQSWLKNKEEGISKAKYQKLLKQETEIGDGFIERDLRDSQYIAKKARNMLYEICRVVTPTTGSVTARLREDWGLINIMQELNFNKFKTLGLTEMVEKKDGTFKERIVDWSKRNDHRHHAMDALTIAFTKQSYIQYLNYLNARRDEKHKLHDNIIGIETKETEIRIDDEGNKKRVFRLPITNFRIQAKEHLENVLVSYKAKNKVVTKNKNKTQSKNGEKVKVALTPRGQLHKETVYGKYQYYVNKNEKIGTRFDKETIDKVSNQLYKRLLLKRLSENGNDPKKAFAGKNVLSKNPIYLNNEKTEILPEIVKLTWLKNDFSIRKDVTPDNFKDKKTIEKVLDEGIKRILLNRLEKYGNDSQKAFSDLNKNPIWLNEAKGISIKRVTISGINNAEPLHYKKDHLGNYILDEKGKKIPVDFVSTGNNHHVAIYKDENGNLQERVVSLFDAIQLVNAGLPVIDKEFNAGIGWEFQFTMKQNEYFVFPNEKTGFNPKDIDLLDWNNYKLISPNLFRVQKLATKDYFFRHHLETNVEDKPELKGITWKREGLSKLLNIIKVRINHIGEIVKVGEY

SEQ ID NO: 4149 - protein, 1749 aa, unidentified
  REGION 1..1749: note = Description of Unknown: Cas Enzyme sequence
MKKILGLDLGTNSIGWALVEIDHENRTVRILGLGSRILSMDAGEIAKFESGSILESSASKKTTMKTTRKLNERFLLRRDRLHCILNLLQSLPEHYKVTIDFETEKGYRSGKFKRGLEEKLAYIIDENGKSNFLFMDSYNEMLNDFKDVNPNLFYKKKNGKETKIPYDWTLYYLRKKALTKEITKEELAWITLSFNQKRGYEKTVGQDEKKQKEGELSETIIGIVGSVNELGEKNGLKLFEITLCDENGNDFFRYKEESKIRITDVADLKELEILSKYDDEGNILDKNNTYIIKEIRHLKVDNVISTGRKVKENFIYEIVLETGWIKEQQNKYQPKWINTERDFIIKTNYDVNGNRILKGTDKGRNINAPSVDDWTLQKLKTETTLSSFNSKNKTVGVASYIYNELLKNPSQKIKGDLITVIERKYYREELEKIFDFQIKSGKHPELEDTKLYIKAINLLYPNNENHRKNIDNIGFASLITNDIILYQRDLKSKKSLITNCVYEKENFKKIDIKTGKEYQEPLKAIHKANPLYQEFRIWQFIKRLRIVQHESKNNDEVVMNLDVTKAILTNPVKEKLFEFLNDREHITQSVLLKHLKLSEKYYKWNYETEHKEPCNETRYNFILRLKRVKGLNWKDFLTSENEYLIWHFFYSVKKQDEFKKGINSLFEKLLKKCDLSLDYKNDLVKNFITFGGYNNDYGTYSEKALKKLLPFLRIGKYWNLEAVEKILANATFVAKEKVFVKEEINGEITDFQGLWISSACYLVYNRYSEVGDIQYWKTPYDIENYLRNEFKQHSLNNPVVERVLIETLQLVKDVWKYFGEQVGVDENGKIIYKELFDRIHIELGREMKKNAKERDKENKQNKENQKANERIIELLKELAKENNEVKTKSPFQQEKLRIIENDLLSSIEYDKDTTTYNLINGLGSITKKEIKDITSKDITKISKQDIERYKLWLDQRYQSPYTGKIIKLSDLFNREKYEIEHIFPQERITLNALYNKVICESEVNKDKKAHTGYQYILNSDGKKKVKCAAHDFNEIIILSPDEYVKRVKINFTDKRKQEILLSKEIPDEFTNSQLNNARYISKMAMKLLSNIVREEGEDSFRSKNVLPITGAITTKLKKDWQLNDTWNELIQPRFKRLNEITNSNLFGHYEKINGHDVFINQVPEELNKDFEKKRIDHRHHALDALVIALATENQVNYLNNISSQDNKTDKLDARIKLKNIITATKNNDNGDKYRYLLPPAQYKQKGEIIEYSYCYKKTNSRIFKQIALEALVNTVVSFKQKNRIIRQRTNKIQALDIETGNLKFVSEENLSDSNNYNVRQSLHKATFYGKVKLKQEVKKIKLSDAIDISNEIVDFDLRTYVLDLQQNKKIENSEILQMLESKYPNVEVYDSFVATRYENNLESLATIEGEKIISTIESITDVSIQKILLKHLYKYNSIKVNVINISKYIDNIVDEELQRLTKEILQNDTLSDRITIGDKTINEINVFTTGLVFDKKEKIYMNPQLAFTFEGIVDLNENIKILNNGKEHKPIFKVRMYTPLGTKFPVSENNLKNSKYVITAADSNSFCGFYEKSNCVGDRKFIVPTLKETIENLKRGDVPCKDIFIDEKSNEEYKLIFILTPNDLVYLPTEDEMINSFKLDSEKLNNIDKTRIYKFVDGNSAGVMNFTPYYVSKPLIDLSKKEYKEIEIKSLTFEEITEAKKEIKTKVKELVNEIGLGSTQSKNQNSLDGIQIKQYCVKLKVNRLGNISI

SEQ ID NO: 4150 - protein, 1030 aa, unidentified
  REGION 1..1030: note = Description of Unknown: Cas Enzyme sequence
LPVKKQDEFKKGINSLFEKLLNKSELSVDYKDDLVKNFITFGGYNNDYGTYSEKALKKLLPFLRIGKYWNQETVEKILAKSTFEAKEKVFTKEEINGEITDFQGLWISSACYLVYNRYSEVGDIQYWKTPYDIENYLRNEFKQHSLNNPVVERVLVETLQLVKDIWKYFGEQDGIDENGKIIYKELFNRIHIELGREMKKNAKEREKENKQNKENQKSNERIIELLKELAKENNEVKTKSPFQQEKLRIIENDLLSSIEYDKDATSYNLINGLGSITKKEIKDIVNKDIAKISKQDIERYKLWLDQRYQSPYTGRIIKLSDLFNREKYEIEHIFPQERITLNALYNKVICETEVNKDKKALTGYQYILNSEGKRRIKCAAHEFNEITILPPDEYEKRVKINFTDKRKQEILLSKEIPDEFTNSQLNNARYISKMAMKLLSNIVREEGEDSFRSKNVLPITGVITTKLKKDWQLNDSWNELIQHRFKRLNEITNSNLFGHYEKINGHDVFINQVPEELNKSFEKKRIDHRHHAMDALVIALATENQVNYLNNISSQDNKTDKFEARIKLKNIITETKKNENGDKFRYLLPPAQYKQNGEVIVYSYCYKETNSRVFKQIALEALANTVVSFKQKNRIIRQRTNKIQVPDMETGNLKFISQVNLNNKDNYNVRRPLHLSTYYGKVKLNQYTKQIPLKEALTQVENIKDSLLRELIFDLREKGNMDIQTINLLEIKYPNVGIYENYVASRFNNDLNSFALIDSKKIISYIESITDISILNIIKNHIEKYKIINENTEVIYQPELAFSPDGIIELNANIIDLNNGKFHKPIYKVRMSTPLGNKFSVSEDGPKSKKIVVTAPGSNAYCGVYENINNSNERRFVVPTLRESILNLKQGNPPCDEIIFDEKTTEKFKLLFVLSPNDLVYVPTKEESENLSSAKIQIAKEQVNRIYKFRDASINEKGGIQVNFTPSNWANMIYKKEPNSEKIFLENGKELQGEITITSDKDKSQNSLDNLQIRATCIKLKIDRLGNISI

SEQ ID NO: 4151 - protein, 1434 aa, unidentified
  REGION 1..1434: note = Description of Unknown: Cas Enzyme sequence
MEKSVGVDLGTNSIGLSLRDEDYSKSIIEQIEYINSIIFQSGVGKEKSGEFSFAAKRTEKRSARRLYQSRKYRIWATLKLLIENDCCPLSLADLEKWSKYDKEKGLKRQYPINATDFEQWVRLDFNGDGTADYSSPFQLRAELMNQQFNFSNQTDRYKLGRALYHIAQRRGFKSSKGETLKEQEKNEIDYNSEIDISKELQKSEAKKSGKLKEYMEKYNLPTVGCAFAHLENNGIRVRNSDYQAVRSQYKDEIKQIFEFQNGLDTNSDFYKHLVSEKKGEGTIFYKRPLRSQKGLVGFCTMEPDKSRCPISNPEFEKFRAFCLINNIRFGEELKESLSLEQKQQLYREKFLLTRTSFKFSEIKEWIQKKIGRKLEYSKTTKTINYKDNTSVSGCPISGRLKNLLGENWETWKYESTEEKANKKTGEIRHITYTTNDLWHVCFSFDEPEYIEEFAKNKLHFDDDKTKQLVRIYGSIQQGYGMLSLKAIRNINRFLEKGLMYTDAVLLAKLPDIFKEKWNDVEANIISSIDNIISENRKQKQLYFIVNSLIANYKSLDVTDQFAYKNYYYKLVASDIKDIKTTTINVIGAKTWENKTINEQNELLNNVADLYQKFFSSEERDYYKLPKVSDALAEFIGNEYQFISASELKKIYHPSMIEFYAPAKLEKVDGDRYIKLLGSPVIGALKNPMALRVLHILRKQINDMLKASMIDENTRIVVETARELNDANMRKAIEAYQREREAENKEYEKIIKEFYSGRDIKDSDLDQVRLLCEQHDISENITATKQKENIKVPTYKKDITKYRLWAEQGCRCIYTGKIINITNLFDDNAYDIEHTIPRSISFDDSLANLTVCDAHYNRTIKKNQIPAQLPNYEEIKLRIQPWVEKVEKLKENVEYWKAQSKRAQTKERKDHCIQQRHLWQMELDYWQNKVDRFTMTEVTSGFRNNQLNDTRIITKYAYHYLKTVFNKVEVQKGSATSNFRKMLGIQSLDEKKSRDKHSHHAIDATVLTLIPTAAQREKMLELFFKIQEKKHLNENTETLERELEAEKRRCGLSGNISKIVPFIEENILVNHVNKDQKLSSAHRRKRIRGKIVPLKDSEGNVIYELNDDGTIKKDKHGHPIPQAKEWITGDCIRGQLHGETFYGAITQGLKDENGKLIRNDDGSIKTSEEILYVVRRELKHKANDNDSGFKNWEELEKAIVDKDLFKIIKNQFKENTSLKEACASGIYMYKKNKNGEIDFSEECKVNKIRHIRCLTSIKKPLEIKEQTYMSTKPYKRKYYAEMGDLYVMCKYESNDKKEKEYHIFSLFDVSVNRKTGIEDIPTCIESKKRTKLILTQQLKRGDMLLIYKNTIEELKESDNTDMSQHLYVIRGFENDGNRIILQKSINALPDKDLGKGESIKDYSNMPEKIRCGINTLKYLIKDKDFYLTPKGIIFK

SEQ ID NO: 4152 - protein, 1528 aa, unidentified
  REGION 1..1528: note = Description of Unknown: Cas Enzyme sequence
MKKILGLDLGTNSIGWAVIAENEEKKEILGIGSRIIPMSQDVLGKFDSGISKSQTAERTSFRGVRRLRERYLLRRERLHRVLNLLGFLPVHFTQSIDFEKRLGKFQPGTEPKLAWKEVEQNQFEFIFKTSFNEMVKEFRLNCPGLFGIKGNGEERKIPYDWTIYYLRKKALQAKIEKEELAWLLLNFNQKRGYYQLRGEEEEENLNKTVEFHKLKVVEVTAEEPQKGKTDIWYNVILENGWIYRRSSKIPLFDWKEKSKEFIVTTDLNDDKTIKKDKDGNEKRSFRAPSDDDWTLLKKKTESDIEKSHKTVGCYIYDTLLKNPAQKLIGKLVRTIERKFYKQELIAILEKQKEFHPELTDTEFYQACLKELYENNEALRNSKAGGDFTYLFLSDLIFYQRPLKSKKSLISNCKYEFRTFKDVKTGECKKDPIKGIAKSHPLYQELRLWKFVKDLRILEREKMVDGKLKMDVDVTFEFLKSENDFVNIFDWMNDKKEVKQDSFLASYFKFKKKKGDDKLAYRWNYVEDKEYPGNETRATILNRLSKVNNVPENFLDKEKELALWHILYSVEDKLEIEKAMKSFAIKHHLDTSFAEIFKKFPPFKKEYGAYSEKAIKKLLPLIRMGKYWSKDNIDENTKKRIEKIITGEYDENIRNRVREKAINLTEVVDFKGLPEWLACYIVYDRHSEASELTKWKTPEDLAWFLHPQNPEGFKQHSLRNPIVEQVITETLRTVKDIWKQHGDFTEIHLELGREMKNPADKRKTMTAQITENENTNQRIKYLLAELANHNDVENVRPYSPSQQELLKIFEDGVLNSGIEIPEEIAKIVKTSQPTQSDLIRYKLWIEQQYRSPYTGEVIPLGKLFTSDYQIEHIIPQSRYFDDSLSNKVICEAEVNKEKDNALGYEFIKNNEGRIVDLNFGKKAKIFTIAQYEDFVKQHYSKSRGKMKKLLMEEIPEAFLERQLNDSRYISKVVKSLLSRIVREDGEQEATSKNVISCTGGVTAILKQDWGLNDVWNRIVTPRFERMNELTGTTQFGKWTNKEGKRVFQTDMPLELQKGFTKKRIDHRHHALDALIIACATRSHINYLNNEHARHKDDETRFDLRNKLRRIEEIEVDRMENGQKIRRKIKVAKEFIKPWDTFTQDAQTALEAIVVSFKQNLRVINKTVNKYQGFEDGQKVIKKQTKGDSWAIRKPMHKDTVAGIVNLRFKKTATLSAAIDQWEMLVDKNLKTKIKQLINEGFDKKKILKFFAEQENKWMGKAISKVDLYYFSNENEVLVASRVKLDDSFNAKKIESITDTGIQQILLKHLSKFNEEKAGKTIEHPELAFSPEGIDELNKNIVQLNNGKFHQPILKVRTYEPKGNKFNVGTTGNKNKKFVEAAKGTNLFFAIYQNSEGKRSYESIPMNIVIERQKQGLSPVPDTNEKGETLLFHLSPNDLVFIPSEEVKNHFQNDNSKNSYNFNGYSIYKMVSSSGTQCFFVRHEIASTIWNKVEFSALNKTEKSIDGIMIKDVCWKLEVDRLGNIIKIIK

SEQ ID NO: 4153 - protein, 1566 aa, unidentified
  REGION 1..1566: note = Description of Unknown: Cas Enzyme sequence
MKKILGLDLGTNSIGWALIAENEEKKEILGLGSRIIPMSQDILGKFDSGISKSQTAERTQFRGVRRLRERHLLRRERLNRVLHLMGFLPAHYDQNLDFEKRFGKFMPDTEPKLAWREVKQNQFEFIFKSSFNEMVQEFKKNKLELFGLKGSGEERKIPYDWTIYYLRKKALHAKIEKEELAWILLNFNQKRGYYQLRGEEEDENNIKREEVYTLKITDITEGETDRKNKDKRWFNIILENGWIYHSTFLTKPDWIGKTKEFIVTTELDENDKIKKDKEGVEKRKLSILPTFEEIDKLSQADKNKLYKKIKLKTEIEIDKSNKTVGCYIYDILLQNPAQKLNGKLVRTIERKFYKNELTAILDKQKEFHAELNNAGLYKACLEELYKNNKAHRNSKVSGGFTYLFLNDIIFYQRPLKSKKSLISNCKYEFRTFKDAKTGENKKDPIKGIAKSHPLYQEFRLRQFLQNLTIYQREKVIDGRLHTDIDVTSDFLKMEDNWIALFDFLNNRKEIDQKAFLKYPAFNLKKNAELYRWNYVEDKTYPANETRSQILSKLKASNIAPEFLTANIEEQLWHILYSVEDKMEIEKALATFALKHGLNTEFVDNFKKFIPFKKEYGAYSAKAIKKLLPLMRRGKYWSGEAISEETKNRIYAIVERLKTIHYDENMIDTVADDDIQKQVLKSFINCPDPLSSLNTYQACYAVYGRHSEAGELTKWKTPEDLGWFLHPQNPEGFKQHSLRNPIVEQVITETLRTVKDIWKQHGDFTEIHLELGREMKNPADKRKTMTAQITENENTNLRIKYLLAELANHSDVENVRPYSPSQQELLKIFEDGVLNSGIEIPEDISKIVKTSQPSQSDLIRYKLWLEQKYRSPYTGEIIPLGRLFTSDYQIEHIIPQSRYFDDSLSNKVICEAEVNKEKDNALGYEFIKNNEGRIIELNFGKKVKIFTIAQYEDFVKQHYSKSRGKMKKLLMEDIPEAFLERQLNDSRYISKVVKSLLSRIVRQEGEQEATSKNVISCTGGVTATLKQDWGLNDVWNRIVTHRFERMNELTNSNQFGQWTNKEGKRVFQTDMPLELQRGFTKKRIDHRHHAMDALVIACATRSHINYLNNEHARMKDDKIRIDLRNKLRRIEETEVDRIENGQKIRKKIKVAKEFIKPWASFTQDAQTALEGIVVSFKQNLRVINKTVNKYQCFEDGQKVVKKQTKGDSWAIRKPLHKDTVSGVVNLRLKKTATLSAAIDQWETLVDKNLKTKIKQLINEGFDKKKIIKFFANQENKWMGKEISKVELYYFSNENEVLVASRVNLDDSFNAKKIESITDTGIQQILLKHLANYGEEKAGKSIEHPELAFSPEGIDEMNKNIAQLNNGKFHQPILKVRTYGPKGKKFNVGLIGNKKDKYVVAADGTNLYFAIYANENRRIFETVPLNLVIERLKQGESPVNSFFNDVNGQAYTLLFYLCPNDLVYLPTAEQLMNSHSINKEEFVNNRIYRFIDSSDTTANFIPVTSASTIFNLNKKNQDKIGLNYPIQNEYGVGSPQSKNQKSIDGFMIKDVCWKLQVDRLGNILKIIK

SEQ ID NO: 4154 - protein, 1427 aa, unidentified
  REGION 1..1427: note = Description of Unknown: Cas Enzyme sequence
MKKILGLDLGTNSIGWALVETDENGKPCKIEGMGSRIIPMGTDKQDYEKGVGITKNATRREKRTARKGNKRYKLRRNKLLFILNELGMLPEQFQFKKGIPEATKLQDLELSPISKKTKQLDALGLLQLKVKALEEPVELKNLGKILYQFNQLRGYSGGNNNDDNNEKKKDDDEDAEKKKYEVVVQKVEILKVKQSEYTFTVRGGKNKGEKQYYFDITINFDGEEVEGQTELQNLKEKEGQEEELEIRISRKKDDNVSYKFALPQKSNWRKAMELSEKTLKEENLFISQLRLRDLRQNKWTKIRNRVFLRNRYKEEFDKIWETQEKQYPFLKDCPKETLENIVYYIFPGNSDSQQQLRKIALEKGLKYIIKEQVIYYQRPLKPQTELIGTCRFEKEEKVIPISHPFFQEFRCWKQINNLFITSKTLIGNKYKYQNRYLTSEEKHAIYEKLQTQKEVGFGAIIEILNQDKNKRKLDKEQKDYFLNGLNVKAKLKGCDTLLSIKKELGDYFGDFIEKDKELVVKIWAVIFNIKNHDGSEYDIESKRVSSIIEVLRNYTDEETAKELSLKLAQKIKFPRKYASLSEKAIQNIIPLMRPNPQIIPNTVRQHLENIQRLIETGEIFNDGNSDLEDYVIDFVKNNTNILQEGGIMESFAISLIYGKHTAESIKAQIKNYHDIKYKERNLRNPVVEQISNETMQIIKAIWKQYKFNPEELEIRVELARDLKNSAVEREKIWNGQRRNKAINDKAKDRLREEGIAITDENVLKYRLYEQQKYMSPYTKKKIIPFSKLFDDKEYDIDHIIPKSRYYDDSFSNKVICEKYINDEKSNRTAWEYISQQNSKYKNENGELQIISANDFLNHVNENFYGKKKKNLLAEKIPSNPVERQLKDSQYISVAVKNELAKIVGSENVKSSTGEVTDFLRSRWGLRKLFMELTESRFKQMELWDLDENGNPKTKWVIRDVIDDGEKKKNLYEIKNWSKRYDHRHHSIDALVVALTTQSHIQRLNNLNKYYQDELTARKDEFRIETKEGENILESFFNLEEKRRDEILRKINGSRHFDVPFDNLVDQVKNLLETMIVSHKPKDKLGIKTDENTGKKQLKIRGALHQETYYGKLNGRDTKRVELSSLSITKNKTTKQKEIIELIDKVLEKEIIEHKKQYDSMKEAFTGEGLKAFNDNRIAKGKQPVYKVKVWYNKEEKKENGLQRLYDSNDKQSVITGDNYLFLVMEKNGKRIFDVASLYDSVAIATDALKDNDNDFKIKIAEDYRIKHKDKPEKVLFVLQQNDLVYLPTDKDDEIFRKSKADFAEWISKSENKKTFSKRVYKVVKFTGKDCFFISHNFANPISVAKNLSKEEQDKLKEKYGERKIPKQEKNYEEFGSFGNCAKTEVCSDFVQELILKKDFDGKPPMKIQDSCIKLKIDWLGNITIENN

SEQ ID NO: 4155 - protein, 1522 aa, unidentified
  REGION 1..1522: note = Description of Unknown: Cas Enzyme sequence
MKTLGIDLGTNSIGLTVREPDNSVKIEEQLEYYCSTIFKTGAGKDDKGFTTKSYAAERTRKRSVRHLYQSRKFRIWETLKVLIENDNYKFCPLSKIDLEKWSKYDKTKGLKRQYPIHAVAFEQWVRLDFNGDGVADYSSPYQLRAELINNQFDFANENDRFKLGRALYHIAQRRGFKSSKGETIKEQEEAFDEDFTENEIDLAFELKKSEEKKAKELSKLIIDNNCKTVGEAFALLENKGERIRASVYEAVRSQYLHEIIEIFKFQNGLDLNNDFYKKAHKAIFFVNPLKSQKGLVGKCTLEPSKSRCPVSHPDFEEFRAWSFINTIQYRKTSQDDWSNLTLEEKKELFTEKFMRMASSFKFEEITHWIEKKKGYKLSQKGKTINYKEKTSVSGCPISARLNDLLGEDWKTISIKTKNERINQKTEEVHTVAYNYEDFWHICLSYDDSEKVQEFAKSKLQYDPLNAGKFVRTWGAVQQGYSMLSLKAIRNINIFLKQGLIYTDAVLLAKLPEILGADNWQMQQQNITNAIGRITESNRREKRLYNIVNSLISRWKSLEYNEELHYDEKFAKYDFDYLLKDSDLKDIDDSIIENFGKNTWANLQQNEKGAVSLFVKEKYQKFFLSKDRDYYKLPKLGEALKKYISDSIPEFHCENNFFDTTTKLPCNCEACKKLNKLYHPSQIEFYAPAKEVEIDHNGVLLSKKLLESPVIGAFKNPMAMRSLHILRKQINNLLIEGIIDEDTRIVVETAKDLNDANMRWAIETYQRERENENKEYETAIIELLKDTEFTGNANPNNLDDISKFRLWIEMSKDEMVSKLNSKGKPIATTEQSWKTFGNTTRKFMLEILKCKTDMIKKYRLWKEQNFLCIYTGKPINIFSLFSENSTDFEHTIPRSMSFDNSLANLTICDSYYNRKIKLNQIPTQLPNYDKNYSINGREYTAILPRLDHWKEKVEHLKDNVDFWKARSKRAQDKDQKDNAIRQKHLWQMELNYWKNKVERFTMEEVNSGFKNSQLVDTRIISKYAYHYLKSVFNKVEVQKGSVTSDFRKMLGIQSMDEKKDRSKHSHHAIDAAILSIIPSSAKRDKMLELFYKKEEYEKYGWNIDAIIEELEKEKRSCKIGSIKNLPKFIEENILINHVSKDQTLTPAKKAIRVRGKIVPLKKDGKIVYQTNPDGTIRYRIHKDGSIMYKRNENGEFIIENGEKVPIPIPVAMYKSGDVLRGQLHGESFYGAITQVQKDENGKFLRDNEGNLIVGEQIYYVKREELKHKKNAQDKGFANLEELEKAMVDKALFKQIQNQFEEMKKENDKFSFANACENGFYMLNKNGKKENKIRRVRCFKPNIKKPLIIKQHTYLSNKKHKQNYYAEVGDLYVMCKYVSEDETVKEFKIYSLYDLSENRKFGIEDIPKKLVSKKNKIHLVLKQILKTGISILIYDKNIENLKELSKSDIIKRLYIIRGFENDGMRVILVSNISAKPDKDLGKGESIKDFNDLPEKIRCGINTLDFLIEGKEFTITNSNTIDFRF

SEQ ID NO: 4156 - protein, 1241 aa, unidentified
  REGION 1..1241: note = Description of Unknown: Cas Enzyme sequence
MKKILGLDLGSASIGWALINEHESDNNTTCEIISLGSRIIPYEGTEGKDFAKGTGESRNSLRTQARTARKGYDRYQLRRKYLVDMLVKNNMMPSEDLKSLPKIELWQLRARAVNEAVTPQELGRLLLWLNQKRGYKSSRSDANKDKKDTDYVAEVKSRHETIKQKNLTIGQYFYNELVADNFYKVKENIFPREAYIEEFDAICLNQKSISIDVIQEIRNEIIYYQRPLRSQKGLVSVCEFEGFYTEKNGKEYFVGPKVAPKTSPLFQLVKIWENINNIKINNRKGEEIHITPEQKTALFEHLDNNEKLTPTDLLKILRLRKEDCYVNKQLAKGLTGNITKYAIKQCLGNPKEHDGLLSLNLQVVHDKGEGYLYSKKTGEILNAKPQMSIDPLAEKEPLYQLWHCIYSIADQEECSNVLQNKFNIDKNTANKLATIDFTKHAFGNKSAKVIRKILPYLMEGDTYSDAMCYAGYDHSNSLTKEQNLNRKLLNALKPIEKNSLRQPIVEKILNQMVNVVNAIIEKYGKPDEIRIELARELKQSKEERNETDKNMSKRQRENETITKELAEFGLRATRNNIIKWRLYKEIDNEDKKLNAICIYCGQPISLTEAIKGNDVDIEHIIPKSKLFDDSQSNKTLAHRHCNRNKNDQTAYDFMKSKSEQALAEYIERVNSLYANHIIGKAKRDKLLMTESKIPDNFIDRQLRESQYISKKAREILQTICRDVWTTSGTVTAELRHLWGWDDVTMNLQFPKYKAIPDMIDIKEWESDHGKNQHCKEVIKGWSKRDDHRHHAVDALTIACTKQGFIQRFNTLSSNKTREDMFKVVEESSVEYKEKLSLLEKYIVSQQPISVADVEDAVGNILISFKSGKKVAVTGTRKIGKRGDKKVVQTGIIVPRGSLSEESVYGKIKALDEKKPMKYLFENPDLIVKTHIKQLVEGRITAHEGDVKKALASLKNEPLHLDKNKTTVLEYASCFKSEFVIKYTVDINFNKVDKVIDSKIKNILNTRLSKFGGKAKEAFKDVQGANKQQIKWYVDEGLERPIKSVRCFTGLSAVVPVKKDELGNDIGFVKPGNNHHIAIYTDNDGKRQEHICTFWHAVERKKYGIPVIIHDSNEVWDKILEQPEVSFPESFLERLPQANLKIELSMQQNEMFILGMPKDEVEAAIENGEYKGISDKLYLVWSLSESDYWFKHHLETKGSDLKNAIGAKESKRYYRFQSLGAFFNLLPFKVKIDCLGTIADLK

SEQ ID NO: 4157 - protein, 1313 aa, unidentified
  REGION 1..1313: note = Description of Unknown: Cas Enzyme sequence
VIDYTSPFQLRKELAEEKFDFEKKENRYKLGRALYHIAQRRGFKSSRKGSDDIKEKENDTNEIVDLQYSEKKKNKVIVDYFVQYPDAKTIGSLFATLEDNKIRIRESVAQHAIRENYKDEIKYIFQNQNISFSTELYAKLVESGKNKNDGSIFYKRPLRSQKGLIGKCTLEPNKYRAPISHPSFEIFRSWSFLNNIKYKSISEKDTDWKGLSIELKQKIYNKLFFRKSKGYFPFSEIEEFVKKENADWILNYKSKTTVTGCPVSARLKDIFGDDFLNVRIEKEPSEKSKKNYYDIEDIWHILFSFEDQEYVTDFATDKLKLNQEQTKQFITAWNAAPVGYAMLSLNAINKINHFLVKGLIYTEAVLLANIPEVIGKDIWKEDETYLVKEIGNIINNNREQKQTINVINNLISKHKNLEAELKFGHKDNTYKLDESDIKDIETTCEETFGIKTWAEKTDTEKQNILDDIKACYQSYFTTTGLEIKYINGDKHFIVKVNGNNFYKAETGFYRSPKLKDTLSEFLETNFSLDEKQLEKIYHPSEINIYPPAKEDKNGILKLGSPKTGSFKNPMAMRALHELRKLMNYLVETKQINQETRLVVEVARELNDANKRWAIETYQKRREEENNEFAKAIEALLKNEKGVNANTENNEDIDKMRIWYEQNQNKKDDDVLPPITEDKKEIKGVSWQSVKKETYKEILSKKELIDKYRLWLEQQCMCMYTGKMIKLTDLFSTENIIDFEHTIPRSISFDNSLANLTVCFSDYNRTIKKNQIPYNLNNFHEESGGHSAIEPRLKNWKEKVERIKQQIDFWVTKSRKAADKEWKDKAIRERHLWQMELDYWKNKVDRFTMKEVTTGFKNSQKVDTQLISKYAFHYLKTYFDRVDVQKGSITAEFRKIYALQVPDQKKDRSKHSHHAKDAAVLTLIPIAVKRDVILKEYYEHKERKQSFVCEPYKGFSREFVWGIDDSILINNISNNQALTLSKKIIRKRGKIQFVKGTNKPMIATGDCIRGQLHDETFFGAIKLAKKDDDGKFIRDEEGNLLQEEKEKFVLRVPFQYKNKADAPGFKTLEEIEKVIVDRHLFNQIKKQTEKAGSLKEAFEQGIFMFNKKGEKENKIRRIRIFKSVTEPLKIKKQTYLSKHEYKQHYYAGNATNSFFAIYEGDGKIDFDFRNLFDTAKIKSFEKIFKKEDLFEKQIHIKKGNNTKTMDLKYILEPELKVVFKMKEEENLKLLSTNEIIKRMYKYTNFEKNGNSARLNFNFHLEARNSKDIIEEYTESEIDFNNPKPSLRFAYSKYQFAVENYDFEIKMDGTIEWMH

SEQ ID NO: 4158 - protein, 1211 aa, unidentified
  REGION 1..1211: note = Description of Unknown: Cas Enzyme sequence
MTKILGIDTGTNSLGWAIVEKKAEQYCLLDKGVNIFQEGVNIDKDNESSKAAERTGYRAIRVRYYRIKLRKIRLLHILTQHHLCPPLTSWELRQWRLKSIYPTDELFMQWQRTDEEKGQNPYAYRHLCLHEKLDLTQVANRYILGRVFYHFAQRRGFLSNRKDQSGEDVGVVNDGISALSEEMREAGCEYLGDYFYQLYEKGKKIRKHYTARNEHYLKEFHAICEKQQLDASLVSELEKAIFTQRPLKSQKRQVGKCVFEKNKAKCPASHPLYEEFRMLSFINHIKIKTPKEDELRPLNHEEREKILPLFFRKTKKTFNFEDIAKKLAPKKLYGFYKKAADTEMPYLFNYPMDTSVSGCPVTAALQDIFGDDWLDSICEVYTLADGKSRLEILNDIWHALFFYSDQDKLAEFAKVRLQLDDEQAQAFSNINLPSAYASLSLKAICKILPYLRRGLVYSHAVFLGNLCEVMPAYEWGIEEMRQAAIDCVIKEINSYDPKTDGRTLETCIKEYLKERYHVSDENLKKLYHPSMLEIYPRVRPGQDGIYQLGSPRTDSVRNPMAMRSLFCLRKLVNRLLKEGKIDQETEIHIEFSRELNDANKRSALKRYGRDNQKAHDTARKHIVEDYKAETGKAIEPTPTDILKYELWEEQQHICLYTGQQIRISDFVGPNPKFDIEHTLPRSRGGDSTKMNLTLCDSRFNRDVKKTHLPTELANHDEIMARIAIWQEKYEELSQQIRKQKRKSQAATTKEQKDKAISYRHYLELQRDYWRGKHERFTMESVPEGFNRRQGVDIGIISKYARLYLKSVFKRVYPVKGLATSDFRKIWGLQDIYSAKERVNHVHHCIDAIVVACIGLDEYGKLAEYYHDEEKHEWYGASKATFAKPWPTFVEDVRRMQNELLVYHHTPDNMAKQGRRRIIINGKKVLAKGDAVRGSLHKETYYGAIEREGEVKYVKRVELSQLEEKNIKYIVDDTVRQIVQEAVDRLGFTEAMASTIWMNEEKQIPIKKVRCYTPQVTQPLHIRYQRDVSDKEHKRKYHVVNDKNYLLAIYIGADKKGKEKRDFELINNLQAAKYYRTSNDRTGSGDPIVPVKSSHDYPLAYTLKIGTMVLLYENSPAELYEASQAELNRRLYKVTGLSSKNVSGYKYGEIAMKYHTEARQSKDLKSKNGVYQTGEELRPVIRMLHTQIKAAVQGVHFRINELGEIKWLARYD

SEQ ID NO: 4159 - protein, 1521 aa, unidentified
  REGION 1..1521: note = Description of Unknown: Cas Enzyme sequence
MKILGLDLGTNSIGWAVVEKSQNLILDAGVRIFPAGIEPDTIGQGESEKSRNATRREKRQIRRQYFRKRLRKIKLLELLIDQGMCPLSLEELNKWKNWDKTKKNEGRSFPNSNEFLNWIRMNPYSMRERALQEQISLHELGRIFYHFIHRRGFLSSRKSKEDSTIFTKGKPEENILSINETKENIKGTTLGAYLHSISYKEKEPFKLATNDSGNEIRVRGRYTLREMYIEEFERIWKKQAEYYNLDDCIIDSRKSRTFYGSLTNSRNQQKLKNLQQRYGIENIKIVEGNKDNQKRVITFSKIKLKEKLGGYIVSTADENGELVVEHKSKESILFWQRPLRIQKHLIANCRFENELPVITSKGDYLVNNKGDVVRRSKSPCPLSHPDFELFRAYQFINNIKYGKNVKLTEIQRQKVLDLINSQDSGFEFKKIPQELNLTYEKFNYEDDFKVVGNYTVKKLKGLFSDEVWNSKYDEIWHCFYFFEDSDKLFLKLKQDFGYSGDQEKIAKIKLKEGYSNVSLKAIRNILPFLNKGYQYDRAVILGGVRNAFGKRWDYFKEDHYQIERKIVDVLNEDNKEGEAIEKIKDMLSAPIIGFGFAKEDLRFTQLYHHSQEVEKSDNLLSALPEIENLRNPIVQQALNETRRLVNLLIEKYKEKYGSDFHFDRINVEMGRELRNSKTERQEMSIKIRENESKNDEARQRLAEFGLKPNRDNVQKYLLFKEIESRASGPVICPYTGKIVSIKNLLGSENNIQIEHIIPYSVSLDDSFANKTICESKFNGLKGEKTPYQFYCEKPDSELWGIAKFSNPDDGWDAITERAFRILPYSKAKRFTSKKPFEKMDFIERQLNDTRYIAKKAKDILSSVSKDVRVMPGQLTAELRHLWGLNNVLQPAKTIEVREIEIIENDSVPVYLTVDEFGNTISFKRKQNARPATSSDEILLSGQVKGQKFEIKKFNLNFDAADIQDGWYWAKIKVSDSLRIRPIYTDKPLADEDHIVFKGYVAKGLFNNDALGKRKVQLEDGRYWARVAITNTKFEEPVKGKEPAPNRNQILLYGNVENGIFNSYIYKCEANLPDGKYWLILSYNGEDIEFSKAEYPKPDTQQHEFVITATIDQMSNLVADVDPVYQKPTNNNPGRYYAILTIDSAPVEYYPVENKPDPVEKGQELIEGNIWVDSQTGEIKFDPKKNREDHRHHAVDAITIALTEQAYLQNLSTYNAQRKDKVRGHQYSTEKFPEPWVGFDQDVRKIVSSILISHKKSNKVLTKNRKGFSVRGQLHKEFVFGKRQAPMQEESYHIRKKITELKDHKHVGKVVDITIQDLIKKHLAFECGIDIHHPEGYSIPKDAFYKDGSWRLFLPNKNGEPVPIKKIRMKESMGNAVKLKSGLNQWVNPRNNHHVLIYKDFDGNLKEDVVQFWTVAERILQGLDIYLLPEDGKEIVTILEINDMFILGLSDDDYSSNKENFSYLSKHLYRVQKISSSYYTFRYQVASTVINEEEEVSIRSMKAWQNANPIKIEIDSLGKIKF

SEQ ID NO: 4160 - protein, 1204 aa, unidentified
  REGION 1..1204: note = Description of Unknown: Cas Enzyme sequence
MERILGIDTGTNSLGWAIVDKEDGVTQLVAKGTNIFSEGVKIEKGIESSKAAERTEHRSVRKHYWRRKIRKIRLLTILSDNHLCPPLDKSSLRQWRLKKIYPDSELFMEWQRTEDKANVNPYKFRYVCLTQKLDLTDITQRYILGRALYHLNQRRGFLSNRKETTKESEGKVKEGISGLSDEMKSAGCEYLGEYFYRLYQDGKKIRNHYTARKEHYLKEFHAICDKQELDAELVKKLEKAIFDQRPLKSQKGQVGTCTFEKGKPRCPSSHPLYEDFRMYAFINNIKVQIHTLYENTERGLSEEEKKQVISLFKRKSKHTFPFEDIAKKLAGKNNYCYYKSDEDKPYRFNYQLDTQVSGSPVNAQLEEIFGEDWLTSVCEVYTLTKDKSRFQIENDIWHTLFFYDDEDKLRVFAKNRLQLDDEQAEKFSKISMPNDYAALSLKAIRKILPYMRDYGLIYSEAVFLANLVEVLPQHIWGIKETREAAIENVIEVMHSYDRNNVDGVTLEQCVKGFLKDRYNISDDDLKRLYHPSMMELYPRQRPNDDGIYQLGSPRISSVKNPMAMHSLFRLRKVVNLLLKEGMITPETKIHIEFSRDLNDANKRKALQALQRQNEKDREECRKKIAEYLDNPTDDDILKYQLWEEQNHKCLYTGEEIRITDFLGDNPKYDIEHTIPRSAGGDSTKKNLTLCSNRYNRDVKKTKLPSQLPNHEDILDRIKGWKEKYEDLDRQIRRIKTKGVTPKEEKDKQIQHKHRLVEQSKYWHEKYKRFVMTEVPEGFSRRQGTDISVISRYARLYLKSVFKHVYIVKGIVTSEFRELWGLQNEYTKKKRDNHVHHCIDAITIACIDKAAYDKLAQYHHQQDEYKYNKGSRPDFEKPWPSFVNDVKHIQDELLIAHYSKDNMSKQAKRYVRDSKGNKVLTQGDTARASLHNDTYYGAIEVDGDVKYVVRKSLDTLEEKDIENIVDAEVRSKVKNAILLHGSLKKALEETIWMNEDKQIPIKKVRIFTGSVTRPINIRQQRDQSKHEYKRQYHVQNDRNYLMAIYVGRDKKGKEKREFELVNNITAANFYRRSNDRVPTDNQLVPLYSRNGYELRYKLKIGTLVLLYENSPEEIWELDRMNLQKRLYKITGMSSMILQGKYHFGTIELVHHQDARPSTEIKKKNGEFASNEEFRPGIKLLHTQFKALVQGVDFELNDLGEIRRLI

SEQ ID NO: 4161 - protein, 1481 aa, unidentified
  REGION 1..1481: note = Description of Unknown: Cas Enzyme sequence
MKNILGLDLGTNSIGWAVVTSNDNTNEKPQVELGSRIIPMSQDVLGKFDSGVTQSQTAERTGYRGARRIRERYLLRRERLFRVLHILGFLPRHFEESIGWDKNDNKTYGKFKDDSEPKLAWDDSDKNNNHFIFVDSFNEMLEEFKKKNPSFISSDKKIPYDWTMYYLRDKATRQPISKQELAWIILNFNQKRGYYQLRGEDEEENTKHKTEEYYELRIDRVEATNEKRGNDIWYNIYLENGWVYRRSSRIPLEDWVGKKKEFIVTTEYNEDGSIKLDKDGNEKRSFRAPKDDDWGLQKKKTEFQIDSSEQTVGSFIYNHLLANPTEKIRGKVVRTIERKYYKQELGKILAKQKDFIPELSNSALLEQCIHELYANNTAHQDSLRKKDINYLIIDDIIFYQRPLKSKKSLIADCPYEQYEYINKNTGEIKKQHIKCIAKSNPYYQEFRIWQFIQNLRLYSNDLDNTDVTKNYLKNEEDYVHLFKYLNNLKEISQETLLKDFFSIKKPKGKDSIYPVRWNYVEDKKYPCNSTRYQMLAALKDAEIPDTLIDNRNTEYRLWHLLYSVEDRNELISALCSFARDNKLPESFVDCFKKIPSYKKEYGAYSEKAVKKLLSVMRVGSLWSEDNLPNNIHNVINGTIDEKVKKRIEHKGFFLSEKQSFRGLPEWLACYVVYGRHSETSDISRWETPQDLANFIHDFKQHSLRNPIVEQCILETLRTVHDIWVRHGRIDEIHVELGRSMKSTAEQRERMSKTIIQNENTNLRIKNLLLELKNDSTIKDVRPYSPMQQDLLRIYEEGALLTLKRDDKDYNEISRISKLSAPTQSELTRYKLWLEQRYRSPYTGKTISLSKLFTPAYQIEHVIPQGRYFDDSFSNKVICEAEVNQRKSNMLGYEFIQKCGGEIIHCATLGDVKVLTAKEYKDFVSDHYDPKSSKAQKLMMDDIPETFIQRQMNDTRYISKVIKSLLSNIVREKDEIDAISKNVIPCTGGITERLKNDWGLKHVWNSIVAPRFIRMNQLTNSEAFGHWENKDGKRVFQTTMPIELEKGFSKKRIDHRHHALDALVIALASRNIISYLNNESARDTNRREDLRRLLCDKNRIIRKPWNTFTQDAYVALQNIVVSFKNYVRVINKASNYYEHYDENGRKKPIAQKGEEQWAIRKPLHKETVFGQVNLQRKREVSFAKAIEQVSCIVDKDLRNTIKSMIKAGMDESQIRKHFKAQNNIYAGKSINKVEVYYYTDSVEPMVATRKLLDDSFDEKKILSITDTGIQSILLNYLEAKGNDPKLAFSPEGIMEMNENIAKYNNGKFHQPIIRVRVSEPKGEKYNIGTTKNKAKKFVEAQSGTNLFFAIYETENGNRSYKTIPFNQVVERMKMGWTPVPEKNENGDKLKFYLSPNELVYVPTEEERMSNSININKDRIYKMVSATGNQVFYVRHNIASVIENKVELQSLNKMEKTMEGEMIKSICWKLEVDRLGNITNIIR

SEQ ID NO: 4162 - protein, 1414 aa, unidentified
  REGION 1..1414: note = Description of Unknown: Cas Enzyme sequence
MTKILAFDPGTNSLGIVCRDTMKDNLMEQITSGVDIIRDNTEQDRRGRHSSAASQRRSFRTARTRYRSVKRRKQATLKLLIKHNCCPLDIESLNKWRFDDDEKSYDRTFPVQNVAFMKWINFEFDIDGEVVRSVYRLREILATMPLDYSKPESWMMLGRAIYSIAVRRGFKSSRLAIVTDNEDDEQPELQKSEEELSAGLTQYMREYNCPTVGAAFSRMERVDKIRIRANNDYKPIRNQLKEEIRKIFEVQKLDTDGELYKCLMSEKKHEGTIFYKNPLKSQKGKVEYCTLEPRRKRCAKSHPANEFNVAWQLLNNIKIKRDNGWENISLDLSKTIYNKLFVRNQKHFDFAEIKELLQDELHIQLEYKVSINYSDKKSVPGCPVTYYLQKILGPLWETERIQGTKKHLTHAQRRKNLSLEIEGHLTEYTAEDIWHICYESDEKQFVKDFAKNVLGLPPAKVISMGALWENIQDGYANLSLCALKKINPFLARGYKYSDAVMLANLPSIMGEDFFQKNEQEIVELIDKERVAVSNENRIYDLTNKLISDYKSLKMEDLAFAEHNYDYTLQEDDIADVKKACAENYGKEWAALTGDQQSAVISQVAELYQEFFFSSKRDYYKRVNLTEAIKKVLAEKYPSLTMNKLKKLYHHSDNAYYPAAHENKDGVLQLGSPARGNLKNPTVLKVLYKIKQNVNKLLANGDIDPDTIVVVENAREALNDFNMRWAIEEYNSKRERENKAIEDALTDLAKEYHLALPKDCVAIARLALYQNENFTPYNPNESRRLYDKLYEKYKLWLKQGFFDFYTGRPITVSELFSPNNLVEVDHILPVSKSFDDSIANKVLSSSRYNSTVKGTKLPCELPNYNIDTPEGTAIIHRIHEIEEKVKYLEEKVIYWKGRSSRAADPDSKNRAIKQRHLWQMEYDEWNQRLTNLTAKEITPNFRHNQLNDTRTISKYAYHYLKSVFGRVVVQRGQTTAVFRKIFGFQDAYEKKDRSRHTHHAIDALTLSLIPYGPKRERMMELWYQIQEAHRFKDYDLERQLKDKLEREKTLCGLGRYSPNEVVQYIEDTTLVRNDATNNALTKNIKRYRVRGKVVPLRDENGNVVYEKTAKGIKRVKAKHVSQGNSIRGAIHDQSFYGKIEKWKDSGSHEKEELFVIRRKIEFKSGNVGSGFKSWDDLEKQMVDKKLFKKFKAQYPEGTPFRDACAEGFHTYLVENGVRRKVKVRHVRCIAVTAQPLKKHVFQPQHSDKEQYYYVSPGEAYGIFEYVSKEGERLYESDNLFTLSEKMKNGSLKEVPCPKTIKDKKGKEYFHSRTILRDSTILIYPSGESAEAQYHLDAATISKRLFRVNTIERDRKRLSLTRHNIVKSYTGKNGIEDSDFKDLPDGMRMPIAKLNFLLLGTDFDIINGTIIPKSDD

SEQ ID NO: 4163 - protein, 1378 aa, unidentified
  REGION 1..1378: note = Description of Unknown: Cas Enzyme sequence
MKRIIGLDLGVSSCGWAYVKEAENEDEKSEILRIGVRVNPLTVDEQSNFEKGKSITTNAERQMKHSARINLQRYKLRREHLIDYLTKAGFINEGTLLCENGNRTTFETFRLRAKAANEEISLSELARVLLMINKKRGYKSNRKANGSEEGALIDGMAVAKYLYENDITPGQYAYELKKKGKKHLPDFYQSDIMDELDKIWNFQQPFYPNILTDEFRQVLAGKSKTNSTKLFLARYSIYTAQNKEKDKVLQALKWRSDALARKLDIEQLAYVICELNGLINNASDYLGKISDRSKELFFQNLTVGQYQMKMLDENPNVSLKNMVFYRQDYLDEFERIWETQAKFHPELTRERKKEIGNMIIFYQRPLKSKKSLISICELEGKQIEVEVEGKKKTITVGSKVCPKSSPLFQEFRIWQRLNDIELTDLSTRQKYGLNQEQKELLAKELEYKPKMTKQQMLKCLSLKPKDYDMNFKEVDGNTTQAMLFEAYRKIIEMSGHGEHDFSKMSASDISTLVESVFAALGFNTSVLHFDAQAADISQDSMYQLWHLLYSYESDNSAMGNKALICRIQELFHFDSDEYAKILAGISFKPDYGSLSAKAIKKILPFMKEGNDYSTACVYAGYNHSKRSLTKEELDNKPLKDHLDILSKNSLRNPVVEKILNQMINVVNSLIDTYGKPDEIRIELARELKKSAKEREAMTDAINAANRENEEYKKILETEFHIPHVSRNDILRYKLYLELKDNGFHTLYSDTYIPREKLFSRDFDIEHIIPQASLFDDSFSNKTLESRSINIEKSNSTAYDYVKGKYGEEGAKNYKTRVEDLFKNGTISKTKMTKLLMTADDIPTDFINRDLRDSQYIAKKAREILEEIVRVVVPTTGSITDRLREDWQLVDVMKELNWDKYDQLGLTETFEDKDGNTIRRIKDWTKRNDHRHHAMDALTIAFTKPSFIQYLNNLNARSDRSQSIYGIERKELYRDKHNKLRFNPPIPLDEFRTEAKRHLQNILVSIKAKNKVVTRNVNKTKCKEGFNTKVQLTPRGQLHNETIYGSQQRYAIHEEKVGASFTAEKIATVANKKQREALLARLQAYNNDAKKAFTGKNALDKNPVWLNEAHTTSVPLKVKCLTMETIYTIRKPINKDLKLDKVVDSRIKQILQQRLDKYKGDANKAFSNLDENPIWLNQEKGIAIKRVAIFGAVSAKAIRDKRDKYGHFLLDENNQHQPSDYINTNGNHHVAFYVDKEGNIHDYIVTFFEAVIRAINGFPIIDKEYNKSIGWNFLFTMKQNEYFVFPNTKTGFNPKEYDLTNESYYHLISPNLFRVQSISKKEYGNAVVRDFIFRHHLESSVNVSIKDITYKQMKSLSFVKDIVKVRLNHIGQIVSVGEY

SEQ ID NO: 4164 - protein, 1431 aa, unidentified
  REGION 1..1431: note = Description of Unknown: Cas Enzyme sequence
MTQKIFGIDLGTNSIGTSVRNTDLGNNLVDQLEFFSSDIFNASVSKNTNGREYSLASDRSAHRRGRRLNDSRRRKLWATLDLLIKNNLCPMAPESLEQWRTYDKKKKLFRQYPIDDKAFHSWIILDFNGDGKPDYSSPYQLRRELVSVQLDFNQAIDRYKLGRALYHIAQHRGFKSSKGETIAEQEKQEDDSKKNKNNVLTEGNVDVVNAMKASEEKLSKGLLAYMQQHNLKTVGAAFAQLEDEGIRIRNNSEYKAIRSQHQDEIKEIFKFQKGLSEETQLLETLISEKQGVGTIFYKRPLRSQRGNVGKCTLEPNKPRCPIGHPLFEKFRAWTFINNIKAKSPDSDSAEPLPMDLKINIYNKLFLSRVKADFKFEEIRHFIEKQWGVALSKDDKTINYRDDTSVAGCPITARMIKILGEDWENFQVLGTKERQTQGKSNNALHQVCYTAEDIWHLCYDAEDPEQVRTFAEETLGWDEKKASELVRLWSAIPQGYAMLSQKAIRNINRMLLFGLKYSDAVLLAKLPDLLELSDEDIQTIIKKAQQLEEVVNEEKRIGNIVNSLIANYKAESLEHRFADHNYEYQLDESDEREIIKHIESNIGKQRWELMDADEQISILEGVRSGYQAFFARHKRTFVELPQLGKRLVELLSKEYPSVTEKQWERLYHPSQIAIYRPILLDKSEQNLRLGDPNIGAIKNPTVMRTLNNLRRRVNQLLDDGVLVPNETRVVVETARELNDANAKWALEKYQKTRRDENAQIKKILEEFYSKPNGITDTDVDKARYVIEQCEEDNYKSKKDIGTYSKDIQKYKYWLEQGGQCLYTGRIISLSNLFDSNAFDLEHTIPASVSFDNSDQNMTLCEAHYNRFIKKNNIPTAMPNYEKDVTIDGKLYTAIKPRLEKWKKRIKRLSKNVEYWRTRARRAQMKDDKDKYTKEKLLWQMELQYWRDKLQRFTILEVTDGFKNSQLVDTRIITRHATLYLKSVFKNVEVQRGSTTAEFRKILGLQSVDEKKDRTLHSHHAIDATVLTTIPAAAKRDRILELFYKVQEKERRLKNCSGDAPIGLKQDLEGLQEKLKKEVEACKLGNKLGQLGSFINENIIISHNVKDQTLTPSRKRLRRRGRVVYNKKRENDNDKNPIWQTGDTLRGEIHKESYYAAITQYAKDKDGNVLLNNGKPKIDPTIWYVIHRELTYFDDWKPLEKVIVDKNLYKLMKEQFPDGTSFKKACEQGFYMIKKGKDKEHNIKTHRIRHVRCHTVVRSALKIKEQTNKSAKEYKQYFYAESGDLYTICCYTNGKKKEYRPYRLYDIAQHRKSGIEDIPEFITDEKGNRLELAYKLHKGDMVLLYKNTPEELYDMDPVNLKQRLYKVYGFESYRSRFYLINHLVAEGELEYSIKDYNQIPRNVRCGMKSTKFLIMGEHNDFVIKGNNIIFNHR

SEQ ID NO: 4165 - protein, 1442 aa, unidentified
  REGION 1..1442: note = Description of Unknown: Cas Enzyme sequence
MKKILGLDLGTNSIGWALVQVDENGNPFEIEGMGSRIIPMGRDIIDYEKGTTITKNADRRVKRSARRMGKRYKIRRNKLLYILAKLNMLPEQIQFKTDFPEAIKIQDLELLPIRKGSMQLDSLAHYELREKALHERIELKELGRILYQYNKLRGYSGGGEDDDAKNEKSDDEENKKYEVRIQKFTIKDVVKSDLTFTAKSGKDKGSKLPIYNVIVLDEDTEIEGTTKLQNLHEKVGSDVDLEIRIKRNKKGESISFALPQKTNWRKQMEETELLLKEKNYFPCQLFAEDLRKNKWTRIRNRVILRQQYKDEFDAVWGEQSKYYPILNNCPADTLNEIVHYLFPGPSESQKQLRDTGLKNGLKYIIKEQIIYYQRPLKSQEDLIGECQFEKGEKVIPVSHPIYQEFRCWDQINRLFIRSKQQVWDEKKKKSVLRYQNRYLTDEQKLSIYSRLQNQKQLGFSEVAKIVNLANDKSEYLNGLHAKVKLVGCDTQIALKKILNGVCELSESLIEKLWEAIFYNMHEGSEYDESSKRVQSIIDVLPKEIDTKVRTALALEFAQKIKYTRKYGSLSKKAIENILPIMRPNPLNIPEKVKKNFEDIKWLIETGEILDSSSVQEYVVDFVKDNPNALEHGGIMYAFASSLVYGRHTKESIKPQINDYHDILYIKRNLRNPIVEQLANETMQVIKSLWKQYHLNSNELEIRVELARDLKNSTKEREKIFKGQTDNQRVNDYIKKKLIELKQEVNDRNIELYKIWSKQEYAYDENGMPLSRPKYKDAGSPTAEEIVKMRLWEEQHYISPYTLTPIPLSKLFSPERLYDIDHIIPKSRFFDDSLSNKVICESYINEEKDNRTAWEYITQQNSKYNILRPEEYLDHINKVFYGQKKKNLLAEKIPSNPVSRQLKDTQYISVAVKDELAKIVGSDHVKTTTGGVTDYLRSLWGLKKLFMELTERRFKQMELWDSKEEGSHEEPWIKKYFDETTQKNVYEIKGWSKRYDHRHHAVDALVVALSNDKIIKRLNDLNKYFQDELEKHKEAIPTDGDDSIEEAFFKLSKEKRDKIMQEIESSRKFKAPFENLVVDAKRFLESMIVSHKPKDKLAIKEDSNGNKQIKIRAALHQETYYGKTNGRDTKSIAISALKAKDIPQIIDIVLRQEIDTHRKKYDTMKEAFTGEGLIAFNESRFQTKNKSALKPPVYKVKLWYSNKDKETGNLLPLYGEKEKKTVLTGDNYMFVVMEGCGHRIFDIASLYDSVALAKDYLKLGESNIESIKQNICNDIRIGNKNKDKAEKVLFYLQQNDLVYMPEEDDEILSYNVTELKEWLAESNNKIDFAKRLYKVVKFTGKDCYFIPNNFAKEICMPKNLTDEERTSLKNQYKDKTIPKKELNYIEFGTYSNCSPLEMNEFFTQLMKEGKKYRGQKPRKIQDYCIKIKTDWLGNIIEFNGMKI

SEQ ID NO: 4166 - protein, 1487 aa, unidentified
  REGION 1..1487: note = Description of Unknown: Cas Enzyme sequence
MKNVLGLDLGSNSVGWALVKTEDNGNPIGSIKMGSRIIPMSQDILGSFEKGDTVSQTAQRTLYRGKRRLTERHVLRRERLCRVLHIMNFLPDHFDKLLGWDKTDNKTYGKFIDDSEPKLAWRQNKNEKGKMEFVFMDSFHEMLSDFAKHQPQLIANGKKVPLDWTIYYLRKKALTQLISKEELAWILLNFNKKRGYYQLRGEEEEEQPTKKEEYKVLKVISVDADEGQKGNGIWYNIHLEDGGIYKRKSDTPLYDWVGKTLQLIVVTIYEKDGKTPKIFDSGKQNPSYRLPKEDDWGLIKKRTESQIQSSGKTVGAFIYDNILSKPADKIRGNLVRTIERKYYKKELIEILQQQAKYHDELHNQHLLESCAKELYAHNDVRYNEVVKSNMIHLLVDDIIFYQRPLKSKKSLIDNCKYESYEYVDKETGEVKEMPIKCIAKSNPYYQEFRLWQFIHNLRLSDVVTREDVTAQYLSTPQDYCNLFTYLNDRKEIKQDILLKDFFQIKKVQIDKEKVFPIEWNYIKDATKQYPCNETRYELLSALKRAGMDKQWLDDTPNMQYRLWHLLYSVEEKEESAKALRKLYDDDNFVSSFLKIKPFKKCYGAYSEKAIKRLLTLMRMGKAWDEQAIDAKTLKCIQQIITGNIDSKLKEKIDDSRYVLHHVSDFQGLPTYLASYVIYGRHSEVTDIRCWDTPKDLLKFIYSFPQHSLRNPIVEQVILETLRVVYDIWKAEKHIDEIHVEVAREMKLTAQQRNEANLRNLNNEATNLRIKYLLEELKNDTFIKDVRPLSPMHQEKMRIYEQAVLGNLNKQDKDYDDIIKISKKERPTSAELIRYKLWLEQKYCSPYTGKAISLSKLFTTAYQIEHVIPQSRYFDNSFNNKVICESEVNKEKDKMLGYEFIKGRGGDRIYCTAHGKEVTILKEEEYKQFVNEHYAHNKRKRDNLLAENIPESFSSRQLNDTRYITKTIMSLLSNVVRQQGEEEATAKNLLPSSGAVTDKLKTDWGLKDVWNTIVTPRFERLNKLSGTNDFGEMKEENGSRYFQTNVPSEYEKGFKKKRIDHRHHAMDALVIACTTRNMVNYISNVNANSPKQREDLRQLLCDKNRIINKPWDTFTQDALKALNDIVVSFKNNVRIINRATNRYQRYDKNGKKMICSQKGNDMWAIRKSMHKETVFGRVNLIRKEALPIAKALDNISAICNAQLRAYVNDLVDKHFNKKQLVAHFKSLNYKWNRQDVSKVEVWISSDNKAPMVAVRKPLDTSFDKKKIASITDTGIQAILLNYLESKGGDALVAFAPEGIQEMNSNIELYNNGKAHKPIKNVRLSETLGAKYQVGERGAKTKKYVEAAKGTNLFFAIYEDEEGKRYYYSVPLREAIERQRQKLSPVPEYNEKGVALKFYLSPNDLVYVPTEEERTMGTCHIDKTRIYKMVSSTGCSCYFVPSTIAKVIADKVELQSLNKMEKAITGESIKEVCWKLKVDRLGNILNVIK

SEQ ID NO: 4167 - protein, 1558 aa, unidentified
  REGION 1..1558: note = Description of Unknown: Cas Enzyme sequence
MKKILGLDLGTNSIGWAVVNADEITRDKDTTYLKPINISSAGSRIIPMSADILGDFEKGNSISQTAERTRLRMVRRIHERSLLRRERMLRVLKTLGFLPTHFTNKINTYGKFIDDSEPKLAWIKRENGEYNFLFQDSFNEMLKDFALHQPQLVADGKKIPYDWTIYYLRKKALNERISKEELAWLLLQFNQKRGYYQLRGEEEEEDNTKRVEFLAQKVVRVEATNEKKGDDIWYNVYLENGMIYRRPSRYELDWVGKVKEFIVTTDLEKDGTPKKDKEGNVKRSFRMPKEDDWTLIKKKTEFDIENSNKTVGCYIYDTLLQNPNQKIIGKLVRTVERKYYKNELIQILSIQQELIPELKDTKLYKRCIEELYPNNEAHRNNLAKPDFVNLFVNDILFYQRPLKSKKTLIDNCPYEYRKDKDGIVYPIKCIAKSNPLFQEFRLWQFVQNLRIIQRERFVSNEQLDLFNNVATGKLETDVDVTFEFLKTEEDYVRLFDWLNDRNSIKQDTLLNSFFKIKKEKGKDHYPYRWNYVEDKEYPCNETRAAMINGLEKCNISSDILTHETEMALWHILYSVEDKIEINKALRTFARKNNLGNEFAEVFCKMKPYKNDYGSYSEKAINKLLPLIRMGKYWKEENIDAKTLERIDKIITGEYDETIKNRVREKAISLSSVEQFKGLPIWLACYIVYNRHSEAKEIEKWEKPEDIDCYLNSFKQHSLRNPIVEQVITETLRTVRDIWRKEGQIDEIHVELGREMKNPADKRKDMTTRIQQNENTNLRIKALLMEFLNPELGIENVRPYSPSQQDILRIYEENALDNLTKEDVEYEFVSKMSKTAQPSKSDVIRYKCWLEQKYRSPYTGKMIPLAKLFTPAYEIEHVIPQSRYFDDSFSNKVICEAEVNKLKDRQLGYEFIKNCAGQIVQLSQGNSVKILSVEEYEKLVKDFYASNRAKMKKLLMEDIPDGFIERQMNDSRYISKVVKGLLSNIVRVKESNGEYEQEAVSKNLISCNGSVTDRLKKDWGMNDVWNSIILPRFQRLNELTGTKNFTTLNREGHEIPNMPLELQKGFNKKRIDHRHHAMDAIVIACATRDHVNLLNNEAAHSKHNANRYQLQRKLRRFEKAINGYGKEIEVAKEFLMPWQSFTIDAKQVLQNIIVSFKQNLRVINRTTNNYLHYDENGKKKYQKQTNGDSWAIRKSMHKDTVFGEVNLRRKKAVPLNEALKKPECIVNKDFKRKVKELLYEGRDSKYIKKYIEENKDIWSDINTAKIEVYYFTKDEKKRNGEPKERYFATRKPLDVSFDQKKIQESVTDTGIQKILLAHLETKDNNPELAFSPDGIDEMNRNIVALNNGKFHQPILKVRVYEKANKFAVGQIGNKTKKFVESADGTHLFWAFLGAPRKNEESRDTKIVRSYYSIPLTIIMDCQKKYGAKWKNEIEAYLKERDLISLETNLLFILSPNDLVYLPANENCQAMTTNIDRNRIYKYIDPGMNTGNFVPYSTANVLFSIKYSNQKKMGLSYPIQDEYGVGSQGSKSPRAITGEMIKETCVPIEVDRLGNIIKIG

SEQ ID NO: 4168 - protein, 1568 aa, unidentified
  REGION 1..1568: note = Description of Unknown: Cas Enzyme sequence
MKKILGLDLGTNSIGWAVVNADKTTSKDNTTYLKPCSISHAGSRIIPMSADILGDFDKGNSISQTAERTRLRMTRRLLERNHLRRERLLRVLKIMDFLPEHYSTKINRYGKFSDDSEPKLSWHKSEEGKMEFLFQDSFHEMLTDFIQYHPQLLADGKKVPYDWTIYYLRKKALTQRLTKEELAWILLQFNQKRGYYQLRGEEEEEKDNETIEIISAKILSVEKKEKDKKYEKYWYEMHLDNGMIYRATFYNDVTSWEGETKDFVLKSTILKDGSTKTELSFLPTTEEIDKMDAQRKARMYAKIKLRTEKEIENSHKTVGSYIYDSLLQNPNQKIIGKLVRTVERKFYKDELIKILEIQQELIPELKDKTLYQRCIEELYTANEAHRKSLSKPDFVNLFVNDILFYQRPLKSKKSLIDNCPYEYHVSKDGKQHPIKCIAKSNPFFQEFRLWQFVQNLRIYQREKTVTDGQLDLFTNTTVGKLQTDVDITSEILKTEDDYVKLFNWLNDRNSIKQDTLLNSYFKIKKEKGKDKYPYRWNYVEDKEYPCNETRATIISGLAKCNIGSDFLTHENEMSLWHILYSIEDKAELYKALKSFAKKHQFDEALAEVLSKTKPFRKEYGSYSEKAIKKLLPLMRMGNYWDEENIDAHTRERIEKIINGECDETIKNRVREKAISLTDTRFFRGLPVWLACYIVYDRHSEAKEIEKWEKPEDIDHYLSSFKQHSLRNPIVEQVITETLRTVRDIWKQEGQIDEIHVELGREMKNPADKRRQMTERILANENTNLRIKAMLMEFMNPDMGIENVRPYSPSQQDILRIYEENALDNLSKEDKDYDFVSKISKMAQPSKSDIIRYKCWLEQKYQSPYTGKMIPLSKLFTPAYEIEHVIPQSRYFDDSFSNKVICEAEVNKLKDRQLGFEFIKNHAGEIVQLSQGGTVKIMSVEAYEKFVKDYYGNNRTKMKKLLMDDIPDSFIERQMNDSRYISKVVKGLLSNIVREKQENGEYEQEAVSKNVISCTGSITDRLKKDWGMNDVWNYIVLPRFKRLNAITGKDCFTIYNREGHEIPNMPLELQKGFNKKRIDHRHHAMDAIVIACATRDHINLLNNEAAHSMRNANRYQLQRKLRRFVTITINGKEREIAQEFLKPWDSFTNDACQVLNNIIVSFKQNLRIINKTTNHYQHFEDSGKKGLEKQQKGECWAIRKSMHKDTVFGEVNLRLKKTVSLNEAIKKPGNIVNKDFKKKVIELLGNGRDAKFIKKYIEDNKDTWSDINPAKIEIYYFSKDEKKRNGEPKERYFATRKSLDTSFDEKKIKESVSDTGIQKILLAHLASKENNTEQAFSPDGIEEMNRNITTLNDGKYHQPILKVRVYEKADKFAVGQTGNKTKKFVEAAKGTNLFFAFFGTEKENKSNGKKEVVRSYLTIPLNVMIDCQKKFGVQWRNNIEEYLREKDMIDADAKLLFILSPNDLVYLPKEDDKEGRIMTLDRSRIYKFIDPAQDKGNFVPYSVSSVIFSTKFTDQRKLGISYPIQDEIGIGSQASKSPRAITGEMIKETCIPIKVDRLGNVIEIDSKPI

SEQ ID NO: 4169 - protein, 1395 aa, unidentified
  REGION 1..1395: note = Description of Unknown: Cas Enzyme sequence
MKKILGLDLGTTSIGWALVNEKENDDEKSSIIQLGVRVNPLTVDEKANFEKGKSITTNADRRMKRSMHRNLQRYKLRRKNLIECLKEHNIITGETPLFEQGNHSTFKTYRARAKAVEEEISLEDLSRVLLMINKKRGYKSNRKIKDTEEGELVDGMEIAKRLYDENLTPGQLLLDLLQQGKKYRPAFYRSDLQAEFNKIWEVQSAYYPEVLTDDFKKHVSGFNKTQTSGAFYAIHKISTAKNIGKEGYQQALLWRVAALTKKLDIEEVAYVLCDINGAINNSSKRLAMISDRSKELYFSHQTVGQYLMHSIEQNPNASLKNIIFYRQDYLDEFEAIWEKQAQFHPVLTPELKKEIRDIVIFYQRDLKSSKNLINYCEFEHTEREVVVDGKKKTIVTGCKVCPKSSPLFQDFKIWQILNNLQVSVVGHRRKRIKKDELQLSLFADKEGEPLQRFLDQEEKDILFKELSIRDKMSKKEVLKLLFDNPQKLDLNYKEVEGNKTNAALFKAYQDIISQTGNGEYDFTKMPADDVMSITSEIFTGLGYKTDYLTFNPLLEGKALERQPAYRLWHLLYSYTGDNSTTGVEALLKKIQEICGFEKEYATILANVSMPLDYGSLSAKAIRKILPFMMKGYEYSKACELAGYRHSARSLTKEELDNKTYKSHLDELKRNSLRNPVVEKILNQMINVVNEIAATYGKPDEIRIELARDLKKSQEERELLDQAIRKNTAESEKLRKELEEEFGIQHVTKNDILRYKLYNELKMNGYKTLYSNTYIPREDLFSKRFDIEHIIPKARLFDDSFSNKTIEVRDVNIEKGDMTAYDYVAGKYDEKGLADYESRVEELFAQKIISRTKRNNLLMKEADIPSDFLQRDLRDSQYIAKKAREILEDMVPFVVTTTGSVTSRLREDWQLVNLMQELNWEKYDTLGLTESYTDKNGNIVRRIKDWTKRNDHRHHAMDALTIAFTKRSIVQYLSNLNARSDKSGSIYGIEQNELNRNNKDHRLVFNAPMPLDEFRAEARKHLESILVSIKAKNKVVTKNINKAKKKDGHQQKVQLTPRGALHNETVYGKITNFEAEYKKVDGKFTEDVILRVSNQRYREALLKRLADFGGDSKKAFTGKNSLDKNPIWLNADHSYCVPLKVKLYKKIDVFTIKKAVDKDLKIEKVIDNKVRAILQQRLNEFGGDAAKAFSNLDDNPIWLNKEKGIAIKRVKIRGIANGEPVRYKRNIKGELMKDENGNPIPNDYVNTANNHHVAVFRDAEGKMQEHVVSFYEATTRAIMGYPVVDREFKRSEGWQFLFSMKQNEYFVFPNEKTGFNPQEIDLLDADNYATISPNLYRVQKFTDGDYFFRHHLETNVENESSLKGITWKRINSVQSLNGVVKVRVNHIGKIVSVGEY

SEQ ID NO: 4170 - protein, 1250 aa, unidentified
  REGION 1..1250: note = Description of Unknown: Cas Enzyme sequence
MKNILGLDLGTTSVGWALIKAEDNNTPVEIQGMGVRIVPLAENEGDKFTRGQDVTVNADRTTARGIRRNYDRYQLRRQALTEKLRQLNMLPDENLIKLPVLELWQLRANAAKEKVTLSELGRVLYHLNQKRGYKHSQADKKDSKQRAYVKEINSRYTELNSLGMTIGQFFAQKLEETAVTHDGKTLFVYRIKDQIYPRQAYEEEYDIIMKCQQGFYPDILTDEVIDEIKNRIIYYQRDLRSCKHLVSICEFEKRCFYDAEGNVKRNEKGEIIYDGPKVAPRTSPLFQIFKNWQSINNIRFHNRRNEYLFISKEQRQVIAGVMDNAETLKLKDVQSVLGLTSKSGWYCDKAMKSGIKGNTTKCAILSALSSLPDSTIKDITRFNLETEETKNVDEETGEILLRIKNTYLDEPLYRLWHIIYSIKNVDERFNAIAKFLKEFNVEDASVVNALNDIDFVTPGYANLSSKAMCKMLPYLMDGLDYSDSCEYVGYNHSGSLTKEENANRELLNQIPALKKGELRQPTVEKILNQTINVFNQLSARLEKRGERIDEVRVELARELKQSKDERKEASDGIRKQQKRNEEYAKMLVEEGVRPTRNRILRYRLWEESNKRCFYCGQPISFNEFIKSSDAEREHVIPKALMFDDSFANQVCSCRECNKEKGGRTALDYMRTKSNLQAYLDRVDDMYQSHQIGGKKHSHLLASYDDYLSRKKEGKETKEDIMIWETPIERQLRLSQYISKKAQEILKTACREVVATSGTITDLIRHTWGYDTILHELNFPNYKEAGLTSFVTDEKTNQQREVIKDWSKRLDHRHHAVDALAVACTSRSIVQHINTLHASRDEMRKEVNSARKDWKDNNLLQQWIMEKKPFDRQYVLHKVASILVSMKAGKRTTVPGKRKVYKNGKPITIQTGLRIPRGQLHEQTIYGAIKQYDKDGKETTKIVTRYKVEDIFKGKETCDVVLDKKTNQYYINDEIEKALSYVVDKHIRDVIKERLNEAFPDGETYRSEAEKALVEGKPYKGENRCKQAFEQLKTLDEHPLYADKNKSIVIKKVRCYTGLSAVQPLRYNNNNDPISYVLTKNNHHVAIYADENGKYKECIYTFWQAVERSKYRLPLIIKDPKALWDEITQRENNGENFPDSLIKSLPMRDWTFIESLQSNDMFVMDMDDNDFEICISTNNYEELGKHIYRIQSISTLDYFFRLHTDTTSTTTPEAALSKRFIRIKSFKSYIAHNPHKIQVSLLGKIFTNQND

SEQ ID NO: 4171 - protein, 1214 aa, unidentified
  REGION 1..1214: note = Description of Unknown: Cas Enzyme sequence
MEKKRILGLDTGTNSLGWAVVDQDESGKYTLIDKGVVIFQEGVKIENGIESSKAAERTSHRALRRQYFRRRLRKIQVLKVLSKYNLCPALTEEDLNLWKSRKIYPKKDEFMLWQRTNDNDDINPYHSRYLCLNEVLNLQKQQDRYTLGRAFYHMAQRRGFLSNRLDATEEQENGAVKSSIANLNKEIEEAGCKYLGEYFYKLYKERGNTVRIRTRYTDREQHYKKEFFAICEKQQLPLEMVDELTKALYFQRPLKSQRQNVGDCTFEKGKPRCSDSHPLYEEFRLLSFLNNIRVQGPLDNDMRPLSEEELNKIDSLFYRKSKPNFDFEEIAKKIAGKGKYQWKGDTQSDLPYKFNYRMSQGVPGCPTIAQLKDVFGEDWKNSIAETYTKSLKKDGTQKSIDEMVNDVWNVLFSFDSIDKVKDFGREHLQLNEDQAEKFSKIHLSRNYASLSVKAIRNILFFLRGGMIYSDAVFFAKVPAIIGKSLWQERQDEIMEDLSYTIHLALKEKRRIDEAVKDYLQNNFDLKPGQAELLYHPSMIETYPDAKPNKDGVVLLGSPRTNAVKNPMAMRSLHEVRKVINSLIKEGKVGPDTEVHIEYARELNNANMRAAINEMQREKDKKHKQYAEEIRQLYKEATGKDIEPTETDILKYQLWEEQHHICLYTGEKISIADFIGAGPSYDIEHTIPQSVGGDSTQMNMTLCSTHYNRFVKKAKLPTELPEHEFIMTRIEPWKTHIEDLTKQIDRISTDGIWDKPTKDARIRKKNRLKLELKYWKGKYDRFTMTEVPEGFARRQGAGIGLISKYAALYLKSYFHDTLHPEHRQVYSIKGTLTSEFRQMWGIQEEYTKKSRDSHTHHCIDAIVIACIGKNEFNRMGEYYHVKEKYEKGEGERPVFQKPWPTFTQDIKQITEELLVVHDTPDNMPKKASRVIEVNGKKVVAKGDCARGSLHQDTYYGAIERDGDIKYVVRKPLSSFTSIKDLENIVDDAVRQTILNAVEGKDFKKAIAEPIYMNEEKGILIKKVRCYTPNVTQPLDIRHHRDVSTKEYKQQYHVMNDENYMMAIYQGIVKGKRKTSFVLVNLLDAAKFFKESTDRNDYPTIVPEEKNGLPLKWFVKKGTHLLMLEEGEESISLANADELCNRLFTITKMDKVGRLTCRNSKEARTAGDLKSFVNANPFRLQNGYRPILCISPINFHFLVEGYDFTITPLGEIKLKH

SEQ ID NO: 4172 - protein, 1429 aa, unidentified
  REGION 1..1429: note = Description of Unknown: Cas Enzyme sequence
MRKVLGLDLGTNSIGISVRDTDKDPEIVKQLDFFSSVIFKSGVGKGKSGEFSYAAERTKKRSTRRLYQARKYRIWATLKLLIEKGCCPLELTDLEKWSKYDKAKGLKRQYPIEAEKFEQWVRLDFDGDGVADYSSPFHLRAELMYKQFDFTQEMERYKLGRALYHIAQRRGFKSSKGETIKEQEKNESTLDANVDIDVADALKKSEEKKSGKLVEFMKKYNMSTIGCAFYELEKSGVRVRNSEYQAVRSQYKDEIRKIFEFQDGLSVDSDFYRHLVGEKKGEGTIFYKRPLRSQKGLVGKCTMEPNKPRCPISHPEFEKFRAWCLINNIRFGDGLIDSLTVNQKNRLYNDRFLLTRTNFKFEDIRKWIEKEIGKHLDFKNKTINYKDNTNVSGCPISGRLKNLLGDDWETWSFVSSETKTNRKTGEVNRITYNAIDLWHICFSFDEPDFVEEFAQKKLGLDKDQTKQLVRIFGAIQQGYGMLSLKAVRNINRFLEKGLKYTDAVLLAKLPDIFGEQWTLAEDNVISHLDYLINENRQQKLVYGIANSLIANYKSLEIEEQFANKNLDYELDENDYNDIRRVAIASIGEKTWEKKAEEYKVEILNKVAELYQSFFASSKRDYYALPKVSESLAAFLKDIYPCIKEKDLRKIYHPSMIEFYAPSKPKIMEDGRSLRLLGSPVVGALKNPMAMRVLHTLRKQVNALLKAVDEDGNALVDEDTRVVVETARELNDANMRWAIEAYQREREKENNEYEKIIKEYYPNRDIKDEDIDEARLLCDQHDIPEFKAEPNDTKKGEITNSPYYKKDVTKYRLWLEQNCRSIYTGKLINIANLFDDNAYDIEHTIPRSISFDDSLANLTICEAHFNRTIKKNQMPTQLANFDEIRQRLQPWFDKVEQLKDNVEFWKTQSKKAQDKDRKDQCVRQKHLWQMELDYWQNKVDRFTATEVTSGFRNSQLVDTRIITKYAYHYLKTVFSKVEVQKGSVTAGFRKMLGIQSLDEKKSRDKHSHHAVDATVLTLIPTAAKRDKMLELFYKIQEKKRLNEETMILENELRKEIKGCGLSGNVSDIVPFIENNILVNHVSKDQTLVPSHRRKRIRGKVVWKTDGQGKVVYVDGRPQPKEWIAGTSIRGQLHGETFYGAITQAEKDEKGKMLRDGKGNIVSCDKVYYVVRRELKYKASSVDAGFKDWEELEKVIVDKDLFAIMKGQFSEGISFKEACSNGIFMYKKNKDGVVDYSEGCKVNRIRHIRCFTSVKNPLRIKGQAYVSNKPYKRYYYAEMGDLYVMCKYENTERTEKEYHIWSLFDISNNREAGIEDIPNTLLGKKNTMLQLTQQIKTGDMLLLYKETPQELMDLDRETLSRRLYVVRGFENPSLIKLVRHINAQTDKDLGKGESVKDFSRLPEKIRCGINTLKYLVKETDFCLTPEGLVFK

SEQ ID NO: 4173 - protein, 1517 aa, unidentified
  REGION 1..1517: note = Description of Unknown: Cas Enzyme sequence
MLMKKILGLDLGTNSIGWAVIGAESEKRDDGSEYLKPESIEMAGSRIIPMDASILGNFDAGNSVSQTADRTGYRGTRRLRERFLLRRERLNRVLDLMSFLPEHYSSQLDRYGKFISPDIEPKLAWKPSIDGKNEFIFMDSFLEMLADFRQYQPELVKEGRKIPLDWTIYYLRKKALTRPISNQELAWILLNFNQKRGYYQLRGEEEEENPKQKVEYYSLTVVGVEDSGDKKGSDIWYNVHLENGWIYRRSSKYPLDWVDKKKDFIVTTALDDNGNPKTDKDGNVKRSFRAPKDDDWTLMKKKTEMDIDQSGHTVGEFIYDSLLANPDQKIKGKLVRTIERKYYRQELSQILKKQQEFNKKLQDKELYTRCLEELYPKNELHRRCVSVRDFAYLFIDDIIFYQRPLKSKKSLIDDCPYEKYHYLDKGVDVFRPIKCVSKSHPLYQEFRLWQFIDNLRILERTKLIDGRLQSDVDVTAQFLKDNDDYAALFDFLNNRSSVNQDVLLTKYFNIKKPRQKDAVIPYRWNYVEEKEYPCNETRSAMLAGFKKAGIPQEVLTTEITEALWHILYSISDKQELGKALDRFAEKNRLDKSFVDVFSKIKPYDSSYGAYSAKAISKLLPLMRRGKYWNLNAINPGTRQRMEKIINGEFDESISSRVWEKSASLKTETDYQGLPLWLACYVVYNRHSETGEIVKWNTPNDIDVYLNSFKQHSLRNPIVEQVVLETLRTVRDIWKKTGSIDEIHVELGREMKNPADKRARMSQQNIANENTNLRIKSLLAEFANPQFNIENVRPYSPTQQDILRIYEDYALSSLKADDQDYEFIHKMSMTAQPSHNDVVRYKLWLEQKYISPYTGQVIPLAKLFTSAYEIEHIIPQSRYFDDSFTNKVICESEINKLKDKQLGYEFIKNHAGQKVQISQTGQFVEVFSIPAFEEFVKQHYSGPKLKKLLMDDIPDQFIERQMNDSRYISKLIKGLLSNIVREKTESGDYEPEAISKNLIPSNGQITDRLKKDWGVNDVWNSIILPRFVRMNEITGTTGFTAINQKGHVIPAMPLELQKGFNKKRIDHRHHAMDAIVIACTTRDHINLLNNEAALSKNQSNRYALSRKLRRYESVQIEKHGEKKTIEVAREFLLPWPTFATNTRSALDNIVVSFKQNLRVINKATNRYLHFNEIGVKVNEKQTIGNNMAVRKPLHKDTVFGMVNLKLKKQASLNDALKAPSMIVDPAIKERVHNMKDAGFDTKQIKNELEKDGSISGKIEVYYFSNGTNERYFATRKPVDSSFDEKTILGSVTDTGAQQILLAHLSRCNNDPEIAFSPDGIEQMNRDIRQLNGGHDHKPIFKVRKYEKADKFAVGQTGNKRSKYVEAAKGTNLFFAIYRTETIDKETGRTVFGRAFETVPLNVVIERLKQHLAPVPEQNENGDRLLFWLSPNDLVYVPTPDEIETGHISEPIDKRSIYKMVSSSGPQCFFIQESIATPLVNKVEFSPLNKMERSICGAMIKECCIPMTIDRLGEISFKQ

SEQ ID NO: 4174 - protein, 924 aa, unidentified
  REGION 1..924: note = Description of Unknown: Cas Enzyme sequence
LKKTEILKLLFNNPKELDMNFPSIQGNLTQAELFNAYQKVIEQSGHGEYDFAKLPTEKSIQIVSEIFNGLGYKTDILTFDSSLKDDDLVKQSLYQLWHLLYSFEGDNSATGNEKLINILTERYGFEKEYASILSNVAFQDDYASLSAKAISKILPFMKEGNEYSLACEYAGYKHSKRSLTKEELENKGLKDRLDILPKNSLRNPIVEKILNQMINVINSIVDTYGKPDEIRIELARELKKNAKERESLTQAINKSTAEHEEIRTILKSEKFGLKHVSRNDIIRYKLYQELKDNGYHTLYSDTYISPGMLFSKEIDIEHIIPQSRLFDDSFSNKTLEIRSVNIEKGNQTAYDYILNKYGEEELEKYLGRIENLFKTSKAVKLEKLKMREKDIPDGFIERDIRDTQYIAKKAKEILEDLVKTVVSTSGMITDRLREDWQLIDVMQELNWDKYNQLGLTEIIEGRDGQKIRRIKDWTKRNDHRHHAMDALTVAFTKYQYIQYLNHLNARSIETKFTSSIKGIERDCLYRDDRNKLRFAPPIPLSDFRIDAKRHLENTLISIKAKNKVVTTNINKTKKHGRVNKKKQVTPRGQLHLETVYGSSKKYITKLEKIGSGFNEKQIQKVSKKIYREALLKRLQEYDNDPKKAFTGKNSLEKNPLYLNEQQTDFVPEKVKTVMFETIYTIRKEISPDLKLDKVIDIGIRRVLQKRLDEFGGNVKQAFSNLDKNPIWLNEEKGIKLKRVAISGISNAESLHDKKDKDGNFILDKNGNKQAVDFVNTGNNHHVAVYQDENGNLQETVISFFEATSRASIDMPIIDKDYKKEEGWKFLFTMKQNEYFVFPNEKTGFNPKEIDLLNPDNYNLISPNLFRVQKIATKDYNFRHHLETNVENNNSLKGITWIRTGLNGIRNIIKIRINHTGEIVSVGEY

SEQ ID NO: 4175 - protein, 1459 aa, unidentified
  REGION 1..1459: note = Description of Unknown: Cas Enzyme sequence
MKKILGLDLGTNSIGWALVDKDNQKILGMGSRIIPMGKDKIDYEKGDGVTKSAMRRAKRSTRRMNKRYKLRRNKLLYILHTLGMLPEQFQFKKLNEKDKDGSLLRLNGTKENNSFKETNNGIPVPTKIQELELLPISKKTLQADSISFCQLKVDALTRTIDIKDFGRILYNFNQLRGYSGGDSDERSKKENDEEESLGNKNYEVIIRKVCIISVEKSEDTFKIRGGKNKGQQLNKFIVVISLDDQELEGTTELQDLKEKVDQEEELQITTKRDKNGEVTSRIFTLPQKSDWRKEMEANEKILKEEGLFISELKLKDLQSNGKWTKIRNRVFLRNRYKEEFDKIWDTQAQKHNFLNECPKETLEKIANYTFPGKSESQQKLRKNAIEGGLKYIIKDQIIYYQRPLKPQTELISNCRFEKSEKVIAVSHPLFQEFRCWKQINNLYITSKQQVWNEKKKKNVWQYTNRYLTNEQKQRIYEKLQNQKGISFNEVKKIVEIKDDKTEYLNGLHVKAKLIGCDTLISIKKQLGDYAESLLEKETSIIEKIWDAIFDARNHEGSEYDITSKRVAPIFEILEEYLDDSQKAEELAFKLAQKVKFVRKYGSLSAKAIQKVLPLMQLNPQNISKQITDKFNTIKNLISTGEILDNTDYNFQDYVIDFVEKNPNALENGGLMEYLAISLAYDKHTAETIEAQIANYHDINYEKRNLRNPIVEQLMNETMQVIKAIWKQYNVDTKKLEIRIELARDLKNSAKERKAIYDGQSNNQKENNKAKERLKENKIALTSENILKYRLYSQQKGISPYTGKTIDFSKLFDNKEYDIDHILPKSRYYDDSFSNKVICEKNINEEKSNRTAWEYISQQNSKYEIILSTENFIKHINNNYFGKKKKNLLAEKIPTNPVSRQLKDTQYISIAVKNELAKIVGSENIRTSTGEITDFLRSRWGLKKLFMEMTEERFKRMELWDLNENGKPTTTTTKWVTKEVMNDGEKDKNVYEIKNWSKRYDHRHHAIDALIVALTEQSHIQRLNNLNKYVQDQLERRKEEFKITPCKDETVFEAFCNLEEGRRDEILQKMESSRYFKKPFLYTNKKGEIVSSLCRQVKEHLETMIISQKPKDKLSISEDPLDPNTPNKKLKKQLKIRAAIHEDTYYGKTNERDTKRIKLSALSASDIDKIIDKSLASEIKEHRKKHIKKEDAFIGEGLKEFNDNRIGNNKQPVYNVKVWYNKNENKKDSLQRLYDNNEKQSVITGDNYLFIVMEKKTKKGVSRVFDIASLYDSVALAKEYLKEDEDKRNFKQRICEDYRLKHKNKPQKVLFYLQQNDLVYLPTSSDDPVLNMTNNKLKEWLKDCKNKKSFARRIYKVVKMTGKDCFFIPNNYATTISTPKDLSKEDLDKLSKEYEDRKIPKHKKNYEEFGSFGSSIKTEINDNFVKELVLKENFDGNQPIKIQDTCLKLKIDWLGNIEFA

SEQ ID NO: 4176 - protein, 1465 aa, unidentified
  REGION 1..1465: note = Description of Unknown: Cas Enzyme sequence
MKRLGLDLGSSSLGWAILDIYESKIIKQGVITFDTGMVKDKNGYTSPTRDRRMTRSGRNLIRSRKYRKWSLLKILIKHDFVPLNEEELNDWSKYEKGKIRKFPSNTRFLKWLACDFSYQQNGKKHKNPYELRVKAIDEKLTKHELGRVLYHLIQRRGYKDIGGQDDETKKQLERRSKEGLDNAIKENRTLAEALQKDFLQKDKRARTQYPYRYEYEHELEVICKQQGYNIDKDNKGNYQDGLVEKLWKAIIWQRPLRTQKGNIGKCTFEPSRQRCPISHPIFEVFRAWQYINTIKYFDQNDNKQPLPIEHKRELFDFLLKKDKNFKFEEVKEFLDKKAGKDQKYNYISKEGKYDSSVSGMPICKELINLFGDKAKEAILSIEDEDENKSSKIVKSKIKRANKKEAEADYSIYDLWHFLFNFDKEFLETFAQNNLGIANELSKKGGESNPMVKIQEKMIQGYADLSVKAIRKILPFLKEGYLYDKAVLLAKIPDILGDRWIEHKSLILEILEQSYNTYIYRKQIIDITNKLIDMHKGLPCEDKFAYKDYSYTIKRDDETDIECCCENHFGEKSWPKVENRDEIKRDVKEQYQSYFADNKRAYKTIPSLTEVFKKLLNDNQIALNGELYHHSNRENIYNKKLDINYKTGEKRLPTRKNNKGIEIEILPIPLIDSIKNPMFNKAMSILRKLVNELILNGDIDQDTEIIIELARELNDNNRRIAIERYQKARRDERDKIRTFLEQYKTEENQHFNIEEKIPVFELWTEQIFDKPKENKHFNKAQEILSKEEKERYKLWLEQKGQCMYTGKMISITELFSNETDIEHTIPRSKLPDNTMANKTIAFKWYNEQIKKDKIPSECPNYLKDEEVGTAIIPRLDKWKELRDRYQKLYEDRKKAKGREDENAKNKRIQDKHYYKFYFDYWDDKVSRFEATEIKSGWVRRQLTDTQLTSKYAREFLKLYFKKVFVQKGSITSEFRKILGIQGQEEIKERGRHTHHTIDAFVLTLIPTNSSYKEDILKKYYLWLKSKDNVILEELEKSKKVLLQGISIQKMIQTIENTTLVYNFHKDTILVQSNKIVRHRGKIQYVKNKSGQYILDKNGNRIIKRTKGDTVRSELFAQTYIGKIRDVERDEKGKPIRENGDWKYKTGKEEFVFVKREPINRVKSSEKNINSIVDPQIRKLVKEQKNNSVIRDSQNNIIRHVRIHTKAGREVKQRINYESKYDYKNKFYSEAGSIPYAILLQKIHKGRNIKNIIPIPSFEIAKIHKQEGKFDIESCIQRFHPNYKDNNWNKQLLKVGQKVLVLKNDSEYNKRNDIDFQQKRLYFITQFEEKRILLIYHLETRSKTEISDEIKTIKDSILASIETSLDIPIIEEDTTIKDNKDRKQDYEKRKYDFNKRIDIISQYLKKEDIEAIKKKLEQYKTESSIIEIEGKTPLLKMSRNNWNFLYEGIDFDTTITGNLNFKKANNL

SEQ ID NO: 4177 - protein, 1119 aa, unidentified
  REGION 1..1119: note = Description of Unknown: Cas Enzyme sequence
SKELYFNKQTVGQYQMEMLDKNPNASLRNMVFYRQDYLDEFNTLWEKQAEYHKELTGELKKEIRDIVIFYQRRLKSQKGLVGFCEFESRQIEVEIDGKKKIKTVGNRVIPRSSPLFQEFKIWQILNNIEVTVVGKKGKRRKQKDNSPTLFDGLDDTEQLELNGSRYLYQEEKELLAQELFVRDKMTKSDVLKLLFDNPQELDLNFKTIDGNKTGYTLFQAYSKMIEMSGHEPVDFKKPVEKVVEHVKAVFDLLNWNTDILGFNSNEELDNQSYYKLWHLLYSFEGDNTPTGNARLVQKITELYGFEKEYAIILANVTFQDDYGSLSAKAIHKILPHLKEGNRYDVACAYAGYKHSESSLTKEEIANKALKDRLTLLPKNNLRNPVVEKILNQMVNVINAIIDTYGKPDEIRVELARELKKNAKEREELTKFIAETTRKHEEFKILLQSEFGLTNVSRTDILRYKLYKELESCGYKTLYSNTYIPREKLFSKEFDIEHIIPQARLFDDSFSNKTLEARSINLEKGNKTAYDFVKEKFGESGADNSLDHYLNNIEDLFKSGKISKTKYNKLKMAEQDIPDGFINRDLRNTQYIAKKALSMLNEISRRVVATSGTITDKLRQDWQLVDVMKELNWEKYKALGLVEYFEDKDGRQIGRIKDWTKRNDHRHHAMDALTVAFTKDIFIQYFNNKNASLNSNTNEYAIKNKYFQNGRAIAPIPLREFRVEAKKHLENTLISIKAKNKVVTGNINKTKKRGGVNKYLQQTPRGQLHLETIYGSGKQYLTKEEKVNASFDMKKIATVSKSAYRDVLLKRLHENDNDPKKAFTGKNSLDKQPIWLDKEQTRKVPEKVKTVTLETIYTVRKEISPDLKVDKVIDAGVRKILTGRLNEYGNDAKKAFSNLDENPIWLNKEKGISIKRVTISGISNAQSLHVKKDKDGKPILDEDSRNIPVDFVNTGNNHHVAVYRRPVIDKRGQLVIDEAGNPKYELEEVVVSFFEAVTRANLGQPIIDKDYKTSEGWQFLFSMKQNEYFVFPNEKTGFNPKEIDLLDAENYGVISPNLFRVQKFAHKNYVFRHHLETTIKDTSSILKGITWIDFRSSKGLDAIVKVRVNHIGQIVSVGEY

SEQ ID NO: 4178 - protein, 1531 aa, unidentified
  REGION 1..1531: note = Description of Unknown: Cas Enzyme sequence
MDKKYILGLDLGTNSIGWAVVGTSKSEESHDFSGEIISSGVMTIPMDAATLGDFDKGNLKSQTAARRELRSMRRLYERSKLRRERLHKVLSLMGFLPEHYSAGLDRYGKFKDGQEVKLAWDKDENGKQSFIFRQSFCEMLDDFRRHRPELVAGEKEVPYDWTIYYLRKKALTQKIGKEELAWILLNFNQKRGYYQLRGEDEEERQAKTRQEFDRRTIVDIADTGEVYKGSKVLLVTLDDGRRGKIFQKEMPDWAGQQKDIIVTVDIDKDGKDKCNDKGEPDYRFKIPTEAEWETQWKLIKAKTQNDLDASGKTVGAYIYDALLQMPGQKIRGKLVRTVERKYYKDELRKILEKQKEFYGEFQDRELYEACLRELYPVNDAHRAEMNGRELTDLLMDDVLFYQRPLKSKKSLISDCPYEYHENMNHETGEVKRYPVKCIPKSHPLFQEFRLWQFVANLRIYQREAMVNGKLCVDVDVTANFLKNENDYAELFNELNKLKSIKQDKFLTAVLKLNKNEKSNYRWKYVEDKEYPCNKTHAAMLECLDKAKMNHDFLTAEREEALWHILYSVSDKAELEKALRKFIERQKCGCDESTEDAFVEAFRNMPPFEKDYGAYSAKALRKLLPLMRTGKSWSESAIDAATHERILRLIGGEYGENMPGKVKDRIANLKDVSAYRGLPLWLACYVVYDRHSEAKDICKWGSPDDIDGYLRKFRQHSLRNPIVEQVVLETLRTVRDIWRQLGHIDEIHIELGRNMKLSNEERQKQTKKILENENTNFRIKALLTEFMNPEFKMLEKDENPDLEIENVRPYSPIQQEKLRIYEETVLSEMKDVPNDIKDIIRKLGESDAGKRPTASQVLRYRLWLEQKYVSPYTGKAIPLAKLFTTAYQVDHIIPRKRYFDDSLSNKVICEAEVNSLKDCMLGYEFITEHGGEKVTLSGGGTVTIRTVHDYEQFVKTTYADNKKKMKKLLMEDIPDDFTSRQLNDSRYISKFIKSLLSNIVREEGELEDISKNMIACTGGVTDRLKKDWGVNDVWNEIILPRFIRMKEQTGNTGFTTLNSNNKTIPDIPLEYQKGFSKKRIDHRHHAMDAIVIACANRNIVNYLNNESANKKDGTTREDLQRLLCYKSKPDSNGNYRWIVKKPWGTFTQDVYASLKDIVVSFKQNLRVVSKMSNMYQHYENGKKRLVRQEKGDMLAVRKSLHKATYYGEVNLRKDDGGVSLKEAMRNPDVIVEKDLKRKLKELIAQGLTEKQIRKYFEDNKDVWQDVDLKKIKAYYFTKDKGRNFYSGRKLLDSSFTKKKIEDDVTDTGIRKILLSHLRQNGEDPKTAFSPEGIEQMNKNIVELNNGKYHQPIYKVRVCEESDSKFAVGRKGNKVSKFVEADKGTNLFFAVYEKEEQDKATGKTVWKRTFETIPLQDVISRAKKRLPPAPEKLNGSRLKFVLSPNELVYVPTAGELESGNINRPLDRSRIYKMVSCNDNRLFVIPYYVARVIVDKQEYHKNNKLEITDDGMSVKEVCIPLEVDRLGNINIKGK

SEQ ID NO: 4179 - protein, 1444 aa, unidentified
  REGION 1..1444: note = Description of Unknown: Cas Enzyme sequence
MKKVLGLDLGSSSIGWALVYEAESDNETSSIIRLGVRVIQYDNFVSTETATELKGDAAEYFKRGKGISPNAGRTKAHAMRINLQRYKLRRKALIDKLKECGFINDETLLSEQGNRTTFETYRLRAKAVEEEISLEELVRVLLMINKKRGYKSNRKIKGSEDGALIDGREVAKKLYVENLTPGELCLQLLEAGKKNLPEFYRSDLQNEFDKIWNFQKQFSPEAFCDAAKEEVKGKNKNQTWAILAKYFVWTRNDSFWNEEEARTEVRMKEYKLVGLKRTTKGHEQKLENYRWRVQALSEPMNLEMMAIVLQEINGQITASSGHLGAISDRSKELYFNKQTVGQYLMAELDKNPHYSLRNKVFYRQDYMDEFDAIWERQRLYHTELTPELKKEIRDIIIFYQRRLKSQKGLISLCEFERRDIVVEKDGVKKTKTIGCKVIPRSHPLFQEFKIWQTLNDIKVFVTGNKGKGKKANQSSTLFSETEDALLAEGKRYLYQEEKELLAKELFVRESMSKAEVLKLLFENPKELDMNFKQIDGNHTGFALFSVYSKMIERYGYEPVSFKASADDIIERLEIIFADLGWNTGLLSIDLSKDDKELEKQPYFRLWHLLYSFEGDNTETGNGKLIEKLMQLCGVQKEYAKILANVSFQDDYGSLSAKAIKKILPNLKEGNQYDVACGYAGYRHSQSSLTKEEIKNKVLKDKLELLPKNSLRSPVVEKILNQMVNVINTIIDTYGKPDEIRVELARELKKSRKEREELSKSIAQNTREHEAIRKLLQTEFGMMNVTRNDIIRYKLYEELKDNGYHTLYSNQYIPKEMIFSKEIDIEHIIPQARLFDDSLSNKTLEYKAINIEKGNKTAYDFVKEKYGDEGLQQYLNRCEALFKDKKTKLKKLKMESRDIPEGFIERDLRETQYIAKKALSMLSEISRRVVATTGSITDRLREDWQLVDIMKELNLPKYEKLGLVEMFEDKDGRQIKKIKDWSKRNDHRHHAMDALTVAFTKDVFIQYFNNKNAFWMSGSKEHANITAIRNKYFGNGKAVAPIPLRTFRMEVKYHLENILVSIKVKNKIVTNNINRTKKKDGENRKLQQTPRGQLHLDTIYGSHRRYVVKEEKVNASFTADKISRVSKPAYRIALLKRLEAFGNDPKKAFTLKNSLDKNPVYLDEKQIEKVPEKVAIVEFETVYTIRKPIDPQLSIDKVVDAKIRTLLKKRLEEYGGDAQKAFSNIEENPIWLNKEKGISIKRVTIRGINKAQALHEKRDKDGNLIFDEGGRKIPVDFVNTGNNHHVAIYRKPVVDKTGQIMLDEQGNPKYELEEKVVSFFEAVARIKCDQPVIDKEYKHSEGWKFLFSMKQNEYFVFPNEKTGFNPEEIDLLDPENYALISPNLFRVQKIGANDYTFRHHLETSIQNSSNDLKFITWIRCGKNGVNGVVKVRVNHIGQIVSIGEY

SEQ ID NO: 4180 - protein, 1509 aa, unidentified
  REGION 1..1509: note = Description of Unknown: Cas Enzyme sequence
MKNIVGLDLGTNSIGWAVVNGSVNDDGSEQLVKIQASGSRIIPMDAAMIGDFNKGNSISQTAERTRLRGVRRLSERYLLRRERLHRILDILGFLPFHFAQDLDRHGKIVKGKEPKLAWRKNEAGQFEFIFQDSFKEMLEDFKLNHPNLITDDKKVPYDWTIYYLRKKGLTSKISKEELAWILLNFNQKRGYYQLRGEEEKKNDNVMIINSKVIDVVKAEKDKKYEKYWYNVLLENGLLYRAAFYNDISFWKGHTKEFVLKTIKLKSGGTKQELSFLPSFDEIEKMEKKQKDKMYFKIKLKTEADIDQAHKTVGTYIYDTLLGNPSQKIRGRLVRTIERKYYKEELKLILDKQKEFHPELQDRALYAACIEELYPINEAHRNNVGNRDFTYLFLEDILFYQRPLKSKKSLIDNCPYEENQGLDKETGEIKSFPVKCIAKSHPLFQEFRLWQFIVNLRIYRKDLAQDVDVTNELLKTEEDYVALFDWLNGKKEIDQKAFLKYPVFGLKKEIENYRWNYVQDKPYPCNETRLLMLARLEKCDISIEFLTKENEEALWHILYSVEDKNEIVKALQKFADKHDLNASFVDVFRKFPPFKKEYGSYSAKAIKKLLPLMRMGKYWSEDSIDKGTRKRMDKIITGEYDEKIENRVREKVIHLADVSDFRGLPLWLVCYIVYGRHSEAKEITQWKSPADIDSYLKSFKQHSLRNPIVEQIIIETLRVVRDIWKQVGNIDEIHVELGREMKNPADKRKKMTQQMSENENTNLRIKYLLTEFLNPEYEVENVRPYSPSQQDILRIYEEGVLNSVSDLPEEISDILKKFTETDLKKRPSRSEILRYKLWLEQKYRSPYTGEVIPLGKLFTPAYEIEHVIPQSCYFDDSFSNKVICEAEVNKLKSNLLGHEFIVKHHGEIVELPFGKKVRIFTVDEYEQFVKDNYSRTRGKMKKLLMDDIPEEFVARQLNDSRYISKVVKSLLSNIVREKGEEEAISKNVIPCTGGVTDRLKKDWGINEVWNKIILPRFQRLNELTGTNKFTTKNVGIQEIPTMPLELQKGFNKKRIDHRHHAMDAIIIACANRNIINYLNNESATAKAELSRYDLQKLLCDKAKTDNNGNYKWVIRKPWASFTQDTYLALENIIVSFKQNLRVINKATNRFLHYNEEGKKIFVKQGKGDNWAIRKSMHKDTVFGEVNLRRIKTVALNEAMKNPQSIVVKDFKRKLLELWNLGFDAKRIKKYFEDNRETWSDINLSKIEVYYFSKDTKDRFFATRKPLDTSFDRKKIENNITDTGIQKILLRHLELKDNNPDIAFSPDGIDEMNRNIIQLNNGKYHQPIIKIRWYEQADKFAVGQTGNKFSKFVEAAKGTNLFFAVYESNILDKKTNTIIKKRNYATIPLNVAIERQKQGLPVAPEDENGNDPIFVLSPNDLVYLPTDDELANGIIAQPLDRGRIYKMVSCTGNEGHFIPARIANPILQTIELGSNNKAQKAWTDEMIKEICMPIKVDRLGNVLESSSSYKK

SEQ ID NO: 4181 - protein, 1431 aa, unidentified
  REGION 1..1431: note = Description of Unknown: Cas Enzyme sequence
MKRILGLDLGSSSIGWALVNEAESKNERSSIVKLGVRVNPLTVDESINFEKGKSITTNADRTLKRSMRRNLHRYKLRREALIEVLKECKFITEDTILSENGNRTTFETYRLRVKALTEEISLEEFARVLIMINKKRGYKSSRKAGGAEEDTLIDGMDIARKLYDANLTPGELCLQLLSAGKKVLPDFYRSDLQNELDRIWEKQKEYYPGILTAALKEELRGKKRDAVWAICANAFVWKETYTEWNNEESKNEQIEKEHKLEGIYSKRKRDEAKKENLQWRVSGLKEKLSLEQLVIILQEINTQINNSSGYLGTISDRSKELYFNKQTVGQYLMDILDNNPNASLRNIVFYRQDYLDEFNVLWEKQAEFHKELTGELKKEIRDIIIFYQRRLKSQKGLISFCEFESRQIEVKIDGKRKIRTVGNRVIPRSSPLFQEFKIWQILNNIEVTAVGNKNKQRMQNGSNEPDDTEQLELNGRRYLYQEEKELLAKELFVRDKMTKLDVLRLLFDNPEELDLNFKTIDGNKTGYLFFQAYSKMIEMSGHEPVDFKKPIEKIVEQVKSVFVLLNWNTDILSFDSNKELDKQSYYKLWHLLYSFEGDNTPTGNGCLVQKIMDSYGLGKEFAKILANITFQEDYGSLSAKAIHKILPHLKEGNQYDVACEYAGYRHSKSSLTKEEIANKVLKDKLEVLPRNSLRNPVVEKILNQMVNVINAIIEAYGRPDEIRVELARELKKNAKEREKLTKSIAETTKTHEAHKKLLQEEFGLKNVGRSDILRYKLYKELESRGYKTLYSNTYIPREKLFSKEFDIEHIIPQARLFDDSFSNKTLEARNVNIEKGNRTAYDFVKEKFGESGTDNSLDCYLNNIEVLFVSGKISKTKYTKLKMTEQDIPGGFIERDLRNTQYIAKKALSMLNEISRCVVATSGSITDKLREDWQLVDVMKELNWEKYKALGLVEYFEDKDGKQIGRIKDWSKRNDHRHHAMDALTVAFTKEVFIQYFNNKNASLNPNTNEYAIKNKYFQNGRAIAPIPLNEFRAEAKKHLENTLISIKAKNKVITNNINKTKKRGGVNTKKQQTPRGQLHLETIYGCCRQYLTKEEKVNASFDVSKIATVSSSVYRDALLKRLQEHHNDPKKAFAGRNSLDKKPVWLDKEQIRKVPEKVKTVTFETIYTIRKEISPDLRVDKIIDSGVRKMLTGRLKEYGNDAKKAFSNLDEKPIWLNKEKGIPIKRVTISGISNAQSLHVKKDKDGKPVLDGNGRNIPVDFVNTGNNHHVAVYRRPVIDKNGQMVIDENGNLKYELEEVVVTFFDAVTRVNLGQPIIDKDYKASEGWQFLFSMKQNEYFVFPNKKTGFNPKEIDLLDADNYGLISPNLFRVQKFTHKNYVFRHHLETTIKDTSSILRGITWIDFRSSKGLDSIVKVRVNHIGQIVSVGEY

SEQ ID NO: 4182 - protein, 1512 aa, unidentified
  REGION 1..1512: note = Description of Unknown: Cas Enzyme sequence
  MOD_RES 1463..1466: note = Any amino acid
MKTILGLDLGTNSVGWAVINSVIKEQAERIWIEMAGSRIIPMDAAVLGDFDKGNSISQTSERTRLRGARRLRERQLLRRERLHKVLNILGFLPNHYLEYIDFEKHPGKFLADAEPKLAWVKDEQGKYTFLFQAAFDEMLADFAIHQPSLVSGDKKIPYDWTIYYLRKKALTEMISKEELAWILLNFNQKRGYYQLRGEEEEDNAGKSVEFYALKVLTVEATDEKKGRDVWYNVHLENGWIYRRSSSVPLDWEGQVKEFIVTTDLNPDGTPKLDKYGEVKRSFRAPKEDDWMLIKKRTEADIANTHKTVGAYIYDTLLQKPQQKIIGKLVKTVERKLYRDELSLILQKQCAFHAELQDRALYARCVEALYPSNEVRRKNIANRDFVYLLMDDILFYQRPLKTKKSLIANCPYEENEYVDRETGEIKKAPLKCIAKSHPLFQEFRLWNFLSNIRIYQKEKEINGTLHLDVDVTAEFLKTEDDYVALFDWLNSRKEIEQKTFLKYPKFGLKKEISNYRWNYVEDKQYPCNETRHAILSSLEKANVCIDFLSNEKEVALWHILYSVSDKQEIEKALRTFAAKNGLDESFVEAFKKFPPFKSEYGAYSAKAIKKMLPLMRCGKYWDVSSIDDTTKERIKKIVTGEYDERISVKVRDKVMNLSDISCFRRLPLWLACYIVYNRHSEDKEAVKWESPADIDAYLASFKQYSLRNPIVEQVITETLRVVRDIWKQVGRIDEIHIELGREMKNPADKRKRMTAQILENENANLRIKALLAEFMNPEYEIENVRPYSPSQQEILRIYEDTVLHAEDQLPEEIDAILKKFNSSKVPTKSEFLRYKLWLEQKYRSPYTGELIPLGKLFTAAYEIEHVIPQSRYFDDSFSNKVICESAVNKLKDNQLGYEFIKNHHGQKVEVGFGKSVEIFSVDSYERFVKEQYAKSAVKMKKLLMDDIPEQFIERQLNDSRYISKVIKGLLSNIVREKNDSGEYEPEAVSKNIVVCTGSVTDRLKRDWGMNDVWNSIVYPRFERLNSLTDTQSFGHWENKSGKKVFQTELPLEYQKGFSKKRIDHRHHAMDAIVIACATRNHVNYLSNESASRNAKISRYDLQRLLCDKSRTDDNGNYKWVIKKPWDTFTQDAREVLSKIVVSLKQNLRIINKTTNVYRHFDATVNRVYQKQKTGDSWAIRKPMHKDTVFGAVNLRKVKVVRLSVALDTPAMIVDKRVKNKVFELLSYKYDKKRIEKYFKENAFLWKELDLAKVAVYYFTEATTEPLVAVRKPLDSTFNEKKIKESVTDTGIQKILLNHLCTKEGKPDLAFSAEGIEEMNRNLLQLNNGKSHQPIYKVRVYEPRGNKFSVGVLGNKGTKWVEAAKGTNLFFAIYITEDGKRTYETIPLNVVIEREKQGLVPVPDRNEKGDKLLFWLSPNDLVYLPTEEEREFGRINEPIDRGRIYKMVSCTGNEGHFIPANVANXXXXIVPVIELGSNNKAQRAWTNEMIKDICIPIKVDRLGHIIEVKYRIDE

SEQ ID NO: 4183 - protein, 1442 aa, unidentified
  REGION 1..1442: note = Description of Unknown: Cas Enzyme sequence
MKKILGLDLGTNSIGWAVVNEAENENEKSSIVKLGVRVNPLTVDELTNFEKGKSITTNADRTLKRSMRRNLQRYKLRRENLIELLKANHFIDDDTVLSENGNRTTFETYRLRAKAATTEISLAEFARVLLQINKKRGYKSSRKAKSTEEGQLIDGMEIAKRLYDENLTPGQLSLELLKCGKKYLPDFYRSDLQAEFDKVWDVQKQFYPELLTDELKENIRGKIASSTKTICEKCFCVEGIKTTRTQEYKIKYYELRVKSISQKISLDETALVLSEINGQINNASGYLGDISDRSKELYFNHQTVGQYQMSQLDKNPNYSLKNQVFYRQDYLNEFETIWETQAKFHKELTPELKKEIRNVVIFYQRPLKSQKGLISFCEFESRQIEVEVDGKKKLKTVGCRVCPKSSPLFQEFKIWQRLNDVELTGMIVPNQQQDLFGYSKDYAYGKRRLFPEEKDMLFAELNYKEKLSKAEALKMLFPKRKDVDINFKELDGNHTQAELFKAYISIAERSGHDLGDMSKKTAKEMLDCIADIFSTIGIDTNILTFNPDLEGKEFEQQPMYQLWHLLYSFEGDNSNLGNEKLIEKLFDKFGFEREYAAILATVVFKEAGDYSSLSTKAIRKILPHLKDGNDYSVACEYAGYRHSKQSLTKEEIQNKVLKDKLELLPRNSLRNPVVEKILNQMINVVNSIIDEYGKPDEIRIELARELKKSAKEREELFKSINETTRIHEELVKKLQNEFGLSHVSRNDIIRYKLYMELASNGYHTLYTDTYIPREKLFSKEFDIEHIIPQAKLFDDSFSNKTLEARQANLDKSNTTAFDFVATKYGDDFANGEYKTRIDKLLADKVISKTKHDKLLMKEADIPSGFINRDLRDSQYIAKKAREILEELARFVVPTTGSITDRLRDDWQLVDVMQELNWNKYDQLGMTEIIECRDGQRIRRIKEWTKRNDHRHHAMDALTIAFTKRSFIQYLNNLNARVQKSVDDYIDLDMVELSDLNKEKRASAMYGIEKKELYRDNHGKLRFNPPMPLNEFRAEAKRQLENTLISIKAKNKVVTRNINVSKKKSGVNKNVQLTPRGQLHLETIYGSSKRYVTKEEKVNASFDATKIQMVSSKRYREALLARINQFGGDAKKAFTGKNALDKNPIWLNAQHTDKVPEKVKIVGFETIYTIRKEISPDLRIEKVVDAHIRQILQSRLDEFGGDAKKAFSNLDENPIWLNKDKSIAIKRVTITGISNGEPLHDKRDKNGNLILDENDNPQPVDFVNTGNNHHVAIYRKPKLDKNNQPILDNNGNMQYELDEKIVSFYEATSRAMQHLPIIDKTYKQEEGWQFLFTMKQNEYFVFPRYDADGNMTFNPLEHDEAWYKNPENYAEISPNLFRVQSISKVMYGNNAVRDYIFRHHLETTVTSKLKGLTYQQYKSLVFADKIVKVRVNHIGQIVSIGEY

SEQ ID NO: 4184 - protein, 1258 aa, unidentified
  REGION 1..1258: note = Description of Unknown: Cas Enzyme sequence
VTTDLEKDGSPKKDKEGNIKRSFRAPKEDDWTLLKKKTEYDIDNSHKTVGCYIYDTLLQNPDQKIIGKLVRTVERKYYKDELRQILGVQKALIPELKDEKLYKACIEELYPHNEAHRNNISKPDFANLFINDILFYQRPLKSKKSLISDCPYESHFDRDGNEHPIKCIAKSNPLFQEFRLWQFVQNLRIYERETDFDVTGQYLSTGEKYVALFDWLNDRASIKQDTLLNSYFKFKKEKGKDHYPYRWNYVEDKEYPCNETRAEILKGLDKCRVSADFLNKEQEMSLWHILYSVEDKTEIGKALKKYAEKNCLPESFADVFAKIKPFKKEYGSYSEKAIKKLLPLMRIGKYWSADAIDAKTKERIDKIITGEYDEKIRDRVREKAINLTDETHFRGLPIWLACYIVYDRHSEAKEIEKWETPEDVDKYLKAFKQHSLRNPIVEQVVTETLRTVRDIWKQEGNIDEIHVELGREMKNPADKRKKMTETIQQNENTNLRIKAMLMEFMNPEMGIENVRPYSPSQQDILRIYEENALDNLTKDDKEFEFVSKISKTAQPSKSDITRYKCWLEQKYRSPYTGEMIPLAKLFTSAYEIEHVIPQSRYFDDSFSNKVICEAEVNKLKDRQLGFEFIKAHKGEKVQLSQGKTVEILSVEAYEDFVKKHYANNRTKMKKLLMDDIPDGFIERQLNDSRYISKLVKGLLSNIVREKLPNGEYEQEAVSKNLISCNGSITDRLKKDWGMNDVWNSIILPRFRRLNELTGKNVFTAISAEGHEIPAMPLELQKGFNKKRIDHRHHAMDAITIACATRDHVNLLNNEAAHSKKHDKFYRYDLQSKLRRKDEDGHYKEFLKPWTSFTTDAKRALENIIVSFKQNLRVINKTTNRYQHFDESGKKVFDKQKKGDSWAIRKSMHKDTGWGEVNLRFIKEVSLNDALRNPKSIVNKDFKQKVQELFTQGHDAKYIKKYVEDNKDVWSDIDLKKIKVYYFTKETNDRYFATRFLSDLVGYFAKVVKYDDAIKKIEGITDTGIQKILKAHLKAKDNNPELAFSADGIDEMNRNIVELNDGKPHKPIYKVRRFESGNKYSIGQKGCKAKKFVEADKGTNLFFAIFSSEKLNKDSSEMESVRSYLTIPLNVMIDCQKKFGSKWQANIETYLKECKLVSDEVKLLFILSPNDLVYLPTRDELKDGIKVIDKKRIYKMVSATGNQCFFIDEKVAKVIYDKNEFTSMNKAERAITGEMIKETCVPLKVDRLGNIVELNGKKL

SEQ ID NO: 4185 - protein, 1216 aa, unidentified
  REGION 1..1216: note = Description of Unknown: Cas Enzyme sequence
MEKRLGIDMGTNSLGWALVEMTEEGCVLLDRGVDIFQEGVAHGKSGERPAVQDRTDARALRRHYFRRRLRKIALLRVLVQHDFCPPLSQEQLDAWRKQGVYPVTDEFIRWQRTDDAADKNPYRDRFRALTEELDLTRREDRHALGRALYHLCQRRGFLSNRKDAGNETEDGTVKTDIKALSADMEAAGCTWLGEYFYRLYQRKEKIRSKHYTARNEHYLAEFRAICRKQRLGEELQQALERAIFYQRPLKSQKGQVGRCRFEKKKSRCPVSHPRFEEFRMLQFLNNVRVTGPGDAESRPLSQQELEAVRPLFLRKSKPHFDFEDIAKKIAGRNNYACKGDRTEAAWRFNFARGATVTGCPMSALLEAVFGNEWRRELCRLYTLGAGKSEERIIDDVWHALFAFEHEERLRQWLQEKLQISADDAKTLAAFRLPQGYASLSLNVINKILPYLRRGYRYDEAVFFANLGKVLPAEVYADPARRREVEQGISAQMDDLGDGEKTRKEERIRDYLRLYWGVEEERLDRLYHPSMIEAYPQAKPDANGILRLGSPRTAAVRNPMAMRALFRLRALINELLREGKIDRGTRINIEFSRKLNDANMRKAIERYQREREAENRKFAAKIREEYAAATGHTIEPTEEDLLKYRLWEEQNHIDLYSDTGRMIGIAEFLGAGRTYDIEHTVPRSRGGEDAQYNKTLCEERFNREVKRNKLPMELACGEEIWARIEALGWPELIDSLQGQIEGATRRVDNAVTKPEKDEAIQYRHYLKMRRDYWRRKCESFKITEVPEGFSNRQGVDIGIIGKYARQYLQTVFDRVYPVKGSATADFRTMWGLQEEHTRKERVNHVHHCIDAITIACIGKREYDRWARYVCQDERYRRGEADRPQPEKPWPTFTEDVRAVAEELLVSHHTPDNMPKQSRKRLRVRGRVQKNDKGETKYMQGDTARGALHEQTFYGAIEREGEIRYVVRKSLDQLLPTDVDKIVDETVKRKVQEAIEAFGFKEAMDPQKHTVWMNKDKNVPIRKVRILTGVKNPILLKPHRDVSVKEYKRYYHVVNDGNYCMAIYEGRDRQGRLKRTFEIVNKLEAARYFKRSADRESRPDLVPLSDVNGYSLKYLLKTGTMVLFYENSPDELYECSVGELAKRLYKVVGMAQDGRVQFLFHQEARDRKAVTAECGMGISVFDARHPAPKLRIRVSNFKMFVEGYDFELTVTGEVKFKR

SEQ ID NO: 4186 - protein, 1516 aa, unidentified
  REGION 1..1516: note = Description of Unknown: Cas Enzyme sequence
MGNILGLDLGTNSIGWAVIQSNEEGKPCAIKAAGSRIIPLDAAVLGDFAKGNTKSQTAERTFYRSTRKMIERRKLRRQRLLRVLNVLGFLPEHFKSDIDFEKHLGQFINGQEPKIAWHKDETGQFTFMFKDSYNEMLADFAKNQPALLSDDKKIPYDWTIYYLRKKGLTQKLQNEELAWLLLHFNQKRGYYQLRDESLNDQADDPTKLVEYYKLKVVDVQQTDEKKGTATWYNVILENGMIYRRPSDTPLDWVGKEKEFIVTTPLEKDGTPKKDKDGNIRRSFSVPKENDWTLIKTRTENDIQSSGKTVGMFIYDSLLSNPSQKIIGKLVRTVERKFYVSELQKILSCQEKLNPALQDASLYAACINELYPRNEAHRNNIQNKDFVHLFVNDILFYQRPLKSKKSEIQDCPFETYQYIDKKTGEVLPTHPKCIAKSHPLYQEFRVWQFLSNLKIYQRENVVNGKTVFDEDVTNSMIPDAKRYEEVFEWLYSQKEVTQDALLKQLVGNKEYKKYRWNYVEDKVYPCNPTRHMIVSYFKKAEISQEKYLSLCDDEHITTLWHILYSIKDTKELEKALSKYAQKNDLPDTFVKTFLKVPAFKSEYGAYSYKALNKLLPLMRMGKRWDESSISVETRSRIDNLIDGVVDDKISERVRNLTVGMRSVDQFQGLPVWLATYLVYGRHSESSDNQKWNSPKDIDIYLNNFKQHSLRNPIVEQVVLETLRVVRDIWEKHGQIDEIHVEMGRELKSTNEQRAQATRRILENENTNIRIKMLLQEFINPEYQIENVRPYSPSQQDLLKIYEEGVLSDGTIEMPEDIENIFKKMNTAKVPTKTEFMRYKLWLEQKYRSPYTGEIIPLGKLFTSSYEIEHVIPQSLYFDDSFSNKVICESEVNKLKTNQLAYNFIKENHGRKVTLTYGKTVEIFSLADYEDFVKEHYSNNKAKMKKLLMDDLPDEFISRQLNDSRYISKLIKGLLSNIVREEIKEGELESEATSKNVITCVGSITDRLKKDWGMNDVWNQIVYPRFERLNRLTETDHFGKWENVEGKRIFRTTIPLEYQKGFSKKRIDHRHHAMDAIVIACASRNIVNYLNNESATKNAKISREDLKHMLCHKRKPDNQGNYQWVIDKPWSTFTEDSLRVISGIVVSFKQNLRIINKTMNYYQHYDAAGKKSIEKQSKGDNWAIRKQMHGETVFGRVNLRKIKEVKLSVAIADAKMLVDQALKSKVFELRKMHFTDKQIGVYFKDNLKAWPNLNINKVPVYYFTDDTKEPLAATRFANDLVSVFSGIKTADKALEKIEQITDTGIQQILRRHLEAKGNDPELAFSADGIDEMNANIVLLNNGKKHMPIYKVRKYETLGKKFNVGYVGAKTKKYVQAAKDTNLFFAVYADAEGKRSYETIPLNVVIEREKAGEKPAPAVNENGDNLLFCLSPGDLVYVPTKEEVESGFVHFEITANRLYKMVSSSGPQCFFIPYQVASPIIDKFEYSVLNKAEKSVDNLMIKSICVPVIYSRLGELVKR

SEQ ID NO: 4187 - protein, 1392 aa, unidentified
  REGION 1..1392: note = Description of Unknown: Cas Enzyme sequence
VLQKYNYFQSVANYLKFFLFLWWKIIKDKHIMKKILGLDLGTNSIGWAVVNEAEKVGEKSSIVKLGVRVNPLTVDELSNFEKGKSITTNADRTMKRSMRRNLQRYKLRRENLIELLKENGFIDDYTILSETGNRTTFETCRLRAKAATEEISLKEFARVLLMINKKRGYKSSRKAKSTEEGQLIDGMEIAKRLYEENLTPSQLSLQLLESGKKYLPEFYRSDLLSEFNMLWDAQKQYYPELMTNELKEELQGKNKTQTWAVFAKYAHIVGVKRTTKGYELKKENYQWRCVALSEKLDLEQLAVVLQEINGQINNASGYLGNISDRSKELYFNKQTVGQYQMAQLDKNPNYSLKNQVFYRQDYLNEFETIWETQAKYHHELTRELKKEIRDIVIFYQRPLKSQKGLISFCEFESRRIEVEIDGKKKTKTIGLRVCPKSSPLFQEFKIWQILNNIQVISETEGKRFLYQEEKEKLFVELSYKEKMSKSEVIKLLYSNQKGIDLNYKDLEGNKTQAALFKVYQTIIEMSGHGEYDFSKIPAAKAVEIVTEVFACLGFNTDILKFNASLEGKAFEQQPMFKLWHLLYSYEGDKSELGNQKLIEKISEKYGFEKEYATVLAGVVFQDDYSSLSSKAIRKILPHMKDGLEYSVACEYAGYRYSKNSLTKEEIANKVLKNKLELLPRNSLRNHVVEKILNQMVNVVNAIIDEYGKPDEIRIELARELKKSAKEREELTKSINQNTRLHEEYVKMLQAEPYNLIHVSHNDIVRYKLYEELKLNGYKTLYSNTYIPREKLFSKDFDIEHIIPQAKLFDDSFSNKTLEVRQVNIEKGNATALDFVGEKYGENGMIDYKSRVDNLFKNNVISKTKYEKLLMKEADIPSGFINRDLRDSQYIAKKAQEMLNELVQYVVPTTGSVTDRLREDWQLVDVMQELNWDKYNQLGLTEIIEGRDGQRIRRIKEWTKRNDHRHHAIDALTIAFTKRSYIQYLNNLNARIQKGVDEYFDLDMVELSDLNKEDRSSAIYGIEKKELYRDNHGKLRFKSPMPLEEFRAEAKKQLENTLVSIKAKNKVVTQNVNVSKKKVGNNKKIQLTPRGQLHLETVYGSMKKTVVKGNKISFETVYTIRKEVSPDLKIDKVVDAHIRQILQSRLDEYNGDAKKAFSNLEENPIWLNKDKGIAIKRVTITGINNAVPLHDKHDKDGNLILDVNGNTQPVDFVSTGNNHHVAVYRKPKLDKNGHQLFSVDGKPLYDFDETAISFYEATSRAIQGLPIIDKDYRTKEGWQFLYTLKQNEYFVLPRYDEQGNMVFNPLEYDETWYKNPDNYSEISPNLFRVQSISRVTYGNSVVRDYIFRHHLETTVTSKLKGVTYQQFKSLSFVPWIIKVRINHIGNIVSIGEY

SEQ ID NO: 4188 - protein, 1425 aa, unidentified
  REGION 1..1425: note = Description of Unknown: Cas Enzyme sequence
MTKILAFDPGTNSLGMVFRDTMNDNLMEQITSGVDIIRDNTERDKRGRHSSAASQRRSFRNARTRYRSVKRRKQATLKLLIKHNCCPLDMESLNKWRFDDDEKGYDRTFPVHNEEFMKWINFKFIIDGEEVKSVYRLREILVTKPLDFSKPESWLMLGRAIYSIAVRRGFKSSRLANSEINDEENEEGVDLQKSEEELFSGLDQYMKEHNCKTVGAAFARMERVDKIRIRANNDYKPIRSKLKEEIEEIFKVQKRDTDSELYKGLMSEKKHEGTIFYKNPLKSQKGKVEYCTLEPRRRRCPKSHPANEFNTAWQLLNNIKIKRNGLWENITLDIRHKIFNELFVSKEKHFDFVKIREMLQNEYQIQLEYKESINYSDNKSIHGCPIIYYLQKILGPSWETERIPGTNKHLKHAQRRKKLFNKEDKRSIEEYTEAEGHLTEYTYEDIWHICYESDEKQFVKDLAKNVLCLSPSKVISMGALWEAIQDGYAKLSLCALKKINPFLAKGYKYSDAVMLANLPTIMGDTFFQQNEQEIIGLMDKERAAILSKNRIYDITNKLISDYKSLKLEGFAFAERADHDYILQDDDIENVKKACAENFGKEWDALTDNQQSAITTHVKELYQKFFFSKERDYCKRINLADAVKAALAKKYPFLTKKKLKKLYHHSDNSYYPAAHTNGNGILQLGNPARGNLKNPTVLKVLYKIKENVNKLLISGDIDADTIIVIENAREGLNDFNMRWAIEEYEKKREKENKVIEDALTDLAKEFHLTLPKGCVSVARLALYQNRDFTPYNPNEPRRLYDKLCENYKLWLRQGFFDFYTGHPITLAQLFSPDNLVEVDHILPVSKSFDDSISNKVLSSTRYNRTIKGTKLPCELPNYNIDTADGTPIIHRIQDIERKVKYLENKVIYWKGRSSRAANPESKNWAIKQCHLWQMEYDEWNQLLTNLTTREITPSFRHNQLNDTRIISKYAYHYLKSVFGRVVVQRGETTAVFRKIFGFQEVYEKKDRSRHTHHAIDALTLSLIPYGPRRERMMELWYQIQESHRFEDYDTERQLKDKLDREVSLCGLGNYSPTEIVKYIEKTTLVRNDATNNALTKNIKRFRVRGKVVPLRDKDGNVIYEKTSKGVKRVKAKYVSQGNSIRGAIHDQSFYGKIEKWKNGKNHEIEEVFVIRKKIEFKSGDKGKGFKSWDDLKAQMVDKKLFDKFEEKEKDFKKACDEGIHICIAENGERRMVRVRRVRCIAKKAQPLKKHIFQPRNDNKERFYYVSSHGEAYGIFEYRSDEGKILYESDSLFTLSTKMKNGEMKEIPCPQHIIRTGKRFIHTRTIRKGDSILIYPETEKPEDQYKLNTAILSNRLYRVDSIELDKRINLVRHFRGSMPKGKAIKKDADYNNLPEAIRPTLSDKLHFLLLGTDFDILNGKIVPLKND

SEQ ID NO: 4189 - protein, 1683 aa, unidentified
  REGION 1..1683: note = Description of Unknown: Cas Enzyme sequence
MKKILGLDLGTNSIGWALVEIDDVAKIVHLLGLGSRILSMDAGEISTFETGGKLPSTAALRTKDRSIRKLNERFLLRRDRIHCVLNLMKALPEHYKVEIDFETEKGFRNGKFKKGAEVKLAYTKDDVGKFHFMFMDSYSEMVEEFKTVHPNLFYRNMKRKGNESKIPFDWTLYYLRKKAIEKEITKEELAWIILSFNQKRGYEKTIGQDEKIQKEGELSETLIGKVKSVIKIGFKDSQALFEIVLVDENNNEIYRYKEESLFQITCIDDLKEVEIISKYDEEGSINTKNTVNIIKEIRNLKIEDVKYTDRKKAENTIFDVLLETGWIKEQQCKFLPKWKDTKRDFIIKTSYDIDGNRILKGSDKGRNINAPKDEDWTLMKLKTETTLSSFNTKNKTVGVASFIYSELLKNPRLKIKGDLVTVIERKYYREELEKIFNCQKEFHTELSNPELYLEAIKLLYPNNENHRNTLENYLHSDDILPFSKLITEDVILYQRDLKSKKHLISNCHYEKENFKKIDKRTGKEYQEPLKGIHKNNPLYQEFRIWQFIKRLKIIQLDSNENNEVLINQDISKIILKNDVKEKLFEFLNNREFITQAVLLKYLGLSEKEYKWNFEKEHKEPCNETRYNFILRLKRIKGFDWRGFLTTENEYRIWHFFYSVKKQDEFKKGIISLFNKLLINSQISITYKDDLVKNFSTFGGYPNDYGTYSEKALKKLLPFLRVGKYWDAKTVEKILLNTAHDIKEKVLSKEGINGEITDFQGLWISSACYLVYNRYSEVGDLQYWKTPYDIENFLQNEFKQHSLNNPVVERVLVETLQLVKEIWKYFGELDGIDEKSRPHFKKLFDRIHIELGREMKKNAKERAKVTKQNNDNKNTNDRIIELLKELYKENDEVRVKSPFQQEKLRILENDLLSSIEYDKDATSYSISNGNITKKEIKEITNKDILKISKGDFERYKLWLDQRYQSPYTGRFIKLSDLFNREKYEIEHIFPQERITLNALYNKVICETEVNKAKGALTGYQFILDCKGTKIINCAAHNKEITILNAEAYEKLVRSNFSDKRKQEILLSKDLPDEFTNSQLNNTRYISKMAMKLLSNVVREEGEDSFRSINVLPITGMITDKLKKDWLLNDAWNELIQPRFKRLNAITDSDLFGNEELINGHPVFINRVPEELSSNFDKKRIDHRHHSMDALVIALATENHVNYLNNIYSQDNKEDKQEQRIKIKNKITDKKKNSAGDKNRLFLPPAQYKQGDEVIKYTYVYKNVTNHIFKVVALEALQNTIVSFKQKSRIMKQRTNRYEEVNPKDGKLNLVSENNLKIRSNYNVRLALHKATFYGKVKLQQNTIQVNLTEALNHIDNIVDIELKKMIIDLKDNKKYSIEDIVNLLDSKNYKINIYEEFVASRFENYLENFASINSEKIISIIESVTDTGIQKILKKHLARYISEDENGKILQQPEIAFSFDGVKELNLNIKELNGGKDHKPIFKVRLKDAMGTKFPVSEIGQKSTKYVVTSPGSNTYCGIYENTKGERKYIIPTLKETIENLIQGNPPCLNKIFDELTLEDFKLLFILSPNDLVYVPTEDEIKNLSLINIQIFDKEQINRIYKFTDGSGTTLNFVPYSISNLIYALPKKDAIKLKEKYNLISDKVLQNELGLGSPQSKNQNTMDGIQIKSVCLKLIVDRLGNFKL

SEQ ID NO: 4190 - protein, 1459 aa, unidentified
  REGION 1..1459: note = Description of Unknown: Cas Enzyme sequence
MKYIKYILGLDIGSNSIGWALIQLDLLQKTKRIIAAGSRIIPMDQKVLSDFGKGITISSTAQRTSYRNARHCRERHLLRRERLHRVLHILDFLPAHYDKQIDFSKKYGKFVDNTEPKIAYNEGKFLFMDSFQEMLADFKIHQPDLFYTKRNGEESKIPYDWTIYYLRKKALSRKISKEELAWIILNFNQKRGYYQLREEEENKENDFEIISSKIISVIKKDKDKKYNKYWYDIILENGLVYQAAFYNDFVYNWINQDREFIIERTSLKNGTEKVKLSYLPTFDEIDKMDKKEQDKYYKKIKIKTENSIGNKTVGCYIYDHILQNPNEKIKGKLVRTIERKYYKEELKAILEKQIALQPELFTDQLLADCIRELYSKNETQQRNLAARDFVHLFVEDIIFYQRPLRSQKSTIANCSLESRFYIDKDSHTRKEAPLKVCPKSNPYYQEFRVLQWLQNLKIYEIDTDQEVTHEFIKTLEDKQQLFDFLMDQKEIDCEELLKYFLNQTYPNAKEKALKSELKKWKDTYRWNYVYDIGEKSSKKYPMNETRYELKRYLEKVANLPDDFLSSEVEYLLWHLIYSVTDKIAYEKGLKKFAQRHHLDEDCFVENFKKFKPYPSEYGSFSEKAIRKLLPLMRFGYHWNFDSIDKDTQKRIEDLITGVENDEIRTIIREKAEKYQLEKETDFQGLPLWLAQYIVYNRHAEASSLEKWTSVNDLETYLNNFKQHSLRNPIVEQVVTETLRVVRDIWQQYGQGKADFFDEIHIELGRELKKTAKEREELSKQNQKNEDTNLRIKALLAELKEDNSIENVRPYSPLQQELLKIYEEGVFSSSMEIEDDIEKIHKKASPSKTELQRYKLWLEQKYKSPYTGQIISLKRLFTEDYEIEHIIPQSRYYDDSLSNKVICESAVNKLKGNQLGLEFIKNHYGEKVRIADKEVSIFTEEQYKEFVKNHYANNSGKLKKLLLEDIPEKMVARQMNDTRYISKYISEILSKIVRSSERDEGVNSKNVILCTGKITSALKQDWGVNDVWNDLILPRFERMNALTQSTLFTTYNERYQKYLPTVPMEYSNGFQKKRIDHRHHAMDAIIIACATREHINYINNQHALEKGKNKEEKQESRIDLRTILCEKKYNDNAEENYNWIFKKTWDTFTQEVRAALEGIVVSFKQNLRVINKATNYYERWVEENGKLIKKIVKQEGTNWAIRKPLHKETVSGKITLEREKVSKGKILTATRKAIDSTFTEKVIEGITDTGIQKILLNYLKFKKNRELAFSPEGLEELNKNIMLYNDGKPHKPIYKVRIFEQGSKFPLGEVGNKATKYVEAAKGTNLYFGIYQGKDKRSFATIPLNEVIERQKQGLSSVPEYNEKGDPLLFNLSPNDLVYVPIEGEIIEDIDFRNLSKEQKERIYKIVSFTKGRVYGIPNRVAISIVNKMEYTQLNKIEFIKEKEVCIKLKVDRLGNISKA

SEQ ID NO: 4191 - protein, 1425 aa, unidentified
  REGION 1..1425: note = Description of Unknown: Cas Enzyme sequence
MKYIKYILGLDIGSNSIGWALIQLDLLQKTKRIIAAGSRIIPMDQKVLSDFGKGITISSTAQRTSYRNARHCRERHLLRRERLHRVLHILDFLPAHYDKQIDFSKKYGKFVDNTEPKIAYNEGKFLFMDSFQEMLADFKIHQPDLFYTKRNGEESKIPYDWTIYYLRKKALSRKISKEELAWIILNFNQKRGYYQLREEEENKENDFEIISSKIISVIKKDKDKKYNKYWYDIILENGLVYQAAFYNDFVYNWINQDREFIIERTSLKNGTEKVKLSYLPTFDEIDKMDKKEQDKYYKKIKIKTENSIGNKTVGCYIYDHILQNPNEKIKGKLVRTIERKYYKEELKAILEKQIALQPQLFTDQLLADCIRELYSKNEAQQRNLAARDFVHLFVEDIIFYQRPLRRQKSTIANCSLESRFYIDKDSHTRKEAPLKVCPKSNPYYQEFRVLQWFQNLKIYEIDTDREVTHEFIKTLEDKQQLFDFLMDQKEIDCEELLKYFLNHTYPNAKEKALKSELKKWKETYRWNYVYDMGEKSSKKYPMNETRYELGRYLEKVTNLPEHFLTKEIEYQLWHLIYSVTDKIAYEKGLKKFAQRHHLDEDSFVENFKKFKPYPSEYGSFSEKAIRKLLPLMRFGSHWNFDSIDKDTQKRIEDLITGVENDEIRTILREKAEKYQLEKETDFQGLPLWLAQYIVYNRHAEASSLEKWTSVNDLETYLNNFKQHSLRNPIVEQVVTETLRVVRDIWQQYGQGKADFFDKIHIELGRELKKTAKEREELSKQNQKNEDTNLYIKEKLKELEKYNTRAYSITHQEKYKLWLEQKHISPYTGQIISLENLFTDNYEIEHIIPQSRFFDDSLSNKVVCESIVNKAPYKDRQLGLEFIKNQGGRIVKELSKENKTIKIFTEKQYRTFIKEHYSNNPAKTKKLLLEEIPEKMVARQMNDTRYISKFISEILSKIVRSDEQDEGVHSKNVILCTGKITSILRQDWGLNDVWDNLILPRFERMDNLLQKEKFTIYSIEKQKKIPVVPINDQFKSFQKKRIDHRHHALDAIIIACVTGEHINYINNQHALEKGKDKKEKQKEHDKLREKLCIKKYNKGSEENYSWIFKKPWNTFTQEVRATLEGMVVSFKQNLRVINKATNYYERWVEENGKYIKKMVKQEGTNWAIRKPMHEETISGKIYLDREKITKNDILTATRKTVDSSFDEKRIKKITDTGIQKILLNYLEYKRSPEIAFSPEGLEELNKNLSIYNDGKPHKPIYKVRIYEKGSGRFALGEKGRKYKKYVQGAPNLYFGIYQGKDKRSFATIPLNEVIERQKQGQSSVPEYNEKGDPLLFNLSPNDLVYVPIEGEIIEDINFRNLSNEQKERIYKIVSFTKGRIYGIPNRVAISIVNKMEYTQLNKIEFIKEKEVCIKLKVDRLGNISKA

SEQ ID NO: 4192 - protein, 1457 aa, unidentified
  REGION 1..1457: note = Description of Unknown: Cas Enzyme sequence
MKRILGLDLGSNSIGWGLIEQDFGQREGKIIATGSRIIPMDQGLLGDFEKGNTVSQTAERTFYRSARKLRARHLLRRERLHRVLHILGFLPTHYDKQIDFSKRYGKFVDNTEPKLAYEEGRFLFMDSFQEMLSDFKSHQPTLFYSKKKGEESKIPYDWTIYYLRKKALSQKISKEELAWIILNFNQKRGYYQLRGEEEVENPNKEVTYYSLMVTEVTAEAPNKKGEIWYSIQLEKGWVYRRTSKIPLDDWKGKVRDFIVTTELEEDGSVKRDKDGKEKRSFRAPSEDDWNLLKKKTEQDINTSKKTVGTYIYDHLLQNPNEKIKGKLVRTIERKYYKEELKAILEKQIALQPELFTDQLFADCIRELYSKNEAQQRNLAARDFVHLFVEDIIFYQRPLRSQKSTLANCSLESRSYIDKDNHTRKEAPLKVCSKSNPYYQEFRVLQWLQNLKIYEIDSDQEVTHQFIKTLKDKQQLFEFLMAQKEIDCEELLKYFLSLTYPNAKEKALKSKLKKWKDTYRWNYVYDIGEKSSKKYPMNETRYELKRYLEKVTNLPDDFLSPEVEYLLWHLIYSVTDKVAYEKGLKKFAQKHHLDEDSFVESFKKFKPYPSEYGSFSEKAIRKLLPLMRFGSYWDFNHIDKNTQKRIEDLITGVENEEIRTILREKAEKYQLEKETDFQDLPLWLAQYIVYNRHAEASSLEKWTSVNDLETYLNEFKQHSLRNPIVEQVVTETLRVVRDIWQQYGQGEADFFDEIHIELGRELKKTAKEREELSKQNQKNEDTNLRIRALLAELGEDSTIENVRPYSPLQQELLKLYEEGVFSSSMEIEDDIEKIHKKATPNKTELQRYKSWLEQKYKSPYTGQIISLKRLFTEDYEIEHIIPQSRYYDDSLSNKVICESAVNKLKGNQLGLEFIKNHYGEKVHAAGKEVSILTEEQYKEFVKNHYANNSGKMKKLLLEDILEKMVARQMNDTRYISKYISEILSKIVRSGERDEGVNSKNVILCTGKITSALKQDWGVNDVWNDLILPRFERMNDLTQSTLFTTYNEKYQKYLPTVPMEYSNGFQKKRIDHRHHAMDAIIIACATREHINYINNQHALEKGKNKEEKQKSRIDLRTILCEKKYSDNAEENYSWIFKKPWDTFTQEVRSALEGIVVSFKQNLRVINKATNYYEHWVEENGKFIKKMVKQEGTNWAIRKPLHKETVSGKITLEREKVSKGKILTATRKAIDSTFTEKVIEGITDTGIQKILLNYLKFKKSPEIAFSPEGIEELNKNIALYNDGKPHKPIRKVRIFEQGSKFPLGEVGNKATKYVEAAKGTNLYFGVYQGKDKRSFATIPLNEVIERQKQGLSSVPEYNEKGDPLLFSLSPNDLVYVSIEGEIIEDIDFRNLSNEQKERIYKTVSFSGYQCFFVKQTVSTPIVNKMEYSPLNKMEKSIIGIMIKEVCAKLKVDRLGNISKA

SEQ ID NO: 4193 - protein, 1456 aa, unidentified
  REGION 1..1456: note = Description of Unknown: Cas Enzyme sequence
MKHIKYILGLDIGSNSIGWALIQLFIEEKQGKIIATGSRIIPMDQGLLGDFEKGNSVSQTAERTFYRSTRKLRQRHLLRRERLHRVLHILGFLPPHYDKQIDFSKRYGKFVDNTEPKLTYEEGRFLFMDSFQEMLSDFKSHQPTLFYTKKKGEESKIPYDWTIYYLRKKALSQKISKEELAWIILNFNQKRGYYQLRGEEEVENPNKEVTYYSLMVTEVTAEAPNKKGEIWYSIQLENGWVYRRTSKIPLDDWKGKVRDFIVTTELEEDGSVKRDKDGKEKRSFRAPSEDDWNLLKKKTEQDINTSKKTVGTYIYDHLLQNPNEKIKGKLVRTIERKYYKEELKAILEKQIALQPELFTDQLFADSIRELYSKNEAQQRNLAARDFVHLFVEDIIFYQRPLRSQKSTIANCSLESRSYIDKDSHTRKEAPLKVCSKSNPYYQEFRVLQWLQNLKIYEIDSDQEVTHQFIKTLEDKQQLFEFLMALKEIDCEELLKYFLSLTYPNAKEKALKSELKKWKDTYRWNYVYDIGEKSSKKYPMNETRYEFKRYLEKVANLPDDFLSPEVEYLLWHLIYSVTDKVAYEKGLKKFAQKHHLDEDSFVESFKKFKPYPSEYGSFSEKAIRKLLPLMRFGSYWDFNHIDKNTQKRIDDLITGVENEEIRTILREKAEKYQLEKETDFQDLPLWLAQYIVYNRHAEASSLEKWTSVNDLETYLNEFKQHSLRNPIVEQVVTETLRVVRDIWQQYGQGQADFFDEIHIELGRELKKTAKEREELSKQNQKNEDTNLRIRALLAELGEDSTIENVRPYSLMQQELLKLYEEGVFSSSMEIEDDIEKIHKKATPSKAELQRYKLWLEQKYKSPYTGQIISLKRLFTEDYEIEHIIPQSRYYDDSLSNKVICESAVNKLKGNQLGLEFIKNHYGEKVHTAGKEVSILTEEQYKEFVKNHYTNNSGKMKKLLLEDIPEKMVARQMNDTRYISKYISEILSKIVRSGERDEGVNSKNVILCTGKITSALKQDWGVNDVWNDLILPRFERMNALTQSTLFTTYNEKFQKYLPTVPMEYSNGFQKKRIDHRHHAMDAIIIACATREHINYINNQHALEKGKNKEEKQKSRIDLRTILCEKKYNDNAEENYSWIFKKPWDTFTQEVRAALEGIVVSFKQNLRVINKATNYYEHWVEENGKFIKKMVKQEGTNWAIRKPLHKETVSGKITLEREKVSKGKILTATRKAIDSTFTEKVIEGITDTEIQKILLNYLKFKKSPEIAFSPEGIEELNKNIALYNDGKPHKPIRKVRIFEQGSKFPLGEVGNKTTKYVEAAKGTNLYFGVYQGKDKRSFATIPLNEVIERQKQGRSSVPEYNEKEDPLLFSLSPNDLVYVPVEGEIIEDIDFQNLSNEQKERIYKIVSFTKGRVYGIPYKVAISIVNKLEYTQLNKIEFIKEKEVCIKLKVDRLGNISKA

SEQ ID NO: 4194 - protein, 1437 aa, unidentified
  REGION 1..1437: note = Description of Unknown: Cas Enzyme sequence
MKYIKYILGLDIGSNSIGWALIQLDLLQKTKRIIAAGSRIIPMDHKVLSDFGKGITISPTAQRTSYRNARHCRERHLLRRERLHRVLHILGFLPSHYDKQIDFSKRYGKFVDNTEPKIAYNEGKFLFMDSFQEMLADFKIHQPDLFYTKKNGEESKIPYDWTIYYLRKKALSRKISKEELAWIILNFNQKRGYYQLREEEEENKENDFEIISSKIISVIKKDKDKKYNKYWYDIILENGLVYQAAFYNDFVYNWINQDREFIIERTSLKNGTEKVKLSYLPTFDEIDKMDKKEQDKYYKKIKIKTENSIGNKTVGCYIYDHILQNPNEKIKGKLVRTIERKYYKEELKAILEKQVALQPELFTDQLFADCIRELYSKNEAQQRNLAARDFVHLFVEDIIFYQRSLRRQKSTLANCSLESRSYIDKDSHTRKEVPLKVCPKSNPYYQEFRVLQWLQNLKIYEIDTDQEVTHEFIKTLEDKQQLFDFLMNQKEIDCEELLKYFLNQTYPNAREKALKSELKKWKDTYRWNYVYDIGEKSSKKYPMNETRYELKRHLEKVANLPDDFLSSEVEYLLWHLIYSVKDKVAYEKGLKKFAQKHHLDKDSFVESFKKFKPYPSEYGSFSEKAIRKLLPLMRFGAYWDFNHIDKNTQKRIEDLITGVENEEIRTILREKAEKYQLEKETDFQDLPLWLAQYIVYNRHAEASSLEKWTSVNDLETYLNEFKQHSLRNPIVEQVVMETLRVVRDIWQQYGQGQASFFDEIHIELGRELKKTAKEREKLSKQNQKNEDINLSIKEKLKELKKYNTRAYSITHQEKYKLWLEQKHISPYTGQIISPENLFTDNYEIEHIIPQSRFFDDSLSNKVVCESIVNKAPYKDRQLGLEFIKNQGGRIVKELSKENKTIKIFTEEQYRTFIKEHYSNNPEKTKKLLLEEIPEKMVARQMNDTCYISKFISEILSKIVRSDEQDEGVHSKNVILCTGKITSILRQDWGLNDIWDNLILPRFERMNNLLQKEKFTIYSIEKQKKIPVVPINDQFKSFQKKRIDHRHHALDAIIIACVTGEHINYINNQHTLEKGKDKKEKQKEHDKLREKLCIKKYNKGSEENYSWIFKKPWAHFTQEVRTALEGIVVSFKQNLRVINKATNYYERWVEENGRYIKKMVKQEGTNWAIQKPLHEETISGKIYLDREKITKNDILTATRKTVDSSFDEKRIKKITDTGIQKILLNYLKYKGSPEIAFSPEGLEELNKNLSIYNDGKPHKPIYKVRIYEKGSGRFALGEKGRKYKKYVQGAPNLYFGIYQGKDKRSFATIPLNEVIERQKQGRPSVPEYNEKGAPLLFSLSPNDLVYVPVEGENIEDIDFQNLSKEQKERIYKTVSFTGNECYFIKSNIASLIKNYDAKTRIGELESKNKLEVTICSRIRIKEVCIKLKVDRLGNISKA

SEQ ID NO: 4195 - protein, 1438 aa, unidentified
  REGION 1..1438: note = Description of Unknown: Cas Enzyme sequence
MRHILGLDLGITSTGFCHIIEDENMKNSTIEEIGVRIIQLDNFVSTKTGEDSKDPSKDFSAGKGISSNAGRTQKRRARINLDRYQLRRKQLIELSLQAGLITSSTILAEDGKNTTHSTWQLRAKAAVERIEKDELVRVFLAINKKRGYKSSRKVKNKDDGQIIDGMAIAKRLYDENLTPGQLVLQLLKEKKKQLPDFYHSDLQREFDLIWNFQKEFYPNILTNDLYKALQGKNKTDSSSIFYNYYHFNTAENKGTKEQMRLQAYRWRVDALSKKLSKEEVAYVLVEINSNLNNSSNYLGNISDRSKELYFNKQTIGQFLYTKLKEDRHYSLKNKVFYRQDYLDEFERIWEAQAIFHKELTGDLKKQIRDTIIFYQRRLKSQKGLISLCEFENKEITIEKEGKTVTKQIGVRVIPKSSPLFQEFKIWQILNNVVCKKKGTRKKKAVTPAPLLFELFGTPSETFFSLDMECKQLLFEELNLKGNLKADKVIRLLGYIPQEWEINYNQLEGNRTQKSLYEAYLKIIEIEGYDIKTFLRIKSDKEDWDLEETPLSAKEIRENIQHIFETLGISTAILYFDATLPIKDFEKQASYQLWHLLYSYESDNSPSGNETLYKLLQDKFGFKREHAVFLSNISFQNDYGSLSAKAIRKIYPYIKENQYSTACELAGYRLSKLSLTKEELNNRPLKDLISPLKKNSLRNPVVEKGLNQMINVVNALIEKNSEKDAEGNIIKYFHFDEIRIELARELKKNAQERAEMTLNIKNATIEQEKIKRLLISDFGIKNPTKNDITRYRLYQELAHNGYKDLYTNTYIPKELLFSKNIDIEHIVPKARVFDDSFSNKTLAYRDFNLKKGENTAFDFIDSSLGEEELNQYITRVENAFKAKKISATKYKNLLKKATEINDGFINRDLRETQYIAKKAKELLFQITRSVVSTSGSITDRLREDWGLIDIMKELNMPKYRDLGLTEIIERRDGRKVEVIKDWTKRNDHRHHAMDALTVAFTKPSYIQYLNHLNARKDENNKLYADILGIERKETTKIHDENGNEKRVFIEPIPGFRQIAKKYLEEILISHKTKNKVVTKSINKIAGTNKKQETLTPRGQLHKETIYGKYHYYSNKEEKIGTKFDKETISKVSNPLYRKALLKRLQANDNDPKKAFTGKNALSKKPIYLDEAKTKTLPEKVNITYLEEDFSIRKDISPDNFKDLKSIEKVIDQGIKRILIKRLQAYDNDPKKAFADLDKNPIWLNKEKGISIKRVTISGVKNTQALHSKKDHLGKPILDKEGQEIPVDFISTGNNHHVAIYRDKEGNLQEQIVSFFEAVVRAQQGLPIIDKTYKQEEGWQFLFTMKQNEMFVFPNEITGFNPSEIDLLDPKNKKLISPNLFRVQKIATKDYFFRHHLETNVETDNVLKNTTWKREGLSGLKDIVKVRINHLGDIVSIGEY

SEQ ID NO: 4196 - protein, 1437 aa, unidentified
  REGION 1..1437: note = Description of Unknown: Cas Enzyme sequence
MKYIKYILGLDIGSNSIGWALIQLDLLQKTKRIIATGSRIIPMDQKVLSDFGKGITISPTAQRTSYRNARHCRERHLLRRERLHRVLHILGFLPTHYDKQIDFSKRYGKFVDNTEPKIAYNERKFLFMDSFQEMLADFKIHQPDLFYTKKNGEESKIPYDWTIYYLRKKALSRKISKEELAWIILNFNQKRGYYQLREEEEENKENDFEIISSKIISVIKKDKDKKYNKYWYDIILENGLVYQAAFYNDFVYNWINQDREFIIERISLKNGTEKVKLSYLPTFDEIDKMDKKEQDKYYKKIKIKTENSIGNKTVGCYIYDHILQNPNEKIKGKLVRTIERKYYKEELKAILEKQVALQPELFTDQLFADCIRELYSKNEAQQRNLAARDFVHLFVEDIIFYQRSLRRQKSTLANCSLESRSYIDKDSHTRKEAPLKVCPKSNPYYQEFRVLQWLQNLKIYEIDTDQEVTHEFIKTLEDKQQFFDFLMNQKEIDCEELLKYFLNQTYPNAREKALKSELKKWKDTYRWNYVYDIGEKSSKKYPMNETRYELKRHLEKVANLPDDFLSSEVEYLLWHLIYSVKDKVAYEKGLKTFAQKHHLDKDSFVESFKKFKPYPSEYGSFSEKAIRKLLPLMRFGSYWDFNHIDKNTQKRIEDLITGVENEEIRTILREKAEKYQLEKETDFQDLPLWLAQYIVYNRHAEASSLEKWTSVNDLETYLNEFKQYSLRNPIVEQVVMETLRVVRDIWQQYGQGQASFFDEIHIELGRELKKTAKEREKLSKQNQKNEDINLSIKEKLKELEKYNTRAYSITHQEKYKLWLEQKHISPYTGQIISPENLFTDNYEIEHIIPQSRFFDDSLSNKVVCESIVNKAPYKDRQLGLEFIKNQGGRIVKELSTENKTIKIFTEEQYRTFIKEHYSNNPEKTKKLLLEEIPEKMVARQMNDTCYISKFISEILSKIVRSDEQDEGVHSKNVILCTGKITSALKQDWGVNDVWNDLILPRFERMNDLTQSTLFTTYNEKYQKYLPTVPMEYSNGFQKKRIDHRHHAMDAIIIACATREHINYINNQHALEKGKDKKEKQKEHDKLREKLCIKKDNKGSEENYSWIFKKPWDTFTQEVQAALEGIVVSFKQNLRVINKATNYYERWVEENGKYIKKMVKQEGTNWAIRKPLHEETISGKIYLDREEITKNDILTATRKTVDSSFDEKRIKKITDTGIQKILLNYLKYKGSPEIAFSPEGLEELNKNLSIYNDGKPHKPIYKVRIYEKGSGRFALGEKGRKYKKYVQGAPNLYFGIYQGANKRSFATIPLNEVIERQKQGRPSIPEYNEKGDPLLFSLSPNDLVYVPVEGEIIEDIDFQNLSKEQKERIYNVNDFSSTCYFTPNRIAKAIFPKEVDLQRKGDKLPGSYDTKTASLEGIQIKEVCIKLKIDRLGNISKA

SEQ ID NO: 4197 - protein, 1432 aa, unidentified
  REGION 1..1432: note = Description of Unknown: Cas Enzyme sequence
MKNILGLDLGTTSIGFAHIVEDENKEKSEIKELGVRIVSLTTDEQSDFEKGKSITTNANRTLKHGARLNLDRYQQRRKYLIDLLQKANLITSSSILAENGKNTTHSTWQLRAKAVTERVEKEEFARILLAINKKRGYKSSRKVKTEDEGQAIDGMAIAKRLYDENLTPGQLSLQLLQQNKKLLPDFYRSDLQKEFDLVWNFQKQFYPDILTNTFYKELQGKGKDATSKAFSKKYHFDIAENKGSKESVRLQAYQWRAEAISKQLSKEEVAYVLTEINNNLNNASGYLGAISDRSKELYFNRQTVGQYLYAQLQENRHNSLKNKVFYRQDYLDEFERIWETQASFHKELTEELKKQIRDVVIFYQRKLKSQKGLISFCEFESKEIEIEKDGKTITKSIGARVVPKSSPLFQEFKIWQILNNVICKRKGIRKKKISAKTTQLDLLNESSQTIFSLDMECKQLLFDELNLKGDLKSDKVLKLLGYSPQEWEINYNQLEGNCTQKALYEAYLKIVEMEAHDVKDILQIKSAKDDWSLDESPLSASEIKEKVKDIFQALGICTKILYFDPLLPVKEFEEQDSYQLWHLLYSYESDDSTSGNETLYRILEKKYAFKREHARILANVALQDDYGNLSTKAIRKIYPYIKENQYSTACEKAGYKHSKLSLTKEELEARELKNIIPLLKKNALRNPVVEKILNQMINVVNALIEKNSERDAEGKITKYFHFDEIRIELARELKKNAQERYEMTQNINKAKSEHQKISEILQKEFGIKNPTKSDIIRYRLYQELEHNGYKELYTNARIDRDMLFSKNIEIEHIVPKARVFDDSFSNKTLTFQRINSDKGEYTAFDYITSLNSEEELNQYLTRVKNAYKTKSISPTKYKNLLKKASEIGDGFINRDLRDTQYIAKKAKEILFQVTKNVMSTSGSITDRLREDWGLVDVMKELNMPKYQSLGLTEVEERKDGNKVTVIKNWTKRNDHRHQAMDALTVAFTKPSYIQYLNHLNARKDENNKNYSVILAIEEKETIKVPTNNGKNKRVFIEPIPNFRQVAKKHLEEIFISHKAKNKVVTKNVNKPAGTDKQQITLTPRGQLHKETIYGKYQYYVNKEEKVGVKFNKETIAKVSNPLYREALLKRLQANGNDPKKAFTGKNALSKKPIYLDESKTKTLPEKVNLTYLEEDFSVRKKIVPKNPTSKEFVPNLKSIEKVVDEGVRNILIERLRVYNNDPEKAFVDLEKNPIWLNKEKGIAIKRVTISGVSNAQPLHIGKDHLGKTTLNKEGNEIPVDYVSTGNNHHVAIYRDKEGNLQEQIVSFFDAVVRAQQGLPIIDKTYKQAEGWQFLFTMKQNEMFVFPNATTGFNPAEIDLLDPKNKKLISPNLFRVQKIATKDYFFRHHLETNVETDNVLKNTTWKREGLSGLKDIVKVCINHLGDIVSIGEY

SEQ ID NO: 4198 - protein, 1439 aa, unidentified
  REGION 1..1439: note = Description of Unknown: Cas Enzyme sequence
MKYIKYILGLDIGSNSIGWALIQLDLLQKTKRIIATGSRIIPMDQKVLSDFGKGITISPTAQRTSYRNARHCRERHLLRRERLHRVLHILGFLPTHYDKQIDFSKRYGKFVDNTEPKIAYNERKFLFMDSFQEMLADFKIHQPDLFYTKKNGEESKIPYDWTIYYLRKKALSRKISKEELAWIILNFNQKRGYYQLREEEEENKENDFEIISSKIISVIKKDKDKKYNKYWYDIILENGLVYQAAFYNDFVYNWINQDREFIIERTSLKNGTEKVKLSYLPTFDEIDKMDKKEQDKYYKKIKIKTENSIGNKTVGCYIYDHILQNPNEKIKGKLVRTIERKYYKEELKAILEKQVALQPELFTDQLFADCIRELYNKNEAQQRNLAARDFVHLLVEDIIFYQRPLRSQKSTLANCSLESRSYIDKDSHTRKEVPLKVCPKSNPYYQEFRILQWLQNLKIYEIDTDQEVTHEFIKTLEDKQQLFDFLMDQKEIDYEELLKYFLNQTYPNAKEKALKSELKKWKDTYRWNYVYDIGEKSSKKYPMNETRYELKRHLEKVANLPDDFLSSEVEYLLWHLIYSVTDKVAYEKGLKKFAQKHHLDKDSFVESFKKFKPYPSEYGSFSEKAIRKLLPLMRFGAYWDFNHIDKNTQKRIEDLITGVENEEIRTILREKAEMYQLEKETDFQDLPLWLAQYIVYNRHAEASSLEKWTSVNDLETYLNEFKQHSLRNPIVEQVVTETLRVVRDIWQQYGQGQANFFDEIHIELGRELKKTAKEREELSKQNQKNEDTNLSIKEKLKELEKYNTRAYSITHQEKYKLWLEQKHISPYTGQIISPENLFTDNYEIEHIIPQSRFFDDSLSNKVVCESIVNKAPYKDRQLGLEFIKNQGGRIVKELSKENKTIKIFTEEQYRTFIKEHYSNNPEKTKKLLLEEIPEKMVARQMNDTCYISKFISEILSKIVRSDEQDEGVHSKNVILCTGKITSILRQDWGLNDVWDNLILPRFERMNNLLQKEKFTIYSIEKQKKIPVVPINDQFKSFQKKRIDHRHHALDAIIIACVTGEHINYINNQHALEKGKDKKEKQKEHDKLREKLCIKKHNKGSEENYSWIFKKPWAHFTQEVQAALEGIVVSFKQNLRVINKATNYYERWVEENGRYIKKIVKQEGTNWAIRKPLHEETISGKIYLDREKIAKNDILTATRKTVDSSFDDKRIKKITDTGIQKILLNYLKYKGSPEIAFSPEGLEELNKNITLYNDGKPHKPIRKVRIFEQGSKFPLGEVGNKATKYVEAAKGTNLYFGIYQGKDKRSFATIPLNEVIERQKQGRSSVPKYNEKGDPLLFSLSPNDLVYVPVEGEIIEDIDFQNLSNEQKERIYNVNDFSSTCYFTPNRIAKAIFPKEVDLQRKGDKLPGSYDTKTASLEGIQIKEVCIKLKVDRLGNISKA

SEQ ID NO: 4199 - protein, 1472 aa, unidentified
  REGION 1..1472: note = Description of Unknown: Cas Enzyme sequence
  MOD_RES 818..821: note = Any amino acid
MKRILGLDLGSNSIGWGLIEQDFQQKEGKIIASGSRIIPMDQGILGDFEKGNTVSQTAERTFYRSTRKLRQRHLLRRERLHRVLHILGFLPTHYDKQIDFSKRYGKFVDNTEPKLAYEEGRFLFMDSFQEMLSDFKSHQPTLFYSRKNGKESKIPYDWTIYYLRKKALSQKISKEELAWIILNFNQKRGYYQLRGEEEVENPNKEITYYSLMVTEVTAEAPNKKGEIWYSIQLENGWVYRRTSKIPLDDWKGKVRDFIVTSELEEDGSIKRDKEGKEKRSFRAPSEDDWNLLKKKTEQDINTSKKTVGTYIYDHILQNPNEKIKGKLVRTIERKYYKEELKAILEKQIALQPELFTDQLFADCIRELYSKNEAQQRNLAARDFIHLFVEDIIFYQRPLRSQKTTIANCSLESRFYIDKDSHTRKGAPLKVCSKSNPYYQEFRVLQWLQNLKIYEIESDQEVTHQFIKTLEDKQQLFEFLMNQKEIDCEELLKYFLNQTYPNAKEKALKSELKKWKDTYRWNYVYDIGEKSSKKYPMNETRYDLKRHLEKVANLPDDFLSSEVEYMLWHLIYSVTDKVAYEKGLKKFAQKHHLDEDSFVESFKKFKPYPSEYGSFSEKAIRKLLPLMRFGSYWDFNHIDKNTQKRIEDLITGVENEEIRTILREKAEKYQLEKETDFQNLPLWLAQYIAYNRHAEASSLEKWTSMNDLETYLNEFKQHSLRNPIVEQVVTETLRVVRDIWQQYGQGKADFFDEIHIELGRELKKTTKEREELSKQNQKNEDTNLRIKALLAELGEDSTIENVRPYSLMQQELLKLYEEXXXXLYEEGVFSSSMEIEDDIEKIHKKATPSKAELQRYKLWLEQKYKSPYTGQIISLKRLFTEDYEIEHIIPQSRYYDDSLSNKVICESAVNKLKGNQLGLEFIKNHYGEKVHAAGKEVSIFTEEQYKEFVKNHYTNNSGKMKKLLLEDIPEKMVARQMNDTRYISKYISEILSKIVRANERDEGVNSKNVILCTGKITTALKQDWGINDVWNDLILPRFERMNDLTQTSLFTSYNEKYQKYLPTVPMEYSNGFQKKRIDHRHHAMDAIIIACATREHINYINNQHALEKGKNKEEKQKSRIDLRTILCEKKYNDNAEENYNWIFKKPWDTFTQEVRAALEGIVVSFKQNLRVINKATNYYERWVEENGKLIKKMVKQEGTNWAIRKPLHKETVSGKITLEREKVSKGKILTATRKAIDSTFTEKVIQGITDTGIQKILLNYLKFKKSPEIAFSPEGLEELNKNISLYNDGKPHKPIRKVRIFEQGSKFPLGEVGNKATKYVEAAKGTNLYFGVYQGKDKRSFATIPLNEVIERQKQGLSSVPEYNEKGDPLLFSLSPNDLVYIPIEGEIIEDIDFQNLSNEQKERIYKAASFTRNECFFIKSSIAFLIKNYDAKTKIGELGSQNKLEVTICKGIRIKEVCIKLKVDRLGNISKA

SEQ ID NO: 4200 - protein, 1457 aa, unidentified
  REGION 1..1457: note = Description of Unknown: Cas Enzyme sequence
MKRILGLDLGSNSIGWGLIEQDFQQKQGRIIAAGSRIIPMDQGLLGDFEKGNTVSQTAERTFYRSARKLRERHLLRRERLHRVLHILGFLPTHYDKQINFSKKYGKFVSNTEPKIAYHNGKFLFMDNFQEMLADFKKHQPTLFYTKKNGEESKIPYDWTIYYLRKKALSQKISKEELAWIILNFNQKRGYYQLRGEEEAENPNKDIAYYSLIVTDVTAEAPNKKGEIWYSILLENGWVYRRTSKIPLDDWKGKSRDFIVSTELEDDGSVKRDKDGKEKRSFRAPDENDWNLLKKKTEQDINTSQKTVGCYIYDHLLQNPNEKIKGKLVRTIERKYYKEELKAILEKQVALQPELFTDQLFADCIRELYSKNAAQQRNLAARDFIHLFVEDIIFYQRPLRSQKSTIANCSLESRSYIDKDSHTRKEVSLKVCPKSNPYYQEFRVLQWLQNLKIYEIESDREVTHEFVKSMEDKQKLFDFLMTQKEIDCEELLRYFLTLTYPHAKEKALKSELKKWKETYRWNYVYDMGEKSSKKYPMNETRCELGRYLEKVTNLPEHFLTKEIEYQLWHLIYSVTDKIAYEKGLKKFAQRHHLDEDSFVENFKKFKPYPSEYGSFSEKAIRKLLSLMRFGSHWNFDSIDKDTQKRIEDLITEVENDEIRTIIREKAEKYQLEKETDFQGLPLWLAQYIVYNRHAEASSLEKWTSVNDLETYLNEFKQHSLRNPIVEQVVTETLRVVRDIWQQYGQGQADFFDEIHIELGRELKKTAKEREELSKQNQKNEDTNLRIKALLAELGEDNTIENVRPYSLMQQELLKIYEEGIFSSSMEIEDDIEKIHKKATPSKTELQRYKLWLEQKYKSPYTGQIISLKRLFTEDYEIEHIIPQSRYYDDSLSNKVICESAVNKLKGNQLGLEFIKNHYGEKVHAAGKEVSILTEEQYKEFVKNHYANNSGKMKKLLLEDIPEKMVARQMNDTRYISKYISEILSKIVRSSERDEGVNSKNVILCTGKITSALKQDWGVNDVWNDLILPRFERMNALTQSTLFTTYNEKFQKYLPTVPMEYSNGFQKKRIDHRHHAMDAIIIACATREHINYINNQHALEKGKSKQEKQKSRIDLRTILCEKKYNDNAEENYSWIFKKPWAHFTQEVRTALEGIVVSFKQNLRVINKATNYYECWVEENGRYIKKMVKQEGTNWAIRKPLHKETVSGKITLEREKVSKGKILTATRKAIDSTFTEKVIEGITDTGIQKILLNYLKFKKSPEIAFSPEGLEELNKNITLYNDGKPHKPIRKVRIFEQGSKFPLGEVGNKATKYVEAAKGTNLYFGIYQGKDKRSFATIPLNEVIERQKQGRPSVPEYNEKGDPLLFSLSPNDLVYVPVEGEIIEDIDFQNLSNEQKERIYKTVSFTGNQCFFVKQTVSASIVNKMEYSPLNKMERSITGIMVKEVCIKLKVDRLGNISKA

SEQ ID NO: 4201 - protein, 1545 aa, unidentified
  REGION 1..1545: note = Description of Unknown: Cas Enzyme sequence
MKKILGLDLGTNSIGWALIESDFDAKQGKILGLGSRIIPMDASIMGDFGKGNSVSQTADRTKYRGARRLYERDNLRRERLHRVLNVLGFMPEHYANDIDFEKRLGQFLDEKEPKIAWKKVWNEQKNKKEFVFVFQNSFNEMVDDFKARGLDIKIPYDWTIYYLRKKALTQKIEKEELAWLLLNFNQKRGYYQLRGEEEEENPNKLVEFHSLKIVDVVADEMPNSKGDIWYSLHLENGWIYRRSSKTPLFDWKDKVRDFIVTSDLNDDGTVKTDKEGAEKRSFRAPSEDDWTLLKKKTEADIDKSQKTVGTYIYEALLQKPTQKIRGKLVRTIERKFYKDELIAILKKQIELQPEIFTEDLYNDCVRELYRNNQAHQTSLSKQNCFVHLFVNDIIFYQRPLKSQKSSISNCTLEYRKYKSKDGNKIKEYLKAIPKSNPLYQEFRLWQWLYNLKIYLKDDDTDVTEQFIASVSDKENLFDFLNKQKKIEQKSLLKYFFGQKGFKGKQLNAEIEKYRWNYVEDKEYPCNETGSEVIKQLNKVEDVPADFLIPEIEQKLWHIIYSVTDKNEFEKALKTFANKHNLDEKSFVENFKKFPPFKSEYGSFSEKAIKKLLPLMRLGKYWNREVIDEKTKDRINKILTGEYDETIKNRVREKAIDLTSENDFQGLQLWLAQYIVYDRHSEAGNTDKWKTVADLEKYLEKFKQHSLRNPIVEQVITETLRVVRDIWKKYGGDFSEIHIELGREMKNTAEERKRLTNIVTENENTNLRIKALIMELKESADVENVRPYSPIQQEALKIYEEYALQNEEEYDGQDEETGKDKFISAVIPEDILKISKTAQPSKSELQRYKLWLEQKYRSPYTGQMIPLGKLFTEEYQIEHIIPKSRYFDDSLSNKVICESAVNQLKDKQLGFEFIKNHRGEIVECGMGKKVEIFSEDAYQTFVKEHYSKNYKKRNNLLLEDIPEKMIERQMNDTRYISKFVSQLLSNIVREETNDDDVNSKNVLPGNGKITSTLKQDWGLNDVWNDLILPRFERMNTLTNSNAFTAWNEQHQKFLPTVPLDLSKGFQKKRIDHRHHAVDALIIACATRDHINLLNNQSAKSQTTRYDLQNKLRNVEKWIDKDGKERDKFVEFKKPWDNFTVDARNELEKIVISFKQNLRVINKATNKYQKIKDDKKIKVKQEGINWAIRKPLHKDTIYGKVYLLNETKEMTLKKALEKVEQSKDVNIIVDKNIRERVKVHFANNNIDISSALKDSELKDISKIKVFEQNVATRYLNDLVSIFNGVTTVDKAKGVIEKITDTGIQKILLNHLIAKDNKPEIAFSLEGIEGMNKNIIALNNGKFHQPIYKVRVHQALGNKFQIGSTGNKKDKYVVAEAGTNLFFIVYEENGKRNYETVPLNEVIEYQKWRGTLTKEEQKTTPIVPIKEDRGHYLFHLSPNDLVYVPTEDEKENSRAIDWKNLDKEQLKRIYKFTDSSDTTANFVPANVANLIFNMNKTEQQKRGLNFNIQNEFGVGSPQSKNQRAITGEMVKDVCIKLNTDRLGNIKPL

SEQ ID NO: 4202 - protein, 1526 aa, unidentified
  REGION 1..1526: note = Description of Unknown: Cas Enzyme sequence
MKNILGLDLGTNSVGWALISVDENGKLVKKIRLGSRIIPMSQDVLGKFDSGVTVSQTAERTEYRSHRRLLERALLRRERLHRVLHLLGFLPEHYAACIGWDRNDNATYGKFLPKTEPKLAWRKADDGEYRFIFMQSFDEMLEDFKESQLSLLANGKRIPLDWTLYYLRNKALTKPIAKEELAWILLNFNQKRGYYQLRGEEDEEIPSKRVEYHELKVVKVEATDEGKGGNIWYNVLLENGWVYRRQSKYSLDKWLGQTLPFIVTTDFEADGVTPKCDKEGNVKRSFRSPKEDDWTLVKKRTEDHLEKSGLTVGAFIYQHLLATPSDKVRGQLVRTIDRKYYKRELQAIIAKQMEFHPELRDAQLLKACAEELYRNNEAHRAQLLAKDFKHLLVEDVLFYQRPLKSKKSLIANCPYETRQYINKETGEIKDVNLKCIAKSNPYFQEFRLWQWISNLRLLRQADGQDVTAAYIKGNEDKERLFDMLNSQGEIKQEHILRDFLKLKKPKGGEFPLRWNYVDDKIYPANETRHAMNKAIKGMAVDKEEKETLGQLLEQPAVEYMLWNLLYSITDRNELASALRRFALTHGVSSVDAFVESFLKVKPFKKEYGAYSEKATKKLLQVMRLGKYWCGDELPEPAKRTKGNKQAVYDEMANRGICKQTLQNISNIIEEDIDERLMGALLNPERPLTELSHFQGLSVSDACYVVYGRHSEVAEIVKWKDAGELNTFINNFKQHSMRNPIVEQCVLETLRTVRDVWEQEGQIDEIHVELGRNMKRTAEQRARDTQAIQRNENTNIRISLLLTELKNDPSISDVRPYSPSQRELLKIYEEGALENLTNQDEDIAKISRLAQPSASELRRYKLWLDQKYVSPYTGRPIPLAKLFTPAYEIEHIIPQSRYFDNSFSNKVICEADVNKLKANNLGMEFIKKFGGKTKGILDEETYKLHVTTNYAHNPTKRSKLLMEDLPTDFNSRQLNDTRYISKTVMALLSNVVREEGERETRSKHVVVCTGGVTDTLKKDWGLHDVWHNLVYPRFIRLNNLTGTQSFGYWRALDEENKKQGEDGKKVFQITLPPECQRGFVKKRIDHRHHAMDALVIACASANIVNYLNNQSAANPHIHENLQRLLCDRKRLIRKPWPTFTQDAQKALEDLVVSFKNTVRVVNKASNTYLRYDKDGKKKRFKQEGEGLKAIRKPMHKETYYGEVNLIRKEMLPLKRALDDVNAIVDKELRASIKGLLRDGFNLQQVLANFKAKDFKFNKRDIKKVEVYVSSAKSTPMVATRKSLDTSFNAKRIADITDTGIQKILLNYLKANDNSPEQAFTPEGIAYLNEHIAEYNNGKPHQPILKVRVSEIRGAKFAVGQTGSKKTKFVEAQSGTNLYFAIYEDKEGKRNFEMIALKMAAERLKTGQTPVPETNDAGLPLKFYLSPNDLVYVPTEEDHAAAHPSIDKRRIYKMVSATDRQCFFLPFTVASVISNTVEFETLNKMERVVDASEYSSAYDSSHVNKVMVKNVCWKLEVDRLGNITKIVR

SEQ ID NO: 4203 - protein, 1531 aa, unidentified
  REGION 1..1531: note = Description of Unknown: Cas Enzyme sequence
  MOD_RES 1008..1011: note = Any amino acid
MKNILGLDLGTNSVGWALISVDENGNLVKNIRLGSRIIPMSQDVLGKFDSGVTVSQTAERTEYRSHRRLLERALLRRERLHRVLHLLGFLPEHYAACIGWDRNDNVTYAKFLPETEPKLAWRKADDGEHRFIFMQSFDEMLEDFKESQPSLLANGKRIPLDWTLYYLRNKALTKPIAKEELAWILLNFNQKRGYYQLRGEEEEETPSKRVEYHELKVVKVEATDEGKGGNVWYNLLLENGWVYRRQSKYSLDKWLGQTLPFIVTTDLEADGITPKCDKEGNVKRSFRSPKEDDWTLVKKRTEDHLEKSGLTVGAFIYQHLLANPSDKVRGQLVRTIDRKYYKRELQAIIAKQMEFHPELRDAQLLKACAEELYRNNEAHRAQLLAKDFKHLLVEDVLFYQRPLKSKKSLIANCPYETRQYINKETGEIKDVNVKCIAKSNPYFQEFRLWQWISNLRLLRQADGQDVTAAYIKGNEDKERLFDLLNNQGEIKQEHILHDFLKLKKPKGGEFPLRWNYVDDKIYPANETRHAINKAIKGMAVDKEEKETLGQLLDQPAVGYMLWNLLYSITDRNELASALRRFALTHGVSSVDAFVESFLKVKPFKKEYGAYSEKATKKLLQVMQLGKYWCGDELPEPAKRTKGNKQAVYDEMAHRGICKQTLQNISNIIEEDIDERLMGALLNPERPLTELSHFQGLSVSDACYVVYGRHSEVAEITKWKDAGELNTFINNFKQHSMRNPIVEQCVLETLRTVRDVWEQEGQIDEIHVELGRNMKRTAEQRARDTQAIQRNENTNMRISLLLTELKNDPSISDVRPYSPSQRELLKIYEEGALENLTNQDEDIAKISRLAQPSSSELRRYKLWLDQKYVSPYTGRPIPLAKLFTPAYEIEHIIPQSRYFDNSFSNKVICEVEVNKLKANNLGMEFIKKFGGKTKGILDEEAYKLHVTTNYAHNPAKRSKLLMEDLPTDFNSRQLNDTRYISKTVMALLSNVVREEGERETRSKHVVVCXXXXCTGGVTDTLKKDWGLHDVWHNLVYPRFIRLNNLTGTQNFGYWRALDEEKRKQGEDSKKVFQITLPPECQRGFVKKRIDHRHHAMDALVIACASADIVNYLNNQSAANPNSREDLRRLVCDIKRRIRKPWPTFTQDAQAVLEDLVVSFKNTVRVVNKASNTYLRYDKDGKKKRFKQEGEGLKAIRKPMHKETYYGEVNLIRKEMLPLKRALEDVNGIVDKELRANIKALLRDGFNLQQVLANFKAKDFKFNKRDIKKVEVYVSSAKSTPMVATRKSLDTSFNAKRIADITDTGIQKILLNYLKANDNSPEQAFTPEGIAYLNEHIAEYNNGKPHQPILKVRVSEVKGAKFAVGQTGSKKDKFVEAQSGTNLYFAIYEDKEGKRHFETIALNVAAERLKMGQTPVPETNDAGLPLKFYLSPNDLVYVPTDEDRAAAHPSIDKRRIYKMVSATDRECYFLPFEVASIIYNKVEFESMNKMGRAIDMMEYSDNYDSSAINKLMIKDVCWKLEVDRLGNITKIVR

SEQ ID NO: 4204 - protein, 1543 aa, unidentified
  REGION 1..1543: note = Description of Unknown: Cas Enzyme sequence
MKKILGLDLGTNSIGWALVSTDESGNPYKIDGMNSRIIPMNQDVLDTFSGGKPLETQTAARTGYRGTRRLRERHLLRRERLHRVLNILGFLPEHYAKQIDFEKRLGQFFEEKEPKIVWEEDENGKFDFLFQKSFLEMVEDFKKSQPKLLENNNLIPYDWTIYYLRNKALQQKIEKEELAWIILNFNQKRGYYQLRGEEEEENPNKLVEYYALKVVDITANEPQKGKTDIWYNVVLENGWIYRRSSKNPLFDWVGKEKEFIVTTDLNDDGTIKIDKEGVEKRSFRAPSEDDWSLLKKKTEADIIKSRKTVGTYIYETLLSNPKQKIRGKLVRTIERKFYKDELKQILAKQIELQPKLFSDDLYNDCIRELYRNNEAHQLILSKRDFVHLFLSDIIFYQRPLRSQKSTIGNCTLEFRTYKDKDGKKITEYLKTIPKSNPLYQEFRVWQWLSNLKIYRKGDDEDVTSQFIKEIDDVVNLFEFLMLKKEVNHKDILQHFLTKEGFKGKYLNAEIAKYRWNYVFDNSKDKEEDKSKKYPCNTTGSEIRRRLEKVENVSENFFTPEIEQKLWHIIYSVTDKIEFETALKTFAEKHNLDVESFVENFKKFPPFKSEYGAFSEKAIKKLLPLMRLGKYWNEDDIKNSVIERANSIKCRLSSIDFDEKKIDTTSDDDIPKQVLKSFLKQANFTQGLQLYQASYLVYGRYSEADVAGKWNSVADLEAYLKEFKQHSLRNPIVEQIITETLRVVKDIWKEYGEGAKDFFDEIHVELGREMKNTAEDRKWLTEQVTNNENTNLRIKALLMELKENTDGKLFTEDVRPHSPMQQDALKIFEEYALQNNERYDAKENKFVYAPIEDDILKISKSAQPTKSELQRYKLWLEQRYRSPYTGQMIPLGRLFTEDYQIEHIIPKSRYFDDSFNNKVICESAVNQLKDKQLGLEFIQNHYGEEVPLGMGKCARIFTEDEYKDFVKEHYTKNNSKRRNLLLDEIPEQMIARQMNDTRYISKFISELLSNIVRAEKEDDGINSKNLIPVTGKITTILKQDWGMNDVWNDLILPRFERMNELTNSQNFTSWNDNYQKYLPTVPLELSKNFQKKRIDHRHHAMDALVIACATRDHVNLLNNQSAKSENSRYDLQNKLRHKEKESWIDKKTNEKVERDVFKEFKKPWDNFTVDAKNELKKIIVSFKQNLRIINKTTNKYEKFVDGKKAKVSQQGTNWAIRKPLHKDTVSGIVNLRLKKTVNLSAAINEWENIVDKNLKTKIKQLINEGIDKKKIQKFFAQQENKWQGKDISKLEVYYFSNDKEILVASRSALDVSFNSKKIESITDSGIQKILLRHLEKYNEEKEGKIVERPDLAFSSEGIEDMNKNIIQLNEGKQHQPILKVRTYEPKGNKFNVGSFGNKKDKFVEAAKGTNLFFAIYVDDEGKRSYETIPLNIVVERLKQGLKEVPEVNEKGNKLLFHLSPNDLVYVPTEEEIESGMNYDKKQIYKIVSFTGNRLYAIPYYVAKSIVDKQEYTQLNKVESDIMYNSSIKTTCLKIKIDRLGNITK

SEQ ID NO: 4205 - protein, 1432 aa, unidentified
  REGION 1..1432: note = Description of Unknown: Cas Enzyme sequence
MEFLFQESFQEMLAEFSQCQPELIAGGRKVPYDWTVYYLRKKALTQRITKEELAWILLQFNQKRGYYQLRGEEEEEDTSKKVEFLSQKVIRVEATGERKGDDLWYNVYLENGMIYQRPSRFPLDWEGKTKEFIVTTDLEKDGSPKRNKYGEIKRSFRAPKEDDWTLLKKKTEYDIEQSNKTVGCYIYDALLQNPSQKIIGKLVRTVERKYYKEELRRILEVQQELIPELRDSNLYQRCIEELYPCNEAHRNIISKPDFVRLFVDDILFYQRPLKSKKSLIDNCPYESRFDKEGNMHPVKCIAKSNPLFQEFRLWQFVQNLRIYQREKTVSDGQLDLFSNVPTGKLQTDVDVTAEILKSEEDYVKLFNWLNDRGTIKQDTLLNSYFKIKKEKGKDRYPYRWNYVEDKEYPCNETRATILSGLAKCNVSTDFLTRENEMALWHILYSVEDKTEINKALSSFAGKHNLAANFTEVFSKTKPFKKDYGSYSEKAIKKLLPLMRMGSYWNETAFDANTHDRIEKIITGEYDERIKNRVREKAISLTDISHFRGLPVWLACYIVYNRHSEAKEIEKWKKPEDIDQYLKTFKQHSLRNPIVEQVITETLRTVRDIWKQEGQIDEIHLELGREMKNPADKRRQMTERIQQNENTNLRIKAMLMEFMNPEMEIENVRPYSPSQQDILRIYEENALDNLSRDDKEYDFVSKVSKMAQPSKSDIIRYKCWLEQKYQSPYTGEMIPLSKLFTPAYEIEHVIPQSRYFDDSFSNKVICESEVNKLKDRQLGYEFIKNHAGEIVQLSQGGTVKIQSVEAYERFVKDYYANNRTKMKKLLMDDIPDGFIERQMNDSRYISKLVKGLLSNIVREKQVNGEYEEEAVSKNLISCNGSITDRLKKDWGMNDVWNSIVLPRFQRLNQLTGKDCFTTLNREGHEIPNMPLELQKGFNKKRIDHRHHAMDAIVIACATREHVNLLNNEAAHSKHNANRYQLQRKLRRFETIIINGKEREIAQEFLKPWDTFATDAWQALSNIIVSFKQNLRVINKTTNHYQHYDAKGRKGYEKQHHGDSWAVRKSMHKDTVFGEVNLRMKKTVSLNEAVKKPENIVNKEFKKKVTKLLANGYDAKSIKKYVEDNKDIWSDINLSKIEVYYFTKDEKKRNGEPKERYFATRKSLDTSFDQKKIKESVTDTGIQQILLAHLASKENNPELAFSPDGIDEMNRNIVALNNGKFHQPILKVRVYEKAEKFAVGQTGNKNKKFVEAAKGTNLFFAFFETEKENKESGNKETIRSYMTIPLNVMIDCQKKYGARWRSNIEVFLKDKDMVDAKAKLMFILSPNDLVYLPTKEELQNGIQSLEKQRIYKFIDPGMNTGNFIPFSIAKAVFSSKFTEQKKKGINFSIQDEVGLGSQGTKSPRATTGEMIKETCIPVKVDRLGNIIELNGIKV

SEQ ID NO: 4206 - protein, 1237 aa, unidentified
  REGION 1..1237: note = Description of Unknown: Cas Enzyme sequence
MSRILGLDLGVSSIGWAVIDEDEKKILGMGSRIIPLTTEDKDEFTKGNAISKNQKRTLKRTQRKGYDRYQLRRQNLISILKQYKMLPDIDLIKLNKLDLWKLRAEATNKKLTLQEIGRVLLHLNQKRGYKSSRSEANLNKKDTEYVTQVKSRYEELKEKGLTIGEKFFIELNKDQYYRIKEQVFPREAYIEEFDKIINKQREFYTEILTDEIIDKIRNEIIYYQRKLKSQKGLVSICEFEGFWTKLESNGKIKELFVGPKVAPKSSPLFQVCKIWENINNITLKRKTGETIEIAIDKKHEIFEYMNNNEKLTFAELLKILGLKKDDVYGNKQLTNGLQGNKTKIEIINCFNDLNEYEKLLGFDLIINESDEEGYLVDKESGEIIEAKKKKQVAPDIEFQPFYTLWHTIYSISDKEECKNALIKNFNINEVAAQKLSALDFTKQGFGNKSHRSIRKILPFLIEGDNYSTACSYAGYNHSNSLTTNENLERKLLNKLKQIDKNSLRQPVVEKILNQMVNVVNAIIDKYGKPNEIRIELARELKQSRDERNETYKYMNERERENQNIEKELSEFGLRATRNNIIKWRLYHEISNYDKKQNAICIYCGKAISFTAAILGEETEVEHIIPRSKLFDDSQSNKTLAHRKCNSDKKDQTAYDYMRSKSENEFNDYVERINTLYKSKVIGKTKRDKLLMPGNKIPNDFIDRQLRETQYISKKAREILTSICHNVWTTSGSVTSELRHIWGWDEILENLQIHKYRDLGLTETIEIKSGDKIFKKEKINGWSKRDDHRHHAIDALTIACTKQGFIHRFNKLNSSKIRNDMKREIDDARFEYNNNKSLLENYIYSKKPYSTKDVEKEAQKILISFKPGKKAASIGKRKIKKDGKKVVVQTGIIVPRGPLSEESVYGKIKIIEKKQVKYLFENPHLIYKTYIKNLVEERLYLHDGDPKSAITSLKKEPIYLNENKTITLEYGSCFKEEYVIKYPIASIKAKDIPSIVDKKVREIIDLRLSQFDYNEKEAFKDIDNNPVWYNEKKKIPIKTVRCLTGLSAVEPIKANDNGKDIAFVKPGNNHHLALYLDEFGNKQLSICSFWHAVERKKFGLPVIIKNPSETIDKILDEDEDKYSDNFLEKLPNGKWTFLESFQQNEMFILGMDKDVFEEARLNNDYPSLSDHLYRVQKLFYNGKQLEIFFRFHLETQLINDNSTKLSKRYYQIQSLGALESLNPQKLIINCLGEIITNK

SEQ ID NO: 4207 - protein, 1417 aa, unidentified
  REGION 1..1417: note = Description of Unknown: Cas Enzyme sequence
MTKRILGLDLGTNSIGWALVNEKESNEERSSIIKLGVRVNPLTVDEANNFEKGKSITTNADRTLKRSMRRNLQRYKLRRENLMEILKENGFISDDTILSENGNATTFQTYRLRAKAATEEISLEEFARVLLMINKKRGYKSSRKAKSNDEGQLIDGMDIAKYLYDNNLTPGQYVCSILEKGKKNIPDFYRSDLQAEFERVYDKQMTYYPDILTSELKEELRGKKRDAVWAICAESFKEKGFELVGTKRQGKSAEQKVENFEWRAKALTEKLDLEQFVVAIQQINVQINVSSGYLGAISDRSKELYFNKQTVGQYQMAELDKNPNYSLRNQVFYRQDYLDEFETIWETQARYHKELTQSLKNEIRDIVIFYQRQLRSQKGLISFCEFENRQIEVEIDGRKKTKTIGLRVCPKSSPLFQEFKIWQVLNNLQIIEKTTNENRYLEQEEKEVLFAELNLKEKLSKTEALKLLYERRYKDFDLNFKEVEGNRTLAILFKAYQQIIYNSGHGEYDFSSPNMKAADIMGIVEPVFKGLNFNTDILHFDSALEGKSFEQQAAYQLWHLLYSFEGDDSKTGNDKLVEKISELYGFDREYAKIIAAVTFQPDYGSLCTKALRKILPFMKDGSEYSLACKYAGYRHSKRSLTKEELDNKALKDKLEILPRDSLRNPVVEKILNQMIHVVNDVVTAYGKPDEIRIELARELKKSAKEREEMTSAISKTTADHEKYRATLQKEFGNPNVSRNDIIRYKLYLELKDNGFRTLYTNTYIPQDKLFSKEFDIEHIIPQAKLFDDSFSNKTLESRSANIEKSNATAYDYVKGKFDETGLKDYKTRVEKLFENGSISKTKRDKLLMQDADIPSGFIERDLRDSQYIAKKAREILEDLVKYVVPTTGSITDRLREDWQLVDVMQELNWNKYDKLGLTETYKDKDGRDIRRIKDWTKRNDHRHHAMDALTIAFTKRSIIQYLNNLNARIGKSVDDYINLANYDLCSINPKDRSKVVYAIEKQELYRDKNGHLRFIPPMPLNEFRAEAKRQLENILVSIKAKNKVVTRNINKAKNDVTSEVINANGEKKTIKGQIVKTPRGQLHNETVYGSMKRYVVKEEKVGSNFNAEKIATVASPKYRELLLERLSQFDNDAKKAFTGKNSLEKNPIFLNETHTKKMTEKVKTVLFETIYTIRKNVSPDLKLDKVVDVHIRRILQKRLDEFGGDAKKAFSNLEENPIWQNEGKGIAIKRVSITGVSNATALHDKHDQNGKLILDQNGQTQPTDFVSTSNNHHVAIYRDADGNLQENVVSFFEATIRANLGLPIVDKEYKKDQGWHFLFTMKQNEYFVFPNKETGFDPNEIDLMNPDNYSLISSNLFRVQKISTRNYMFRHHLETVVGEKKELRRVAWELIQTPSNLTGIVKVRVNHIGQIVSVGEY

SEQ ID NO: 4208 - protein, 1480 aa, unidentified
  REGION 1..1480: note = Description of Unknown: Cas Enzyme sequence
MKTILGLDLGTNSIGWAKVCVDDNGNYTREIKLGSRIIPMSQDTLSNFDKGVTESPTAARTGFRGIRRIRERALQRRERLHRVLHVMGFLPLHYENAIGWNREEATTYGKFLDNGEPKLAWERQEDGSMRFLFMDSFYEMMADFAKNQPGMVADGRKIPLDWTLYYLRKKALTQAIRKEELAWILLNFNQKRGYYQLRGEEEEENPTKREEYYELKVVSVEAAEEGKGGNTWYNVTLENGWIYRRQSKIELNEWVGKVRPFIVTTEYEIDGVTIKKDKNGEVKRSFRAPSENDWGLRKKRTESILEKSGKTVGAFIYNHILSEPADKIRGNFIRTIERKFYKKELEAILREQSKHHKELKDIDTLIACIKELYPNNKPHQDSLIKKDMTYLLITDLIFYQRPLKSNKSLIADCPYEYYEYVIKETGEIKRQSIKCIAKSNPYYQEFRLWQFIINLRLFDRNNDKEVTSEYLSSMEDYTRLFTYLNDRKDINQETLLKDFFKQKKVKRGMEKEFPIRWNYIEDKEKKYPCNETRHELLAALGKAGIDHSWLDDKELFYRLWHLLYSVESKEEAEGALRKLNDNDDFVNAFLKVKPFKKEYGAYSEKAIKKLLAVMRMGDLWNETDICEQTRDRIQNIIKGVIDEKIKERMGRTFSQLSDFQGLPEWLACYVVYGRHSEATDIQRWTKPEDLMAYINGFKQHSLRNPIVEQCILETLRTVYDIWKEAGHIDEIHIELGRSMKSTADQRARMSKSIMQNENTNLRIKSLLMELKNTKEFENVRPYSPMQQEILRIYEEGALQELTKEDAQYNEISKISQMAQPSANELLKYRLWLEQKYCSPYTGKPISLSKLFTSAYQIEHIIPQSRYFDDSFTNKVICEAEVNQLKSNMLGYEFIKKHGGEIVHCTMVGDVKLLDAKEYYNFVTEHYANNRRKKEKLLMEDIPQEFLNRQMNDSRYISKKVMAILSNIVREEDEQEAKSKFVIACSGGITDRLKQDWGLNDVWNSIVYPRFERLNKLTNTENFGRWENKEGKQVFQTSVPLELQKGFSKKRIDHRHHAMDALVIACASNNIINYLNNESAKSQEKREDLRKKLCDKNRIIRKPWDTFTQDAHTALENVVVSFKNYIRVINKATNYYEKYDKNGKKEIAEQKGQDMWAIRKPMHKETVFGQVNLRRKVTIKLKDALEKIPAICDKELRDYINILVAKQFNKKQILAHFKSINYRLNMKSVDKVDVWQFSNEKEPMVATRKSVDTSFGTKRIATITDTGIQKILLNYLKAKNNDPNIAFTPEGIAEMNKHITEYNNGKQHQPILKVRVSEPKGAKYQVGETGNKTSKFVEAQKGTNLYFAIYEDKEGNRSYNTIPLNEVIERLKQGLSPAEDLNKQGEKLKFYLSPNDLVYVPTEEEKLSSECKLNKEQIYKMVSSTGSECYFIPYTVSNVIFNKVEFESLNKMGRALTGEMIKSVCWKLELDRLGNILKVIK

SEQ ID NO: 4209 - protein, 1030 aa, unidentified
  REGION 1..1030: note = Description of Unknown: Cas Enzyme sequence
VTCLKIYCKYRKNITNNQIKQEKNENNSWIILKDFFKQKKVKRGMEKEFPIRWNYIEDKEKKYPCNETRHELLTALGKVGIDHSWLDDKELFYRLWHLLYSVESKEEAEGALRKLVDNDDFVNAFLKIKPFKKEYGAYSEKAIKKLLAVMRMGNLWNEVDICEQTRDRIQNIIKGDIDEKIKDRMGRTFSQLSDFQGLPEWLACYVVYGQHSEATDIQRWTKPENLMAYINGFKQHSLRNPIVEQCILETLRTVHDIWKEAGHIDEIHIELGRGMKSTADQRARMSKSIMQNENTNLRIKSLLMELKNAKEFENVRPYSPMQQEILRIYEEGALQELTKEDAQYNEISKISQMAQPSANELLKYRLWLEQKYCSPYTGKPISLSKLFTSAYQIEHIIPQSRYFDDSFTNKVICEAEVNQLKSNMLGYEFIKKHGGEIVRCTMIGDVKLLDAKEYYNFVTEHYTNNRRKKEKLLMEDIPQEFLNRQMNDSRYISKKVMAILSNIVREEDEQEAKSKFVIACSGGITDRLKQDWGLNDVWNSIVYPRFERLNKLTNTENFGRWENKKGKQVFQTSVPLELQKDFSKKRIDHRHHAMDALVIACASNNIINYLNNESAKSQEKREDLRKKLCDKNRIIRKPWETFTQDAHTALENVVVSFKNYIRVINKATNYYEKYDKNGKKEIAEQKGQDMWAIRKPMHKETVFGQVNLRRKITIKLKDALEKIPAICDKELRDYINILVAKQFNKKQILAHFKSINYRLNMKSVDKVDVWQFSNEKEPMVATRKSVDTSFDTKRIATITDTGIQKILLNYLKAKNNDPNIAFTPEGIAEMNKHITEYNNGKQHQPILKVRVSEPKGAKYQVGETGNKRSKFVEAQKGTNLYFAIYEDKEGNRSYNTIPLNEVIERLKQGLSPVPDANEKSIPLKFHLSPNDLVYVPKTDEENEIKMGQIYKFVDSSGTTANFVPHRVSNLIYNVDKKIAENFCNHEIIQNEYGIGSPQSKNQKSITGEMIKAVCWKLEVDRLGNIHKIIK

SEQ ID NO: 4210 - protein, 1489 aa, unidentified
  REGION 1..1489: note = Description of Unknown: Cas Enzyme sequence
MATRKILGLDLGTNSIGWAVVNQNMDSQSIASAGSRIIPMDAALMGDFESGNSVSQTANRTAARSTRRLFERRALRRERLNRVLSILGLLPPHYAQELNRYGQLNKGVEPKLAWIVEGTKPTFLFQSSFEEMMHDFAVAQPQWVANGKKIPYDWTIYHLRKKALTSPITKQELAWILLQFNQKRGYHQARGEEEEAKPNEKKELVTAKVLEVRDTGEVSKGRTWYEIVLETGDIYRRQSAYPLDWVGKTKDFIVTTKLNEDGLEAIDKEGRPKRSFSAPQEDDWGLRKIKTEHDIAQSGKTVGEFIYDSLLQNPDQKIIGQLVRVVDRQLYKEELRRILDAQKQFIPELQDPDLYRQCIEALYPQNEAYRNSIANKDFTYLLLQDIIFFQRPLKSKKSLINECPYEYHVYKAKNGDWKRQYLKCISKSHPLYEEFRLWQFVENMHIYKTDANGIGKSDCTADYIPDKAALVKWLLTQKEVTEKSLLSKFAGKKAKDLSWNYVSDKKYPAAPVTATLTAIIAEAGGTTNNEELHHIWHILYSVSDKEQLTQALMHYAEKHNLSPVFVEKLSKQKPFAADYGAYSEKAVRRLLSLMRCGEYWEETDIDPQTKQRIDHILTGEVNETISDTVREKLKDMNGMVDFQGLPLWLAEYVVYDVRKNDTKWETPEDIDRYLQSFRLHSLNNPIVEQVVMETLRTVRDIWKQEGHIDEIHIEMGRELKQNAEQRKQTLSRQSDNEKANLRARLLLQEFMNPDMNIEGIRACSPSQLEIFRIYEDGVLNNPDIDKDDDIQRIIKELSELKQPSASDVKKYRLWLEQKYISPYTGQPIPLAKLFTPAYQIEHVIPQSRFFDDSMSNKVICEAEVNARKDRMLAHEFITKCGGEKITLSGGKVVTVLTTQAYEDLVRDTYKSNPRKQEKLMLDDIPEKFIARQMNDSRYISRLMLGLLSNIVREKNAKGEYEPESTSKNVIACNGSTTTRLKKDWGINDVWNHIILPRFERLNQIQNTTIFTTTTANGHTIPNMPLELSKNFEKKRIDHRHHAMDAIVIAFTTRNHVNLLSNEAALEKDEKARYDLQMQLRKRETWTSPNGKSHTKFTDFIAPYEGFQQDVQTTLENIIVSFKQNLRIINKSNNHTVHFEDGKKKSVKQKKGDNWAIRKSLHKATVFGKVNLRFRKTAPLKYALTHLNDIVDKDLRLKLRELVAQGYDEKHIKKYFAENKDVWADINPQKIEVYYYTNDTPDNYYATRTAIGDWLDEKSIWEKVTDTGIQKILLAHLSQCNGDPKEAFSADGIEKMNQNIVALNGGVPHKPIYKVRKYEKADKFAVGEIGSKSKKFVETDKGTNLFFAIYATTNADGKEVRSYATIPLKAVIDCQKRGKKEWKSLLDQWVHDNNLVPANATLKYIISPGDLVYLPKEGAATIDKTRIYKMVSSTGNQCFCVPCSMASPIINKIEFSPLNKMERALTGEMIKETCVPIRVDRLGNIISLEP

SEQ ID NO: 4211 - protein, 1489 aa, unidentified
  REGION 1..1489: note = Description of Unknown: Cas Enzyme sequence
MATRKILGLDLGTNSIGWAVVSQNMDSRSIAAAGSRIIPMDAALMGDFESGNSVSQTANRTAARGTRRLYERRALRRERLCRVLSILGFLPPHYTQELNRYGKLNKGAEPKLAWTVEGIKPTFLFQPSFEEMMRDFAVAQPQLAANGKKIPYDWTIYYLRKKALTQPVTKQELAWILLQFNQKRGYNQARGEEEETKTNEKKELITAKVVEVRDTGEVSKGRTWYEVVLETGDIYKRQSAYPLDWVGKTKDFIVTTKLNEDGSEAIDKEGRPKRSFSAPQEDDWGLRKIKTEHDIAQSGKTVGEFIYDALLHNPDQKIVGQLVRVVDRKLYKEELRRILDTQKQFIPELQDPDLYRQCIEAIYPQNEAYRNSIANKDFTYLLLQDVLFYQRPLKSKKSLINECPYEYHVYQTKNGDWKRQYLKCISKSHPLYEEFRLWQFAENLHIYKIDANGIGKSDCTADYIQDKAALVKWLLTQKEITEKSILSKFAGKKAKDLSWNYVSDKKYPSAPVTATLTAIIAEVGGTINNEELHHIWHILYSVSDKEQLTQALAHYAEKHNLSSVFVEKLSKQKPFAADYGAYSEKAVRRLLSLMRCGEYWNEENIDPQTKQRIEHILTGEVNDAISDRVREKLKDLNNISDFQGLPLWLAEYVVYDVRKNDTKWETPEDIDKYLQSFRLHSLNNPIVEQVVMETLRTVRDIWKQEGHIDEIHIEMGRELKQNAEQRKNTLTRQQDNEKANLRAKLLLQEFMNPDAGMDGVRAYSPSQLELFRIYEDGVLNNSNATRDDDIQRIIKDLSELKQPSAADVRKYRLWLDQKYISPYTGQPIPLAKLFTSAYQIEHVIPQSRFFDDSMSNKVICEAEVNARKDRMLAHEFITKCGGEKITLSGGRVVTVLTTQAYEDLVRDTYKTNPRKQEKLMLDDIPEKFIARQMNDSRYISRLMLGLLSNIVREKNAKGEYEPESTSKNVIACNGSTTTRLKKDWGINDVWNRIILPRFERLNQLQNTTIFTTKTANGHTIPNMPLELSKNFEKKRIDHRHHAMDAIVIAFTTRNHVNLLSNEAALEKDENARYDLQMQLRKRETWTSPNGKSHTKFTDFIAPYEGFQQDVQTTLENIIVSFKQNLRIINKSNNHTVHFEDGKKKSVKQTKGDNWAIRKSLHKATVFGKVNLRFRKTTPLKYALTHLNDIVDKDLRLKLRELVAQGYDEKRLKKYFAENKDVWSDINLQKIEIYYYTNDTPDNYYATRTALGDWLDEKSIREKVTDTGIQKILLAHLSQCNGDPKEAFSADGIEKMNQNIAQLNGGVPHKPIYKVRKYEKADKFAVGEIGSKSKKFVEADKGTNLFFAIYATTNTDGKEVRSYATIPLKAVIDCQKRGKKEWKPLLDQWVHNNNLVPANATLKYILSPGDLVYLPQDGTATIDKTRIYKMVSSTGNQCFCVPCSMASPIINKVEFSPLNKMERAITGEMIKETCVPIRVDRLGNIISIKP

SEQ ID NO: 4212 - protein, 1225 aa, unidentified
  REGION 1..1225: note = Description of Unknown: Cas Enzyme sequence
MNKRILGIDTGTNSLGWAVVERNDKGEYTLLRKGSYIFQEGVKVEKGIESSKAAERTSHRTTRKHYFRRRLRKIEVLKILIKYGWCPELSEEQLHLWHTKKQYPVSDSFIAWQRTNENLEQNPYYYRHVCLHDKLDLTNKAEAYILGRALYHLAQRRGFLSNRLDQSEEDESGAVKSSISNLSKEMENSGCEFLGDYFYKLYSEQKNNVRIRNRYTDREAHYKKEFYAICKKQELTDTQITELEKALYFQRPLKSQRQGVGKCTFEPRKPRCADSHPDFEKFRMLTFLNNVKIKGPQDIELRNLNEEEIKKALPMFFRKSKDNFDFVDIAKSIAGKDNYQYIKDAGDKPYKFNYRMTQGVSGCRTTAQLREIFGEDYANGIAEVYVKGDGKTPQQMVNDVWNVLYSFPDKQKVKQWAKDNLQLDEEMSEKFSKIKLSHNFASLSLNAIRNIIPWLEKGLIYSHAVTMAKIPDIVGHEVWQEHKETITNELIEFILNFNPKDESMQGTLDYCIKDYLKNNFDLKPNATDVLYHPSMIETYPDAKKNKDGIYQLGSPRTNAVRNPMAMRSLHQLRKVINELLREGVIDNNTEVHIEYSRKLNDANKRWAIGEWNKRQEKKRKEAYDEIKKLYKEETKKDIEPTDDDITRFLLWREQNTICIYTNATIGITQIVGPDPDFDIEHTIPRSIGGESIMSNFTLCSKRYNRDVKKAKMPTELSPADYDGICARISAWKEKIEKLRKELDKKRTNPNMAKDIKDKRIREKNLLKIELDYWKDKYNRFIITEAPDGFARRQGAGIGLVGKYAGLYLKTLFHKKEDRNKTNVRTIKGTTTAEFRKMWGLQDDFEKKSRDNHIHHCIDAIVVACIDTGNYNQVARYYQQLEEYERNKNNKPSFPKPWPTFTEDIMALKNEILVVHDTPDNMPKHARKYVSTANGKVLAKGDCARGSLHNDTYYGAIERDGEIRYVVRRAINSFEKESDVENIVDDTVKSIVKQAIAEKGFKNAIAEDIFMNKDKGILIKKVRCYASGSVSGKLIEIRNHRDKSKHNYKSIYYAENSDNYAMAIYEGFEGNKKHREYEIVNIIDSAKYYNENSELPILPEKSVNGVADLPLKYKLIKGLHVILYENSENEIDFSNKFDIEPRLYIIIGLSTSSTTIGGKTYKYGMVTMKHAQEARPGSECKEKKGLYKNGEEYRAKAVMNHNQFNALIEGKDFAITPLGDIKPINR

SEQ ID NO: 4213 - protein, 1505 aa, unidentified
  REGION 1..1505: note = Description of Unknown: Cas Enzyme sequence
MRTIIGLDLGTNSIGWAVVKSVIKEQVERIWIEMAGSRIIPMDAAVLGDFDKGNSISQTSERTRLRGVRRLRERQLLRRERLHKVLKILGFLPTHYLKEIDFEKHPGKFLADTEPKLPWVKNEQGKYTFLFQETFNEMLADFTKHQPSLVSEGKKVPYDWTIYYLRKKALTKKISKEELAWILLNFNQKRGYYQLRGEEEEENTGKSVEFYALKVVSVEATDEKKGRDIWYNVHLENGWIYRRSSNVPLDWEGQVKEFIVTTDLNPDGTPKLDKYGEVKRSFRAPKEDDWMLMKKRTEADIVNAHKTIGCYIYDTLLQKPQQKIIGKLVKTVERKFYKDELNLILRKQCTFHEELQDKSLYMMCVEALYPSNEVRQKNISGRDFVYLLMDDVLFYQRPLKTKKSLIANCPYEENEYIDCETGEIKKAPLKCIAKSHPLFQEFRLWHFLSNIRIYQREKDINGTLRLDVDVTADFLKSEDDYVDLFDWLNSRKEIDQKTFLKYPKFGLKKEIGNYRWNYVEDKTYPCNETRYAILSRLEKAGIDAEFLSNEKEQALWHILYSVSDKQEIEKALATFAFKNGLNESFVEIFKKFPPFKSEYGAYSAKAIKKLLPLMRCGKYWDVSLIDEATKERIENIVTGEYDENVSLKVREKAINLSNIFCFKGLPLWLACYVVYNRHSESKEAVKWETPTDIDAYLASFKQHSLRNPIVEQVITETLRVVRDIWKQVGKIDEIHIELGREMKNPADKRKKMTAQMLENENANLRIKALLTEFMNPEYEIENVRPYSPSQQEILRIYEDTVLHAESQLPEDIDAILKKFNGSKVPTKSEFLRYKLWLEQKYRSPYTGELIPLGKLFTAAYEIEHIIPQSRYFDDSFSNKVICESAVNKLKDNLLGYEFIKNHHGQKVEVGFGKTVEILSVDGYERFVKEQYAKSGVKMKKLLMDDIPEQFIERQLNDSRYISKVVKGLLSNIVREKNSNGEYEQEAVSKNILVCTGGVTDRLKRDWGMNDVWNSIVYPRFERLNTLTNTQSFGHWENKNGKNVFQTELPLEYQKGFSKKRIDHRHHAMDAIVIACATRNHVNYLSNESASRNAKISRYDLQRLLCDKSRIDGNGNYRWIIKKPWVTFTQDVWEILSNIVVSLKQNLRVINKTTNVYQCFNAEGKRNNEKQKVGDSWAIRKPMHKDTVFGSVNLRKVKSVRLSVALDTPDMIVDKKVKSKVAEWLSYKYNKKRIEKYFKENVFFCKDLDLAKVAVYYFTESTTEPLVAVRKSLDSTFNEKKIEESVTDTGIQKILLNHLYSKGGKADLAFSAEGIEEMNRNLLQLNDGKAHQPIYKVRVYEPRGNKFKVGVLGNKNTKWVEAAKGTNLFFAIYVTEDGKRTYETIPLNLVIEREKQGLIPVPDRNEKGDKLLFWLSPNDLVYLPTEEERELGRINEPIDRGRIYKMVSSSGNQCFFIPQNVSNAIIPVKELGANNKAEKSWDGEMIKNICIPIKVDRLGNITEVKY

SEQ ID NO: 4214 - protein, 1511 aa, unidentified
  REGION 1..1511: note = Description of Unknown: Cas Enzyme sequence
MKRILGLDLGTNSIGWALVDSEERKILGMGSRIIPMDQGVLDTFSGGNPIETQTAARTAYRSTRRLRERVLLRRARLLRVLNVMNFLPEHYVSQIDFEKRLGQFLDGTEPKLAWRQKDEGKSEFIFQQSFNEMIEEFKNNGTIGENQKIPYDWTIYYLRKKALSRKIDKEELAWILLNFNQKRGYYQLRGEEEEENSNKLVEYYSLKIVDVIADEKPNGKGDTWYSLHLENGWVYRRPSKIPLLGWKGKIRDFIVTTDLNDDGTVKKDKEGIEKRSFRAPSENDWTLLKKKTENDIEKSHKTVGTYVYEALLQNPMQKVRGKLVRTIERKFYKDELKQILEKQKEFHPELRDEDLYNDCVRELYCSNETHKFILSKRDFVHLLLDDILFYQRPLRSQKSAISDCTLEFQAYKDKNGNKVKGHLKATSKSNPLYQEFRIWQWLYNLKIYRKEDDKDVTLEFITGIEDKELLFEFLNNRKNIEQKPLLEYLIKAKGLKKQVKAEAYRWNYVEDKTYPCSETRTMISTRLAKVENLPDDFLTKEVEQRLWHIIYSVTDKNEFEKALKTFAGKYNLDVTSFVDNFKKFPPFKNEYGSFSEKAIKKLLPLMRLGKYWKWSDIDSYTQNRISKIITGEYDEEIKDKVREKAIHLTNENDFQGLQLWLAQYIVYGRHSEADIAGKWHSIADLEKYLNEFKQHSLRNPIVEQIVTETLRVVKDIWQEYGQGVENFFNEIHIELGRDMKNTAEERKRLANTITENENTNLRIKALLMELKNNSDGKLEVENVRPYSPMQQDILKIYEEYAIGAELDNERDEKVKEDIKQISKAAQPTTVELQRYKLWLEQKYCSPYTGKVIPLSKLFTEEYQIEHIIPKSRYYDDSFSNKVICEAAVNKLKDKYLGFEFIKNYHGQIVETGFGQKVTVFDEESYQNFVKQHYVHSRSKRMKLLLEEIPEKMIERQMNDTRYISKFVFPLLSNLVRAEKDDDGINSKNVLPGNGKITTILKQDWGLNDVWNDLILPRFVRMNELKKTTAFTSWNGQYQKYLPAVPLELSKGFQKKRIDHRHHAMDALVIACATRDHINLLNNKYANTDKVRYDLQRKLRLFEQVTYIDPETKKGVTKNVPKEFKKPWDNFTIDARNELESIIVSFKQNLRIINKATNVYTKYENGKKIKVNQKGSNWAIRKPLHKETVFAKVSLRKRKTVRLSEALKDSEKIVDKGLKQEIRRLTCQYGKFDAGTILRYFKDRKYEFEGADVSKVEVYYFDEENAAVRKNVDTSFTKKIIQESVTDTGIQKILINHLAAKGDKAEMAFSPEGIEEMNKNIVQLNGGKCHLPIFKVRVYETIGNKFPVGVKGNKKDKYVEAAKGTNLFFAIYVDENGVRSYETIPLNIVIERLKQGLNAVPERDKKEHNLLFYLSPNDLVYVPTDDERENVCAINFGQFSNEQKKRVYKMVSCTGSECHFLPHYVANSIVNKVEYSPLNKIGRSLTGEMIKNVCIKLKVDRLGNIKGRTYER

SEQ ID NO: 4215 - protein, 1630 aa, unidentified
  REGION 1..1630: note = Description of Unknown: Cas Enzyme sequence
MKKILGLDLGTNSIGWALIENDFDKKEGKILGLGSRIIPMDAAIMGEFDKGNSVSQTATRTDYRGTRRLRERNLLRRERLHRVLNIFGFLPEHYANQIDFEKRLGQFLNETEPKIAWNKVWNKQKNKNDFEFIFQNSFNEMVEDFKSNGQDIKIPYDWTIYYLRKKALSRKIEKEELAWLLLNFNQKRGYYQLRGEEEEENQNKLVEFHSLKIIDVKADVAYKMMLSNGMEYRYETNNNLFEWKDTERKFVVTTYLNFDETPKKEIDGTNKRSIYMLKENETAAIKKKKDVSVEICDLKIVDVQEDTEKKKDDVWYSLILENGWIYRRSSKTSLFDWKNKVRDFIVTTDLNDDKTVKTDKEGTEKRSFRAPSEDDWTLLKKKTENDLDKYIEKYEEKNKIKGTVGAYIYETLLQNPTQKIRGKLVRTIERKFYKDELKAIVKKQIELQPELFTEDLYNDCIRELYRNNEAHQTILSKRNSFEHLFVDDIIFYQRPLRSQKSSIGNCTLEFRKYKDKDGKEIKEYLKGIPKSNPLYQEFRIWQWLYNLKIYSREDDKDVTADFLKSTDDYTNLFDFLMNRKEIDNKALITYFLNLQGIKGKNADKELKKYRWNYVFDNSKDKEEDKSKKYPCNKTRAQFVSRLAKVENLPLDFLTPEIEQKLWHIIYSVTDKNEYEKALKTFAVKHNLHEVSFVDNFKKLLFEEKDYGSFSEKAIKKLLPLMRLGKYWKWENITFETQGRIEKIITGEYDETIKERVREKAIKLSSENDFQGLQLWLAQYIVYGRHSETENADQWKMSYDIQDYLDEFKQHSLRNPIVEQIITETLRVVKDIWEQYASENNVECIEIYDEKKKKNVKSYGKFFDEIHIELGREMKNTADDRAKITNQVSDNENTNLRIKAMLMEFAEDGYFNNENNENTVRPYSQNQQDILKIYEEDVLRRYSEQELKNEKTGLIEKDDKGKEKEITYYDISKKSQPTKTQIQKYKLWLEQKYCSPYTGKMISLSRLFTPDYEIEHIIPQSRYFDDSLSNKVICEAAVNKLKDRNLGLEFIKKHTGEKVECGMGVVIEIFTEESYKSFVQEHYKNNNAKQKKLLLEEIPDKMIERQLNDTRYISKFVSALLSNIVREEKDDDGVNSKNLISGNGKITTTLKQSWGLNNVWNELILPRFERMNELKGTDTFTSKNTEGHIIPTIPLEFSKGFQKKRIDHRHHAMDALTIACMTREHVQYLNNENAKSQKFHLQKGLAKTLRKYETIEKTIQKKDETGIWRIKKDETGKQITKQIEVPKEYFMPWNNFVEQAKSELEKIIVSFKQNLRVINKVKFAGLTYKESKEKSNNRNWGIRKPLHEETFSGIVQLPWVKVGKGEFTTATRKALDKSFNEDKIEKITDTGIQKILKNYLQSKKNNSELAFSPDGIEELNKNISQYNDGKFHQPILKVRVYEKGKGRFVLGNLGNKKSKYVQGAPNLFFAIYEYEEFDKKENKNVIKRSYETIPLNIVIERLKQGLNVVPETNEEGHKLCLECPFLSPNDLVYVPMEDEKENIRAIDWENLSKEQLQRLFVVNDFSGTCYFTPNRLAKNIVPKEVDLNFDTKKNKLSGSYDTKTASFEGKQIKDVCIKLNIDRLGNIKPAL

SEQ ID NO: 4216 - protein, 1608 aa, unidentified
  REGION 1..1608: note = Description of Unknown: Cas Enzyme sequence
MQRILGLDLGTNSIGWALVNLDFEAKSGKILGTGSRIIPMEQGDLGKFAEGISVSQTSERTGFRGTRRLRERHLLRRERLHRVLNVLGFLPEQYANQIDFEKRLGQFLDETEPKIAWKEIWNEQKNKNDFEFIFQKSFLEMVADFNAMGQSTKIPYDWTIYYLRKKALTEKLEKEELAWIILNFNQKRGYYQLRGEEEEKTDVKEYCALLKVVSVEKGEKDKKNDKKTWYKFTFENGWEYSATFVTEPNWLNTEREFLITEEYDENGNIKIVKDKKSDTTGKEKRKITPLPSFDEINLMSKKDQDKIYKKIKARTEITISNSNKTVGTYIYEKLLENPSQKIRGKLVRTIERKFYKDELIAILKKQIALQPELFTDEKFNDCVRELYKNNVEHQNELNGKNFVDLFVKDIIFYQRPLRSQKSNIGNCAFEFREHKINKLDEKGDAIKNVFEKDKNGNDIVIKEYLKGVPKSNPYYQEFRVWQWLYNLKIYTREDDKDVTNEFIKDIADLEKLFEFLMTKKEVGNKDVIEFLIEENNKNEVEQQIRELYPKLNDEKINQKVKTELAKKVKELLPKYRWNYVFDNTKGKEEDKSKKYPCNSTGYEIHRRLKDVSNVPENFLTRETEQEIWHIIYSVTDKNEFETALLSFSLRKIFKDDKKEKEIKNKIKQFFKENNQQKYDKFIESSFEENVRQKVYFAISFFENFKNFKPFKSEYGSFSEKAIKKLLPLMRLGKYWNLELIEAKTKDRIDKILTGEYDETIKNRVRDKAIHLKSENDFQGLQLWLAQYIVYDRHSEAEFAGKWKTVADLEKYLEEFKQHSLRNPIVEQVITETLRVVRDIWKKHGDFSEIHIELGREMKNTAEDRKRLTNMVTENENTNLRIKALIMELKDCADVENVRPYSPIQQEILKIYEEGVINSNIEIPEDIAKISKTAQPSKSELQRYKLWLEQKYRSPYTGQIIPLGKLFTEEYQIEHIIPQSRYFDDSLNNKVICEAAVNQLKDKQLGFEFIKNHHGQIVETGFGKSVKILEEDGYQEFIKEHYAKNRSKRNKLLLEDIPEKMIERQLNDTRHISKFVSKLLSNIVREETNDDGVNSINLIPVTGKITSKLKQDWGLNDKWSELILPRFERMNQLTNSDVFTAKNKEGHTIPAIPLELSKGFQFKRIDHRHHALDALIIACTTREHVQYLNNENAKSQKYHLQKGLAKKLREFENVEIEKMVEKNGIWVKSEKTETREVPKAYFKPWNNFPIDAKNELDKIVVSFKQNLRVINKTSNKYQAYDNGKKVLKKQEKGDSWAIRKPLHKDTVFAKVSLRKIKSVRLSEALKDWKMIVDKELKQEIKRLVINYGGEFKIDVINKYFKDRKYLFNEVDISKVEIYYFETENAAVRKSLDTSFTEKTIKESVTDSGIQKILLNHLSAKENKPELAFSPEGIEEMNKNIVQLNDGKYHQPIYKVRVYETIGNKFPVGTTGNKKDKYVEAAKGTNLFFAIYADEDGKRSFETIPLNIVIERLKQGLNAVPEKNEKGHNLLFHLSPNDLVYVPTEEERENIRAIDWENLDKERLKRIYKFTDSSGVQANFIPFNIATVLFNYNKDIQKKMGIDYPIQNEI

SEQ ID NO: 4217 - protein, 1456 aa, unidentified
  REGION 1..1456: note = Description of Unknown: Cas Enzyme sequence
MKNILGLDLGTNSIGWALVDKENQKILGMGSRIIPMSQDILGDFGKGNSVSQTAERTRFRSVRRLRERHLLRRERLHRVLNVLGFLPNHYSDQIDFEKRLGKFKEEAEPKLAYQPICNRENGKNDFNFIFKKSFNEMLDDFRKHQPQLLVNDKKIPYDWTLYYLRKKALTQKIEKEELSWILLNFNQKRGYYQLRGEEEEENPKKQVDFHSLKVTDVQADEKKKGATDIWYAIILENGWVYRRSSKTPLFNWKDKIKDFIVTTDLNEDGTIKTDKEGNEKRSFRAPGEDDWTLLKKKTESEIEFSGKTVGRFIYDNLLQDPKQKIKGKLVRTIERKYYKKELEQILQKQKEFHSELQSEDLYIDCIRELYRNNESHQLLLSKKDLIHLFLDDIIFYQRPLKSKKSSIGNCSFEYKKYTLNNEEKIEYLKAIPKSHPFYQEFRLWQWIYNLRIHRKDDDSNVTSEFLNSAESYASLFEYLNDRKEIDQKALLKYFKIKDTSHRWNFVEEKKYPCNETRTLIRTRLSKVDDNILTKEIEEQLWHIIYSVTDKIQYEKALKTFANKYNLDATSFVDNFKKFPPFKSEFGSYSAKALKKLLPLMRAGKYWSYDNIDEKTKSRINKIITGEFDEEIKNRVRENAINLTDENHFQGLQLWLVSYIVYDRHSEAAMINKWDSVAHLEEYLNEFKQHSLRNPIVEQVVTETLRVVKDIWQQYGKGTKDFFDEIHIELGREMKNTADERKRITAQVNDNENTNLRIKALLAELKNDSNIENVRPYSPQQQEILKIYEDGILSSDIEIPEDIFKISKTSQPSSSELQRYKLWLEQKYRSPYTGQMIPLNKLFTTDYEIEHIIPQSRYFDDSFNNKIICESAINKLKDNQIGLEFIKNHHGEIVQTGFGNIVKIFEVSDYEDFVKTHYLKNRFKRNKLLMEEIPEKMIERQINDTRYISKFISFVLSNIVRADKNDDGVNSKNVIPGNGKITNTLKQDWGLNDVWNDLVLPRFERMNQLTKSKVFTAYNDKYQKYLPAVPLELSKNFQKKRIDHRHHALDALVVACATRDHVNLLNNKYAKSNERFDLNRKLRKFEKVVYNHPKTGVRIEKEVPKDFKKPWDNFTVDARNQLETIVVSFKQNLRVINKATNHPEKWVEINGQKIKKEVEQKGINWSIRKPMHKETVSGKIDLKRIKVPKGKILTATRKNIDSSFDIKNIESITDTGIQKILKNYLSAKNNDPELAFSPEGIEDMNKNIVLYNNGKPHQQIRKVRIFELGSKFPLGQKGNKSTKYVEAAKGTNLFFAVYKNEEGNRSFETIPLNEVIEHQKWRATLSKTEQKNTPLIPINIAKGKFLFCLSPNDLVYVPDEEEIINQTPIDFYNLSKEQRKRLFNVNDFSSTCYFTPNIVAKAIAPKEIDLNYDKQKNKITGSFDTKTTSLNGVQIKDVCIKLKVDRLGKIKPIINYQ

SEQ ID NO: 4218 - protein, 1456 aa, unidentified
  REGION 1..1456: note = Description of Unknown: Cas Enzyme sequence
MKNILGLDLGTNSIGWALVDKENDKIIGMGSRIIPMSQDILGEFGQGNSISQTAERTNFRSIRRLRERYLLRRERLHRVLNIIGFLPQHYSNQIDFETRLGKFKEEAEPKIAYNSIINGTNGKIQFDFLFKKSFTEMLDDFRQYQPDIVANGNKIPYDWTLYFLRKKALTKKIEKEELAWILLNFNQKRGYYQVREDNDENINKKEYVISLKVTQIIKGEKDKKSKNKNWYSIILENGWVYNATFALEPQWLNNEKEFLISEELDENGQIKIVKDKKSDKGGKENRRIIPLPTFDEIDLMSKGEQDKIYKKIKTKTETAIENSGNTVGVYIYENLLKSPFQKIRGKLIRTIDRKFYREELKKILQKQKEFHSELRSENLYNDCVRELYKNNKDHIFLLSKRDFVHLFSDDIIFYQRPLKSQKSSISNCSFEFKKYSVDNEERIEYLKAIPKSHPLYQEFRLWQWIYNLRIYSRNDDCDVTINYLNDNERYADLFEFLSKRKEIEQKALLKYFKLKDSTHRWNFVENKKYPCYETRSLISTRLEKVENVPMNFLNDKTEQYLWHIIYSVKDKNEYEKALITFAKKNRLDIESFVENFKKFPTFKNEYGSYSAKALKKLIPLMRIGRYWNLDKIDEQTKSRIDKIVTGEFDEEIKNKVREKSISLTNNNHFQGLQLWLASYIVYDRHSEAATINKWETIQQLGEYIDNFKQHSLRNPIVEQIIIETLRVVKDIWHHFGKDKNNFFEEIHIELGREMKNNADERKRITNQMIDNENTNIRIKSLLSELKNDSSIQNVRPNSAVQQELLKIYEEGVLNSDIEIPEDIFKISKTAQPSNPDLQRYKLWLEQKYRSPYTGQIIPLSRLFTTEYEIEHIIPQSRYFDDSFNNKVICESSVNKLKDNQMGLEFIKNHHGEIVQTGFENSVKIFEESEYQDFVKTHYIKNRSKRNKLLMEEIPEKMIERQINDTRYIAKFISTLLSNLVRSASNDDGVNSKNLIQVNGKITSLLKQDWGINDVWNDLILPRFYRMNKITNSDSFTRYSEKYQKYLPTVPIEFSKNYQAKRIDHRHHALDALIIACATRDHVNLLNNKYAKSKERFDLNRKLRKFERTAYNHPQSGERIEREVPKEFLKPWNNFTVDLKNFLEKIVVSFKQNIRVINKTSNIYKKWVEVNKGKVKKEVKQSGVNWAIRKPLHKKTFAGKVELGKVKVPNGKILTATRKNLDASFDLKTIDSITDTGIQKILKNYLLSKGSNSSIAFAPEGIEEMNKNIKLYNDGKPHKPIYKVRIFELGSKFILGLTGNKKLKYVEAAKGTNLFFAVYQNEDEKRNFETIPLNIVIERQKQGLSSVPENNKKGHKLLFYLSPNDLVYVPDEDERENNSIIDFYNLTTKQINNIYKTVSFSGSQCFFIKHDVANSIVDKSEYSKSNKMEKSIDGIMIKEHCIKLKVDRLGNILKTYR

SEQ ID NO: 4219 - protein, 1378 aa, unidentified
  REGION 1..1378: note = Description of Unknown: Cas Enzyme sequence
MGRILGLDLGTNSVGWAIVDVNNTNEYALRHQGVRIFQEGVKIEKGIESSKASERTKHRSARRLYFRRRLRKIRTLEMLIKYDMCPLPPEQLELWRKNKSKYPVSKEFREWLRTIEPNDDNHEGYNPYLLRAKAVKEKLSLYDIGRALYHLAQRRGFKSNRLDQNNDDDSIVEQYIPEIQNIIEDSSSITELSIGLETFCSSIETEDKKLKALINKLNRFNKYLISRQDLSIVEEKEKLTNILNKKENLGAVKGGIKELSEEIEESGYEYLGEYFYHILYKNNIQIRNKYTSREEHYEKEFNKICKIQEFTDKQKEDFWKAIFYQRPLKSQKGLVGKCVFEKDKPRCPISHPLFEKYRMLCFLNSIKIKTPSDDRLRPLSGDERAKCIPLFYRKSKPNFDFDEIRKKLAPSGVTCAYSKSRESSTAEYIFNFHFKTSVSGCPTSANLKSVFGGDWEYELFRLYSNKALKNREKTVDEVVHDVWHVLFSFDSKDKLEEWCIKRLKRTNEIALKFSKIIIKQDYASLSLKAIKKILPYLEIGYLYSHSVFLANLPSVVGELWNDNEIKNNIEKSINDILDNQVEQNIAIDIVNGLIKDYRENNVDIVMLPKLVAQYKEDLHVQLEKRYGKDVWGSFSDEQKKYYKDFILESFEEYALKNMGKGTFYKKLRTDERIIKYLREVHNIDQNKLQEIFHPSDIDVYKKAIRASDEKFYLGSPRTDSIKNPVAMRSLYQVKLVVNELIKQDYIDEKTKIHIELAKELNDANMRIAIKRWQKNNENQNMKYCEEIKKIYEAECNEVIEPSKDDILKYKLWEEQHHICLYTGASVGIFDFLGNNPKYDIEHTIPRSLSCDNSQENLTLCEKRYNRDIKRNKIPSELSEYQTIMQRLEPWRKDIENIDKLIYSAKRQIKGASTKEMKDKAIQKKNQLILEKNYWQNKYKRFEMQEVPDGFKNSQLVDTRIITKYARMYLQTVFNKVYTVQGKVVSDFRKTWGIQNEYEKKSRINHIHHCIDAVTIACITLDNYNALAHYYYHLEQMENKKGEYKPDNFSKPWETFTQDVKALEHNVLVTHDTPDKLLIQSKKKLRRRGKIQYNDEGKIKYQIGNTVRGSLHKDTYYGCIKSLNNKTGEYELKYVIRKSLKELKESDIKNIVDKGVKEKIKSVIDKKGFKKTMSEIIWMNQKKGIPINKVRLKANVTSPISLKKHRDISEYQHKQNVYVVNDGNYVMGIYEIKSRGGKLLRDFQVVSNLDAIKNKESLDFFGFPLVKKRNKYELPLKYYIKKGLMILLYEKEKDEIWELNQQEKCKRLFEIIKFDARPRIICRYHQEARVAKEINEEFNVNYDSIQSQVSLSLNNFNALIEGCDFKIDVLGNIIKLNYD

SEQ ID NO: 4220 - protein, 1460 aa, unidentified
  REGION 1..1460: note = Description of Unknown: Cas Enzyme sequence
MKTAGFDLGTSSIGISIRDTSRSNNIKEQLEFFSSVIFQSGVGKGKSGEFSFAAQRTKFRSTRRLYQARKYRIWETLKLLIKDGYCPLSMEDLEKWSKYDKNKGLKREYPINANRFEQWVRLDFNEDGIADYSSPYELRAELATKQLDFSKPTNKYKLGRALYHIAQRRGFKSSKGETVKEQENETDNKTSENNEVEIDSLLKKSEEKKSKNLTSYMAEFQLPTIGCAFNRLIKNGIRVRESEYQAVRSQYKEEIFTIFKFQEGLSLESNFYKRIISEKKKEGTIFFKRPLKSQKGLIGSCTLEPKKQRCPISHPEFEKFRALCFINNIKFRRSTDEEWQILSYEQKNRLFNEKFLRTITNFKFDELRVWLEKEIGYKLDYKLKTINYKNKSNVAGCPISGRFKKILGDNWQMFLHETNRTRIDDKTKRSHYISYTIEDLWHICFSSDEAEQIEDFAKRKLGFNSDQTNLLIKIWGAIQQGYANLCLKALRNINQFLEKGLIYTDAVLLAKLPEILGEKIWKENEELFLNEISNITRKNKREKRIINIVNTLIANYKALDYNEQFAFRNTEYTLDNSDFNEIEKFAIESFGIKTWDEKLNAEERKQIINRIAKYYQDFFIKPENKRDFIKLPKLGDSIRQFLSDKFSFLSNTELKKIYHPSMIEFYKSASEQKIERDGILLSLKLLESPKIGAMKNPMALRTLHILRKQVNELLLNGVIDEDTRIVIETARDLNDANMRKAIEAYQRERERENKEFEAAIKSHYNDNSRLVSDNEIDKIRLLVEQSDIPEKGEPIDITQEKETNNKKKKNIIEKADSFKKDITKYRLWIEQGCRCIYTGKLINLSSLFDSNKVDFEHTIPRSISFDDSLANLTVCDAHYNRTVKRNQIPTNLSNYNEILQRIQLWIDKVEKLKDNVEFWMNKAKHAQDKDKKDYAIQQRHLWQMELDYWKNKVERFTMTEITSGFRNSQLVDTRIITKYAYHYLKSIFNNVDVQKGSVTANFRKILGVQSIDEKKDREKHSHHAIDATILTLIPSAAKRDKMLELFYKIQEKRKMNEETTQLTDELTKEKRSCNLGGNISEIPKFIEENILINHYTKDQTLTPAMRKARRRGKEILVKNKNGELVNKWATGDCIRGQLHKDTFFGAIKYPEIDDVGMPKKENNKYVYPEKETITMVKRYMLKEFTNETDFEKIIDPNVRKSIKITVKKKMAEGKTFAVAISENIWMIDCEGNEKRFDKNGKQLHPIRHVRCKVAAGRGFFTKDKALEIKEQTYKSTKRLIHLENRIYKESYFAQNDGNYLCLLYEGINKGKLERKFKLINYFEISKLNLNNTNKIWDEPYFKSIDEGNKKYDLNGILKIGTKVLIWDKSPDELIELSNGFEDKKILLKRLYSIFKFNDVGSVYVFLQNHIESREDKVLGQGDTFYDSSKYQARIMLTANSFNCLIENRDFFIKSDKIYFK

SEQ ID NO: 4221 - protein, 1354 aa, unidentified
  REGION 1..1354: note = Description of Unknown: Cas Enzyme sequence
MEKNYYLGLDLGSNSVGWAATDEDYNFLRLKGKTAWGARIFSEAKDCKERRTYRSNKRRLARRKYRLVLLKQLFAEEMAKVDKTFFLRLANSTYWEEDKTKDSDGNEIGKNLIFKTHEEEKQYYTKYPTIWHLRKALIENDEEALSNLRYVYLAIHHIVKYRGNFLTEGEMGNDIPPISTIEEINQTLSLLEVDSSEDATDKTTYIKPESYNELFTILENNNLNKVKKQQEIDKLFLSSKERSENIKNYINLFKTIIVGGSFSLKKINEDTEDISVDFTKDFENSEADISKALGDAFNLVLIAKKYYDYIILKELLGKNKEISEAMVQIYEEHKDDLKSLKTILKDLDNKLGNDGKDRIYYSVFKQEPTEKFKETNYLSFVQGGKLEELNKYIKKILENNEKDIDDKETYNALYEKACKGDLFKKQANACTSLIPHQFHLRELKKILENAGKKYPFLNDISDKIIKIFKFRVPYYYGPLNNESDAHSWVVKKEGQEKAKITPWNINEIIDTPKTRDNFFKKLTNSCTYLVGETVLPKTSLYYEKYLVLDRLNKMQVNGDYLSYSEKNDVLNFILSRKTTTIEQIRTYFSKTRSTKANDISISNIKATDPFNAVSHAFYGKHLDLNNSKNINLCEELIKFATIYADDKKELKKFVSSNFNLTDEFIKEYLNTPTNKWGRLSKKFLCGGDQLEMYYVDDNGILHSILNILEETNENLQEILNNEKYGFNQKIADFNNTLTADKTTEEQIEDILDSTPALMRRSIIQTLAVVDDVIKAAGKAPQKIMMEVTRTDGKKEETKSRYVQLKKQITNDKVLTSDEKKEWLKNLDEQNQLKRLKGKHIYLYFMQMGIDFYTGKRMDINDVINGKYDIDHIIPQSMIKDDSLDNMVLVSKDYNQKVKKDIYPICDEIRNNMLDKWKGYYARKIISEEKYNRLKRTKELNADEINAFINRQINVVNYSNIQIKRIFEIKYPETKIIFSKASFPSLLRKEYEIAKMRDLNDAHHAVDAYLNIVCGNILTTLYTDIFYMFKEKKEDHKNISFNMEKRLINYIDKNNLKDKIKTSCLRHDALITYKPDYDSGKFYKETIFKKSGDKETGLIPLHTKGPMSNTKKYGGYSSFSQSYIIAVEYKLKNKTVKKLCRVPTLYLKQYNNDLNTIAKIMIDDEKATDIKVLRKIYLNQKIKYNGCYYLIYTANENKNKYKVAYQNYLDNNYLIYLNKCLKKIDELDDGELTSQEFIVNKDGDKFLIDKNHNLEIFKAIKEKYNNPIYDYTPYIVKSREMKEEDFNNLSLKKQIDTLLNMIKILSRSNEQAKFETAFFENFTKVFLKTMTITNEKVYIVNESPSGLFKGKEELI

SEQ ID NO: 4222 - protein, 1204 aa, unidentified
  REGION 1..1204: note = Description of Unknown: Cas Enzyme sequence
SGEVTFDNRWLIPGEQESFEIIDNSKVKLESGIYEIIMSGHIGEVDDTHGGEVYLQDDNGSSIKDLTFKLPAGNDKQIYFSKDIIFRFEVPTILQIIVNITGDVQSSKVVISDVSLLLKKINEDTEDISVDFTKDFENSEADISKALGDAFNLVLIAKKYYDYIILKELLGKNKEISEAMVQIYEEHKEDLKSLKTILKDLDNNLGNDGKDRIYYSVFKQEPTEKFKETNYLSFVQGGKLEELNKYIKKILENNEKDIDDKETYNALYEKACKGDLFKKQANACTSLIPHQFHLRELKKILENAGKKYPFLNDISDKIIKIFKFRVPYYYGPLNNESDAHSWVVKKEGQEKAKITPWNINEIIDTPKTRDNFFKKLTNSCTYLVGETVLPKTSLYYEKYLALDRLNKMQVNGDYLSASEKNDVLKFILSRKTTTIEQIRTYLSKTRSTKANDISISNIKATDPFNAVSHAFYGKHPDLNINLCEELIKFATIYADDKKELKKFVSSNFNLTDEFIKEYLNTPTNKWGRLSKKFLCGGNQLEMYYVDDNGILHSILNILEETNENLQEILNNEKYGFNQKIADFNNTLTADKTTEEQIEDILDSTPALMRRSIIQTLAVVDDVIKAAGKAPQKIMMEVTRTDGKKEETKSRYVQLKKQITNDKVLTSDEKKEWLKNLDEQNQLKRLKGKHIYLYFMQMGIDFYTGKRMDINDVINGKYDIDHIIPQSMIKDDSLDNMVLVSKDYNQKVKKDIYPICDEIRNNMLDKWKGYYARKIISEEKYNRLKRTKELNADEINAFINRQINVVNYSNIQIKRIFEIKYPETKIIFSKASFPSLLRKEYEIAKMRDLNDAHHAVDAYLNIVCGNILTTLYTDIFYMFKEKKEDHKNISFNMEKRLINYIDKNNLKDKIKTSCLRHDALITFKPDYDSGKFYKETIFKKSGDKETGLIPLHTKGPMSDTKKYGGYSSFSQSYIIAVEYKLKNKTVKKLCRVPTLYLKQYNNDLNTIAKIMIDDEKATDIKVLRKIYLNQKIKYNGCYYLIYTSNEKQNKYKMAYQNYLDNDYLIYLNKCLKKIDELDDGELTSQEFIVNKDGDKFLIDKNHNLEIFKSIKEQYNKTIYDYTPYIVQSREMKEEDFNNLSLKKQIDTLNNMIKILSRSCENAKFDKSLNNECTKNFRISTTINTEKVYIVNESPSGLFKGKEELI

SEQ ID NO: 4223 - protein, 1311 aa, unidentified
  REGION 1..1311: note = Description of Unknown: Cas Enzyme sequence
MATTFSYDIGIASIGSAVEKDNKLVYMGTRVFNEAISAKEARLNRSSRRTTRRKTWRKNQMKEAFIDFGVIDEKDFKMPGFMSFTTNNQYLKRPIDNSVYHLRKRALSEKVTKRELLLALYNICGTRGHFLLETIDFSKGGISFEMYKDRFYQLTDSYVDFVQDTNEFEEVLKKVFDGNINNNEIKTIVSKNRFTIDEESESILIEFLRLLCNYKVKLQKISEKLDDFSSSVNVEDLKKQDELGSFYEEVIELYDLSNVARILKNYNYLCELAVDNMDEYRKSQQEGEEAYDVMKESIKSKAANNASHSRSVKNLANSFPNGLYVKEASEILRKQQEYYPEITERFIEVCTSIISARIPYYIGPLDENAKNAWVVKNQNFKYSYEDTMKQSNDKAVNEAESIKKWKLNMISRCTYLHDKYALPKGSFIAETFSILNELNILSAEDKNGNDYYLTRDDKIKVFDSLFLKNKIVKFSDICDVLDIGYFGPSNKSNKTTKFNNSYSVYLDIIRIDGKFCFNSIVEIFTDKEKVEKLEDLILDINLYNEEKSKLDVLINKHNYNMNDSKKLSRINSNGFFAFSKEIIMDETMNEKGETMLDILFSDNVSTYKNEQMTIIYNATDLNGVKREYFSNKYFKKLEKNNGKLTIDLLIEDGKPFIPISRPTIRALNECMKLYEAMVDAFGVPDKVIIETARDLKDSSREGLRPEKFRDTAKKLYEYVQSKSKEKKIKFNLEQWKDIDDYVEKNKLKIDLYIRQNGIDLLTGKRININNLSNYEVDHILPRGFGDDSKDDKMLVSKLSNSRKGDRLPLMYIEDPNTPQGETVSSSQFIRTVKELFELELISEEKRNRLLLDSYPALTEFVNRNLVDTRYIIREFMAILNAYSKYNNYNSSIVGIKSAYTNLYRKAFNLKKNRDFGVQHHAHDAALLIVAEKTLSKYYPDYGKGKIKPELYFSFVNKIKGENSDEENRKFIRIMYERTFNEKWYEHDSFIGQIKHQVPFYSIKVEKNWKGKFFDATIYKQEKRNENSVLSILGVNNDKRVFGSVDCVAVDFYKFVNDKKERQHIAIHIPKFIVSPDGQINKELYKKLITDYYKVDELLEDGEINEKFYRLRVFKNDLIFDTQTNCPYIFNVGSIANKTMEVKYLNVFSYNSIYDNADYLRKKITKKFNLRNKEQPDGIEYKELIISELITFLCNEKLLIFDTKKEKTIFKLLEKCKNINELSETIVFLSKVINRPFTPPKVFDQIKPTANNKLISKNPDAEYVKIKSNVLGIRFSNNNKGKLIIQSPKEKRGAYKMIKREKFSWKIGKVDV

SEQ ID NO: 4224 - protein, 1344 aa, unidentified
  REGION 1..1344: note = Description of Unknown: Cas Enzyme sequence
MMKWDAAKEYYLGLDLGTGSLGWAVTDEEYRIVKAHGKALWGVRLFEAADTAEERRMFRTSRRRLERRAWRIELLQEIFAEEINKVDEGFFLRLKESRYTPEDKKDVFGNCPKLPYALFVDSNYTDKDYHRDFPTIYHLRKWLMETDKTPDIRLVYLALHHLVKHRGHFLFSGNLSAIKEFSGTFRQFIDSIRGEELDFHISIEDEEIQQIEKVLKNSALTKSAKKSRLIKELNGKTSCEKAVLTLITGGTVKLADVFSREELNDSERPKISFSDSSYEDYIGSVASEIGEQYFIIEQAKAIYDWAVLVDILGDSSSVSQAKVESYEKHKSDLAYLKKLVKENLSTEAYRNIFIKTDEKIANYCAYVGMTKKNGRKCDIEGKQCSKSDFYAYLRKNVLNVIEDEEKTEYLREELDRETFLPKQVTKDNGVLPHQVHLYELDKILDNLKNKIPLLEKEGDKIRKIFTFRIPYYVGPLNGIKRGEDSTNWVQKKSREKIYPWNFTDIVDEEASAEAFIRRMTRKCTYLAHEDVLPKNSLLYGKFMVLNELNNLRINGEPVSVELKQKIYEDLFMRHRKVTQKRLRDYLIREGKADKQVDITGIDGDFKSALTGYHDFKEKLSGANLSEKDKEEIVKNITLFGEDKKLLGRRLKIMYPQLSDSQRKSLCALSYQGWGKLSDKFLQGITAPSPETGEVWTIIRTMWETNDNLMQVLSEKYRFAQAVESENGKDEVQGISYELVENSGVSPAVKRQIWQTLLVVKEICKVMGKAPKRIFVEMAREKQESKRTVSRKKMLLDLYKKCKSEEPDFMEHLEHTQEQTFRGDKLYLYYTQKGRCMYSGESISLEDLWDNRKYDIDHIYPQSKVMDDSLDNRVLVKKVFNAEKTDNYPIKSDIRQKMQPFWKSLLEGGFISKEKYKRLTRGAEFEPSELAGFISRQLVETRQGTKAAASILGQVFPDTEIVYAKAKTTSQFRQDFDLIKVRDMNDLHHAKDAYLNIVVGNAYYTKFTKNPMTYIEKNPGRSYNLKRMFTSDQDIVRNGITAWKAGENGTICTVREVMEKNNVIVTRRSYQAQGGLFDQQLMKKGKGQVPIKGSDERLWNIEKYGGYNKAAGTYFVLAESEDKKGNKIRTVEYIPLYLCQKLEQGAEEMLRYLSEEHELKNPRILLPKIKFDTLFKVDGFYMWLTGRTGKQLIFEGAVQLILDEKYAKTLKKALKYVQRQKENKNLKIGDRDGLDKEDLTALYDVFLDKLQNTVYHIRLSAQEKKLREKREKFIALSREEECVILSEILHLFQCQSNTADLSLIGELKNAGKLLLGKNITKCNQISIINQSPAGIYEQEIDLKTI

SEQ ID NO: 4225 - protein, 1379 aa, unidentified
  REGION 1..1379: note = Description of Unknown: Cas Enzyme sequence
  MOD_RES 1080..1083: note = Any amino acid
MDTAKTNKQPYYIGLDMGTSSVGWAVTDASYNVVKKHGKALWGVRLFEEAQTAADRRLHRTARRRIQRRKQRLALLQELFAKEICKVDPGFFIRLHESRLWQEDKSIDQPNTLFNDEDFDDKAYHKAYPTIYHLRYALMTENKSFDVRLVYLAIHHIIKHRGHFLLENYDLSNQEASGFDESYIALTNAIKELLQKEIPVGHVEKIQIILKDKSLSKKEKTEKILQVWDVIKDKQLKEVVQLVCGGTANLSTLFMDESLKEALKVFEIKDSKISFSNSVYEEKESDLQSVLEQRFDLVYAAKMLYDWSLLAELMGDRKTLSEAKIAIYETHKKDLEVLKRLTRQDKSLYRKLFRGTDKDSYSAYVGSCMIHGEKLVIEKRGSTEEFYKFLKKEISKLPDCEDKIYVLSKIEAENFLPKAVSTINGIIPYQLQEQELDIILKKAEQYLPFLMEKDAYGTISEKIKQLLTFRIPFYVGPLNRHSDKSWAVHTDKDGRILPWNFNERINKEKSAEKFITRMTNKCTYLLGKDVLPKNSLLYTEYMLFNELNNVKIGKAGTYLTEEQKEKLWKELFLTTKKVTLNKFSKFLIKEGIDKEEAVEIKGLDGGFKSSLAPWIDLKNILGEDFTRDKAEEIIKAITLFSMDKKILKKYLMRIVSEPVAKQLSKLRYTGWGRFSKEFLTEITPRVTDDVQVLVDTSTGEIMNIITALKKTSLNLMEILSSTYGYSAAISEANKELVGNTVLSYETVKELTVSPAVKRPIWQTLKIIKEITHIMGAEPARIFIEMARDKQPDKGRTDSRKKQLIELYKKCKEDVRSWSNRESKDWVEEIESKSDSQLRSNKLFLYYTQMGKCMYTGKPIDLGALLKGQLYDRDHIYPQSQTKDDSLDNLVIVDNTENRDKSNTYPLSKNIREKQIGFWKLLRDKGFISKEKYFRLTRNTPFSDAEKAEFIARQLVETRQSTKAVAEILKRVLPKSIIVYVKAGLTSRFRQYGEFIKVRDLNDYHHAKDAYLNIVTGNVHYTKFTSNPIRFVKDCQIYSLNEHALYKYPVERNGIVAWAPNKEGMMPSVTRWMNKNNILVXXXXRWMNKKNILVTRMSYVGQGELFDQLPLKKGKGQVSLKKDGPISDISKYGGYNSASTAYFMYVEGEDNKGKPVYVIETMPLHLAARLTTLEEKQKYCEELWMSTGGKLKNPKVLIEQIPIQSLFSVDGFRVTIAGKTGKQYGCRLAEELVLNNGYAMTLKAVLKFVNRRKMNKEALITSYDHLEESQLLALYDVFLDKLEHSCFSKRFSTQRDVLKNGRESYIALSLEDKCQILSEILHLFQCNATLSNLSLLGSSKQSGRLYMSKNLSDKDSWYIIHQSVTGFYEQHIPLAPYKKS

SEQ ID NO: 4226 - protein, 1334 aa, unidentified
  REGION 1..1334: note = Description of Unknown: Cas Enzyme sequence
MKKFYIGADIGTNSVGVACTDESYRLIRAKSKDCWAVRLFDEGETAFDRRTKRTARRRLARRKQRINWLQELFEPFIDDKTFFIRLNNSQYLPEDKDSLLCGNKNNLFENEGEESKFYKKYPTIYHLRKALMDGGNFDIRLYYLALHHIIKYRGHFLYEGSIEDIRDFSNLMKGLDCAIADSYDGGLNLFDSVDSAKVRDILIDKKSGLRDKQVELEKLLCVKSKREKEILKGITGQKISPYVLFGDEFKEEKSFSLNDMSDEEFESKRSSYGESFTLLDLMHSVCNYVKFEKIFEGHSDISSAMISVYEKHKADLVLLKKVVRKQSKEDYNKIFRSVNEEKNYVNYIGYTSKDGRKIKVKKCKDEDFFKYLKKYLNGILNEDNFDIVSKIIKEIDDRIFLPKILHSDNGLFPKQVNEFELKKIIENMVRNYAETEEMASAVLSLFNYKIPYYVGPLTGCNSWVVRTDEKVTPWNFDRVVDLAKSNEAFMRRMTNKCAYIKGEDVLPKASIIYQKYDTLNQLNKLRINDRVISIELKQTIYNELFLKYPKVTDKKIKELLVREGLCSSSETKDITISGKDGDFKSSMSSYIRLKNILGDFVDDDLKSGGKVCENIILWHTLNTDKKIVEDLIEKNYGFIPEIKANIKQLKGLTFNDFGRLSAKLLIGIEGVDKTTGQILTILDVLYQTNQNLNEVLNNESYNFSEIIDEENGIETEIISYETVEELYVSPAVRRGIWQTLLMIDEYVNAVGRQPDKIFIEVTRNDGKKGDNGRTQPRKRQLQEKFKNIGSAYSDIIEELSEEKYTDLKLRQERLYLYFRQLGRCMYTGERIILDELNGNRYDVDHILPRTYVKDDSLDNKVLVCRGANATKADTYPLPTEFSRKEVRAHWKMLLDKDLISKTTYDRLTRIEPLKDDDYNDFINRQKTITDQTAKAVIELLKRKYPNAKLIFSRAKNVNDFKNRFNLFKCRETNDLHHARDAYLNVVVGNVFDSVFSTPLGQSRKDGDVWRIYNLKKLFTRDVIGVWSKDSIKIVKDTYSKPSMSVSRYATCNKGKFYDETVCRKNDSAITAPRKGKGPLSDVTKYGGYTTQKTAYFAIVTSVDKKGKSIKTIEAIPVLVTYKLKTDTNAIQKYLESYLREPNIVVPKVKVKQLVSYNGSLCYLAGITNNQITVHNASQLYTDNTTDEYVNELIKIIGMGDNGIITGNESQYITKTNKDGVIRIVVNKENNEKLYETLKNKLDSKIYKGLSAFASFKKNMERGKDKFCELSVLEQAKVLLQILKVFRCNAEISDIQAIGGTAHSGKKLFAKNITDVDFKLVNLSPAGLTVRIRKV

SEQ ID NO: 4227 - protein, 1336 aa, unidentified
  REGION 1..1336: note = Description of Unknown: Cas Enzyme sequence
MEKFFLGMDIGTNSVGMACTDEKYKLLRAAGRDCWAVRLFDESHTAAERRVARTARRRLERRKQRIGFLQSLFALLIEDKTFFIRLNNSQYSAEDKSAALNGDVNNLFSDDGFKDKDYHKKYPTIFHLRKALMSEPVTDLRLYYLALHHIVKYRGHFLFEGSMAEFHDASKLFEKLNAVCVDLYEERAPLFDTSKVSSAKEILLQRGKDREKRLIEFFAANDGVSKEIIKGICGYKISPQKLFVGRYKEEKSFSAEELSDEAFDALQATFGDDFALLESIRSVCNYITFERLLSGNSDISSAMIALYNKHAADLALLKKYIREHGTQEEYNRFFKFTGENSNYVNYIGYTKKGGDKKKVKICGREEFYRYTKDFLKKLSDDVNEDLERINNEIENKIFLPKILHADNGLFPYQVNEDELKKIIDNMVKNCPQTAGMAKAILPVFLYRIPYYVGPLTGKNSWAVRKEGKENEKVTPWNFKDVIDEAKSNEGFMRKMTGKCSYLYAEDVLPKFSVYYQSYNVLNQLNKLKINDCPISVELKQKIFKELFLTKKKVTDNAIKDLLVRCGKISESEKKSVTISGKDGELSVTMSSYIQLKTILGEFADEDLKNGGGVCENIILWHTLNTEKRIVEYLIMKNYGDTPVIAHNIKALKGLVFKDFGRLSKKFLCDIRAVDKETGELLTVTDILYRTNNNLNELLFSEQYNWQEVIRKENGEITDEITYEDIEKLYVSPAVRRGIWQSLKMADEYVRKIGKTPDKIFVEVTREDGVKGEAGRTISRKKQLQEKYKGIEGIADLTAELNEKTDLDLRSERLYLYFRQLGKCMYSGERIDLSTLSTDRYDVDHILPRTYIKDDGLDNKVLVLRSKNAEKTDVYPIPYGLVTAEARKHWQILLKKGLISDTNYKRLTRTEPLNDDDYGDFISRQKTITDQTAKAVIGLMAKKYPSTKMVYSKAKNVSDFKQKFNLHKCRETNDLHHARDAYLNIVVGNVYDTCFATPMAMFNKDGDKWRTYNLKTMFTRTVKGAWEQENNQSLLTVKKTYAKTSMSVTQYAYCFNGEFYDQTIYGKEDTGITAPRKLNGPLSDTSRYGGYKSQNTAYFAVVSSKGKKEKTIKTIEAVPVMVSYKAKNDPNFLQRYFESYLHQPVVLIEKLKKKQLVSYNGTLCYLAGVTGERIIVHNAVELFTDNKTDEYVNALGKLSDMEKNGRIDTQQEEYVIKTNRLKEVKLTVNRKDNIALYDYLLEKLNDKRYFGVGSFLSYYRTLLKAKEIFDTLSVLKQAATLLQILRFFKCNAETSDLSTIGGSNRSGTIRINKDITETEFSIIHRSACGLTERRQKV

SEQ ID NO: 4228 - protein, 1336 aa, unidentified
  REGION 1..1336: note = Description of Unknown: Cas Enzyme sequence
MNKKDFYVGLDIGTNSVGIACTDQDYNLRRSNGKDCWAVRLFDTANTAAERRVFRTARRRLQRRKYRLGQLQALFAPYIADDKFFIRLNNSQFFVDDKDECLSADKNTLFADSGYTDKEFHEAFPTIYHLRLALQNGHASDIRLYYLALHHIVKYRGHFLFEGSVGDIRDIKKLFVDLNTACEAVYADEVPYFDTQLCEQAKNTLMKPSGIRDKQKALEALFDGTSKAQSEIIKAMCGGKLAPKTMFEGRYEEEKSFSLSEMQDEAFDALAEVFGDDFVLLQALRNLCNFVKFEKLFAGQPNISSAMIAVYDKHAADLAMLKIFLKTYAPQMYNKVFRSVTESANYVNYIGYNKKKSAKTKVAPCKYEDFLAFVKKIVAAVDCADTELRDKILAEIDNKTFLPKILHADNGLIPHQVNEDELVKIVKSMTEAFPETQAMAKQILPLFRFRIPYYVGPLVGENSWAVRKSDERITPWNFNEVIDLAASNEQFMRRMTNKCTYLHGEDVLPKCSIVYQKFNTLNQINKLQVDGRAISVELKKKIFDQLFLAKSKVSDKMIVDLLVREGVVSPQERTQAVLSGKDGDVKASMSSYIQLKRILGDFVDEDISSGGNVCENIILWHTLNTDKSIVEDLLRRNYGDNPHITPYIKQLKGLMFADFGRLSDKLLTGLRTVDKSTGELRSILDLLYDTNQNFNEIIFDERYDFAELIRKENSGESTEITYEEDIATMRVSPALKRGIWQSLQLVDEYVAALGGTPDKIFVEVTREDGVKGNDGRTVSRKKQLLEKYKGVENIDELVAELQSDDVSDMRLRQEKLYLYFRQLGRCMYTGKRIDLSQLNTDLYDVDHILPRTYIKDDSLDNKVLVLRSKNAEKSDSYPLPQGFSNQAPFWKLLLDKGLIGEKTYKRLTRTAPLTDDDYNDFINRQKTITDQTAKAVVELLKRKYPQAKVVFSKAKNVSDFKQKFDLHKCRETNDLHHARDAYLNIVVGNVYDACFTTPMAQFRKDGDVWRTYNLKTMFTRNVKGAWDENSLATVKKTYSKCSMSVTEYTYCGKGAFYNQTVYGAGDTSVTAPRKANGPLANTARYGGYKSQNTAYFAIVDSLGKKGVTQRTIEAIPVMVAYRATTDTNAVFDYLTNTLQLRDVKVVVPKVKKNQLVSYNGSLVRLTGVTGVYITTNNDRQLFTDNKTDEYVNQLLKLLEMDKNGRVDKTASEYVMKTNRMGDVKLVVDKAHNENLYNCFVEKLQGGKYGKLSSFVTFGKNLQSGKEKFANLTTLEQAYVIVQILRFFKCDAQTADIRLIGGSGLSGKVLFNKDITTVDFQLIDQSPCGLTVRTRKL

SEQ ID NO: 4229 - protein, 1119 aa, unidentified
  REGION 1..1119: note = Description of Unknown: Cas Enzyme sequence
MKYRIGLDIGIGSIGWAVISGDRDNARIEDFGVRIFDSGEKNSGKDRKSQERRGFRGTRRLIRRRKHRKVLVKNHLKNIGFLNDSFNDDLDSLKNENVFVLKVRGLDEKLTPAEFYKCLVHFCNHRGYNDFYENDEYDEESESGVNKKAAHLFDEAFENSGCRTVSEYLISENTTNHSIIYRNRDSRKSDFSLIRRYLLKNELDEIIKKQQEYYPCLKGERGTIISEIVFNQRIFEEGPGDPNNQHRRYKGFLEKIGQCPFYPEEKRGFRCTVISDIFAVVNTISQYRFVNSEIGEVDFNPIVAESILFKILHDGNITMTDVKNIAKNHGYKMLKSENSDDKALSKSIKFIKVAKKAIESAGGNWEDYYSENHLDPDKFSTLNEIGRVLSEFQTPSKREEKLREIDGITDEIRKELSGRKFSGTAGASYRYMIDAIEAFRNGEIYGNFQANFNKSVSENNATEKSNKISSKITDDLDIKDNPVVFRSINETRKIVNSIIESYGSPEYIAVEVASDLNRSYDNRIKLMKLQKNHEKDNDRIKKHIGELIGVDESEVQGIQIERYKLYEIQDGKSLYSGKPLGDIVDVIKNTNYAYEVDHIIPYSLILDNTINNKALVHQTENQQKGQQTPLMFLNGEDKNNYIARVNELYQRKKGAISDIKYKYLMLETILGKDAEDILNGWKSRNINDTRYITKFIISLFEKNLKFATEDNKKRVFGVKGAFTSRFRKIWLGGTEWGEDEKNRDSYLNHAIDAVVVANLTPAYLEIASDSVKLQQIRKRIRKGSNIEFDDYLNRCCKKMEKYYGFKEDYTLHLLTGTKTVPAYLPRIKEEVEARFIDNDEKLFKDKIKKLYGNNTSFTVEPHMPIVSCKAERKFRGTIADSNPIKIVIKDGKALKVKRKKIAEITKKDIIKDTLYTGDKDLKETLKRIFSDISDNSYSVQKYLDENNLKKFITDGGNEVYKVSIVEGEKSNYYKIDISANNYTYLGELKYYCVEVYRDTKEKLRTRGVRYVDVVKKDKKLFMKEESLPNGYKEHIMYLFKNDFIQVWTKTGELKFEGYYQSVKTIGRSSFYFNINNSSKAEVKGISTSDNVQKIDISLRGVKGGIIKCSEPLSLIKESE

SEQ ID NO: 4230 - protein, 1353 aa, unidentified
  REGION 1..1353: note = Description of Unknown: Cas Enzyme sequence
MKKEKKYYIGLDVGTNSVGWAVTDEFYNILRAKGKDLWGVRLFEKAKTAADTRTFRSGRRRNDRKGMRLQILREIFEDEIKKVDKDFYDRLDESKFWAEDKKVSGKYSLFNDKNFSDKQYFEKFPTIFHLRKYLMEEHGKVDIRYYFLAINQMMKRRGHFLIDGQISHVTDDKPLKQQLILLINDLLKIELEEELMDSIFEILADVNEKRTDKKNNLKELIKGQDFNKQEGNILNSIFESIVTGKAKIKNIISDEDILEKIKEDNKEDFVLTGDSYEENLQYFEEVLQENITLFNTLKSTYDFVILQSILKGKSTLSDAQVERYDEHKKDLEILKKVIKKYDEDGKLFKQVFKEDNGNGYVSYIGYYLNKNKKITAKKKISNIEFTKYVKGILEKQCDSNDEDVKYLLGKIEQENFLLKQISSINSVIPHQIHLFELDKILENLAKHYPSFNNKKEEFTKIEKIRKTFTFRIPYYVGPLNDYHKNNGGNAWIFRNKSEKIRPWNFEKIVDLHKSEEEFIKRMLNQCTYLPEETVLPKSSILYSEYMVLNELNNLRINGKPIDTDVKLKLIEELFKKKTKVTLKSIRDYMIRNNFADKEDFDNSEKNLEIVSNMKSYIDFNNILGDKFELEMVEDLIEKITIHTGNKKLLKKYIEETYPDLSSSQIQKIINLKYKDWGRLSRKLLDGITGTNIETGEIDTVINFLRNSSDNLMQIIGSQNYSFNKDIDKLREKYIPQEISYEVVENLYVSPSVKKMIWQVIRITEEITKVMGYDPDKIFIEMAKSEEEKKTTISRKNKLLDLYKAIKKDERDSQYNELFDGLNKLDDSDLRSRKLYLYYTQMGRDMYTGEKIDLDKLFDSTHYDKDHIIPQSMKKDDSIINNLVLVNKNANQTTKGNIYPVPSSIRNNPKIYNYWKYLMEKEFISKEKYNRLIRNTPLTNEELGGFINRQLVETRQSTKAIKELFEKFYQKSKIIPVKASLASDLRKDMNTLKSREVNDLHHAHDAFLNIVAGDVWNREFTSNPINYVKENREGNKVKYSLSKYFTRPRKSKGQVIWTPEKGRKLIVDTLNKPSVLISNESYTKKGELFDATISGKRDYKKGTMYLPLKKDDRLQDVSKYGGYLTIRGAFFFLVEHTKSKKRIKSIEMFPLHLLSKFYEDKNTVLDYAINVLQLQDPKIIIDKINYRTEIIIDNFSYLISSKSSDGRVSVRPNEQMFWKVDEISNLKKLENKYNKEALLTDEDRKIIKIYINKIYQQIKAGKYKNRLGTEKIIENYEKTNLETLDNKQLYQLLMALITLLHKTISNKKNKNTFDFSMIGVKTKTENLRFTNLPDNTYLVYKSITGIYEKRIRIK

SEQ ID NO: 4231 - protein, 1371 aa, unidentified
  REGION 1..1371: note = Description of Unknown: Cas Enzyme sequence
MQNNFNDYYVGLDVGSNSVGYSVTNENFDLLRIKGKTAFGSHLFDQASDSKSRRIMRCNKRRLNRRKSRIYILNKIFESELNKIDDTFLLRLSESNYKLEDKSVKIKYPLFLEKNKEKQFYKDYKTIYKLRYDLMLGDEKALSDLRNIYLAIHSIIKYRGNFLTNGPINTKTIDNSIIDELNLSLESINKRINGVVDEDFDNFIEKEKTNDILDLLKNDETDKQTKKKTIKSFFNNVDSKNPIDKYIDLFCSLVVGGTYSIKNIEDYAENKDLKICFDNSYDENEEQIKSVLEDDFTIVKVAKEIYDFVFISKLLDKSSTISEAYMKIYNDHEKELEQLKNVVKEIDENKKVEKKLSLTYLIFKDKGIVEEGEEKNKDDKKEHSINYGSLVGVSTNCKKCSIEDFDKKIIKLLSENKGYCVENKNLLDEIIKKAEKNTFLRTISLVSNSTVPHQLHEKELEAILANASKKYAFINENKAKILELFRYRVNYAYGPLNENSVYSNIIVNDLYKGKHITFDNYKDAINISKTKEKFMTERTNYCSYILNEYVLPKNALSYTLFIVLNRLNSMTINGVRINDEEKKFILSHVFKNKKTTIDNLDKVLREKYFVNGEALIIGGINLKDDFCSDSMVCFSRIYGENELFNKIKEADDIVKVLTVYKDQKQDALDYIKKVYKYNEKMLSILNEYTFKNWGTLSAKLIYGIKDEQSKCSILDLLYESQQNFEQIYNNNNYTFKKQTEDLNSDFIGVKSKNEIVDYLLDKTPAIFRRSAIQTLKIIKEIVRATKKTPKIICLEVTREDNIQKSETYSRKHEIKTFLNSVIGDKKCDFYKNDGRDLLKDFEEEKVVAELKNKHIYRYFMQLGYDLYSGKKIDINDLMNSDKYDIDHIVPQSLIKDDSMDNTVLVSKDLNEKVKKNIYPVNKDIQTSCLQLWRYLKNKKAISQKKFDLLTRKEPLTDDELNEFVNRQINGLNYSNKVIVKAINFLYPNTQVVFSKAQYPSFVRKEFGIYKIRELNDAHHAIDAYLNVVCGVILNKKFGNLAYIKADKNCNDNSDLKLLNGSNISYKSYNFETSILNYIDNNNLKDRIIKNCFRHDVLMTYRLGYYNEEFYNQTIYRASDSSALIPLHTKTESKFLDTSKYGGYLSLHAEYFVIGKYNKKGKEEKILITVSHFDATRFNDKELSEYLKNKYASYDNLRFDLKQKIMNNQKVIYKKNCYLLFNSNEGQVTLKNISQLYFNKEDLEYIYYLKRFKEYNFKSEESVNIFTDRKQEQFVTINKTKNTQLLNLLISESKKEKYLGYNTLNALRNCDVVSFIQKNINEEIKEIFAFISLFSKELKVTFKISKNLILSKSNYFISDNTSGLFTKKILIK

SEQ ID NO: 4232 - protein, 913 aa, unidentified
  REGION 1..913: note = Description of Unknown: Cas Enzyme sequence
FLKEEDESGLTVSKKILSIFSFRVPYYVGPLSDRHKAEGANAWIVRKPGADGKIYPWNFDEKVDKAASNEAFIRRMTNKCTYMVGEDVIAKNSLLYSRYMVLNELNNLKIRGKEISVELKQDIFNHLFCSHTKVTGKKLLQYLRTYDKDLQTEDLGGFDQDFKANLSSYLDFEKQVFGERMAEDYVKNVCEDIIRWKTIYGDDNTMLMKIAERKYPGEFSKEQLKGIRRLRYSGWGNFSEKFLCGVEGIDRETGETFTIIEALWNTNCNLMQLLSSRFTFREEIDRMNAELTEDITEISYDKLVKDLYVSPSVKRAIWQSIQIVEEIKKIKGKAAKRIFVELARGGDIEKKRTKSRKAHLLELLEGCKVDGREWSKEIEARDERDFNSIKLYLYYTQLGRCMYTGEQIDLDQLMMANSSWDRDHIYPQSKIKDDSLDNLVLVKKNVNAKKSNEMLSDEIQQSQKEFWKALLNMNLISKKKYDRLTRKDDFTTDELAGFINRQMVETRQSSKAVVDLLKKMYADTEIVPVKAGVVSQFRQNDLNVLKSRRINDYHHAKDAYLNIVAGDVYHARFTSNPREWLKKEKDRKYHMNRVFDFDVYRGKTRIWEGPEGYGKKKNDCGEKFGGTLDRIREIVKQNDILYTEYTYCEKGELFNATIAKKTECVNIPLKEGLDTSKYGGYKSPKTSYFALIEFDGKKGERVKNIMEVPVYIVNMLSHKPDAYLEFCTEVKGLQNVKVLYPCIKKNALIRVDGYPMRIRGVNEKQLLLKNNLQPRLDEYEACIRHIEKYLEKNVRFDVDKQRDKLSEEDLTGLYDAITEKLKTVYKKRPANQWKTLEEGKEKFLELSLRDKAKVLNQMLNMVRCDIETKADLTAIGGSANAGNMAVMKSTAGKSRLILINQSVTGLFENRIEL

SEQ ID NO: 4233 - protein, 1448 aa, unidentified
  REGION 1..1448: note = Description of Unknown: Cas Enzyme sequence
MKKSNNEFKPYFLGIDIGTDSVGYAVTNTDYTLCKFRGEPMWGVTLFDSAEQCGERRAFRSARRRLARRRQRVKLLQEFFCGEINKVDSGFYKKISESALYPEDKTCEASYVITKDYKTIHHLICELMKPGKKHDIRLIYAACTWLVAHRGHFLSDMDPENTDAILDLKPTYESFLSWFEENGLSLPWECDLNKIADIICRKDKVAAKESAFCALAFGAKKPKDNAEEYPISRTAVIKLLCGGTIKLGKLFIADERASEINKSVVLSDADGLQEIIAEFEEGAELLKRLSALYDCATLSVILSGHKSISDAKVSEYEKHKKDLKELKCLLRKYDKTAFDEIIKSFCKGTDLSEVLKKYEDGFKIKIIGLFNETEPEKYKEAKESLNRLLKVYDSKTLSEILGGHKSISDAKVVEYEKHKNDLKQIKDLLCKYDKILYNTMFRDTSNNGYSAYVGKSKSVKREDFYDFVKSIVSEIEKKNESDKTIEKILSDIENKTYMPKQVNGDNRVIPHQLYYAELCKILENASEYYGFLKEKDKDGYVTSEKIKSIFLFKIPYFVGPLNSKKFGWIAKKSEEKIYPWNFEKVVDFDKCEQEFINRMTNTCTYLSGADVAAGNSLLYCKYSVLNEINPLKINGRPISTELKQRIFNEVFMPGITNKPKVTYKTLVKWLVANGIIKKGDETSISGIDTEIKSSMKPMFDFYRLMKEKKLKESEVEEIIKYSTYTEDKGRFKKWLGEKFELSAEDIRYISGKNYSGFGRLSEEFLNVIEGTDRETGETGTIMHFMWSTNDNLMQILSDKYTFREIINKRNRDYYDERTHSVQSRLDDMGVSNAVKRPVLRALEVIDDITKAKKSVPEKIFVEMPRGGAPEQKKRTDSRQKQLTELYKSIKKDADVQKMMNELNSLGDDANSRLRSEALFLYFTQLGKCAYCGKPINIDEIKSGSVNIDHIWPQAYVKDDSIHNNKVLVHSPENKDKGDVYPIKSEWQNKMRSYWDYLLEHKLITAEKHRRLIRNTPFSDEEKNGFINRQLVETSQSAKALTLLLTEKYPDTEIVYVKAKNVSEFRHKYGEIKNKAGLSDDEKNDEQLIKCRTVNDVHHAHDAYLNIVVGNVFNEKFTKKFNVAKDKYSLNYRVLFGKEFGNAPEVWNPQKHIAVVDKVMNTKFVHLTKYQTKKKGKLFDIQPVSAKPGLVPRKKGLDPAKYGGYNKPSMSFFSLIKYTKGKKTEVTFLPVDLLCADKFENDAGFAEKYIKDTLGNIRDLSFPLGKRIIKINTVLSLDGFEVCISGKCNGGALLLLRSLTTLYLPYEHVRYAKALEKTAEKLAYDKNYKVTELFNKITTEKNLELFEYFAEKIGEKPFSRIPGVKIVLDENEKTKFCNLTVNKQIEYLNNLILYFKTNRPGGIKINGITTGRLYISANLSNWKYNDIRIIDRSASGVFEKVSGNLKEIL

SEQ ID NO: 4234 - protein, 1344 aa, unidentified
  REGION 1..1344: note = Description of Unknown: Cas Enzyme sequence
VKLEEIDYYLGLDCGTSSVGYAVTDKDYNLLKARHKDMWGSHLFDEAETAEGRRIQRNARKRLQRRKERIKLLQSIFAEEIAKIDPTFFLRLNESSLWEEDRSSENKQSFSLFNDLDFTDKDYFKKYKTIYHLRADLASSAEERDPRLIYLALHHIVKNRGHFLFPGDSFSSVTDISPVLDALKESYYSVFDEELTIPDNNSIVDCLYEKVKSIRVEKLKASIFSENDKRKTNLVKAIVGYKIQAKNLFENEEYEELPAIEFSNNSFEENSLPTLEESLSDDEYKLIESLKALYDWALLSSIMSGKRFISEAKVELYEKNKRDLKDLKDLVKEYAPESYQDLFHGDKESFSNYIGFNRTNKKSQNKRVKRVSTENFYKKVKKILGTIVTDDPRKTRILEDIENDNFLVLLRSFRNGVIPYQVNKAEMEQILENASTYLPWLKVRDKDGNTPKSKILSILTFRIPYYVGPLNGHNNKNYWMIRKDDGKIYPWNFDKKVDEIASAESFIQRMTNKCTYLPTEDVVAKQSLLYQKFMVLNEINNIKINGEDISVEQKQDIYSLFKQGNVTRKKIEKLAVSKCWVQNGESISIDGIDETIKSKLSSYLTFKDYLESGKLTEADVDTIIYYLTLFSDGGKIVKSKLSSLFKDKLSEKELDKISRLKFSGWGNLSKKFLAGIEAMNPETGELTNIIGLLWDTNYNLMELIHNEATGIQNALNNKKQIPSLSYELLDEYRLSPKVKRQIWQALKIVKEIEKIMGHKPNKIFIETTRSNSSKKKGKRDESREDKLRKLLKDDTDSEIKEIYNILESNSKDTGKITSRNKRDKFYLYLTQLGKCMYSGEKIEIANLFTADYDVDHIYPYSKSKDDSLTNKVIVKSNLNREKSNIYPISEGIINKMTPFWKKLESMELIPSEKLYRLTRRTPLTDKELQDFINRQIVETSQTTVTLARILKNYYGESKVVYSKAGNVSKFREDKKIFKSRTINDLHHARDAYLNIVVGNTLNTKYTSKFFLQEQNRDDSNSFNFNFNSNVEGAWMADNNTSMNVVKATMEKNTVLFTKQPEMRTGKLFEVKLKSKGQELGMIPSKMSDYYKAGASLFKEWTDKYGGYNSLAISHFSLVKHKEKKSYVYTFVSIPMIRAKELLNRENLEKYCKDELMYEDFEIVREKVLFNTLLSVDGFLMTITSSDSGGDKICLESAVPLLLNNDLTEKVKKLVKHAKKTKDKNVIGYEDLDGISKSSNEKIYELLLKKAKLPIYKSRPANAIKVLESGYERFKNLTLEDQISALTSILDYFGMRNGIADLQLVGGKANSGKIRIQATVNPSKKRVFIIDQSITGIYDSWFELK

SEQ ID NO: 4235 - protein, 1398 aa, unidentified
  REGION 1..1398: note = Description of Unknown: Cas Enzyme sequence
MENKYYVGIDLGTSSVGWAATDENYNFLRLKGKTAWGARLFDGANTCQKRRERRSKRRRMARRKYRLLLLNQLFAEEMAKVDKTFFLRLANSTYWAEDKAKDDKGNDLGKNIIFKTWKEESEFYNNYKTIWHLRNELVKNNDNAFSDLRLVYLAIHHIIKYRGNFLTEGDNFNEKPTVELIRELNSILSKLDEENSNDFLLDDEESIIEDENNKYISEDKLDKLLEILKSDEYKSKKDKQNDIDKLFVKNRSQLIKKYIDMYKVLVTGGSFKISRIDKELGDLEIDFNNGFDENLDEIKSKLGNAIDLVFNAKKIHDYNSLSKLFGDKNANKNLSQIMVDVYDNHKKDLRNLKKVVRSVDVKLDKKGKESLYYSIFRPIKLTKEDNKRDENNKKTKKSQTPNYASFVQGDDINFKYVTLEKLNDNLKEVLEKNKQYIDDEETYIDLHDKAEKGILLQKPANVSTSLIPHQSHLQELKIILKNASDRYPFIKEIEDKIIKLFMFKVPYYYGPLSTSKSHPYAWVETKEEGTKITPWNMYDVVDEEKTRNKFMKRLINSCSYLDGEPVLPKVSLCYEEYLVLDSLNKMMLNGQFLSPSVKESVLKYILSRSKTTIGNIKTFLKKENELYQNELKDDDISISNIKSDIIFNASSHALLSKYFDLEKDKEMVESLILLATIYAGDSKSLIEAINSNKNYKELTKEQVNAISKLPTNKWGRLSKTFLCGGKDGEMYWVDESIGRCCSILEIMQETNKNLQEVLFDKTYRFQDKINKFNADLRGNKTVKDQIDDIYDEMPSVFVRSVTQTIAVLDDVVRAAKCAPNKIYIEVTRADQEKKETKSRYDALKEVIKKELKDEADRRDSLLEKLEYANNSRKLRSINVYLYFLQLGIDFYTGEPIKDLNDVINGIYDKDHIVPQSLRPDDSIDNLVLVNKDYNEKVKRDIYPIVAPIRNEKTLKLWKSYHKRKLISDKKYNSLIRTTELTYEEINDFVNSQINVVNFSNVQLKRILELKYPDTKVCFTKAIYASSLRQKLSIAKMRDLNDSHHAVDAYLNIVGGDILSNLYTDVFYLYDEKKNKKKNVSFDMEKRLHNYIEDNNLKDKIRTNCFRHDALITYKPKFSTSKKAGDLYKETIFEKADKDSVNLIPCHTKGPMKDTKKYGGYSQINQSYILAVEYTSGKKTVKKLLRVPTMYLNLYGNNEEELLKLIVNDEKAKDIKILRKIYINQKIKYNGCYYRIFTKGKNNIYKMAYQNYIDNNIVLYLNKSLKLSDDLIDKTIDSQTFIINNKGEKFIISKEKNKIIFDTIKERMFNKRYDECSYFEKAREMKFEIFNNLSLKEQISTLINMLKLLSCSTESVNINAEFKVEKRLLFVNSPDITKEEIYIVNESPSGLFKGKEELI

SEQ ID NO: 4236 - protein, 1391 aa, unidentified
  REGION 1..1391: note = Description of Unknown: Cas Enzyme sequence
MSNKIWYLGLDIGTASVGWAATDTEYKIIRKNKKRLWGVRLFEEATTADERRGYRSNRRRLARRKWRLNLLEELFEKEIAKIDSNFFLRLKESQYHYEDKTHQVPFAIFNDKDYTDKDYYKEYPTIYHLRTKLMTEENPDIRKVFLAIHHILKNRGHFLLQGQSFKDGNLNNLIKELLDLDILHIGFDVTEEVASKIATISLEKKTLTDKVNDLKKLYPKEKQLLEVFRLIFGGKTSLDKLFVIDEYKELDASVKSVSFKEKIYEEVRHDYEQVLSNYIELLDLAKLVYDSIILSDIKKEGKTLSESKVDLYNKHRDDLTKLKNLVKNDSKLSEDKKVELYSVIFKEDKDKGTNYVNYIRKSEEGKGCNYEDFKKFLVKELAKLEESTAKDEILRDLELELFLPLQRTKDNSVVPYQIHKEELIKILDNAGKYHEFLNEKDESGYSLREKVIQLLEFRIPYYVGPLNSSKKAKEDGFAWSVRNKGYENTPVTPWNYEKVIDESASAEKFITNLTNKCTYLKGEDVLPKSSLLYSEFTLLNELNALRYDGNRISLEARNTIIDKLFKQQGKKVTKTSIKNLLKAEGFIDGKGEISGIDITVKNDLKSYRDFKKILGDKFNSEHVENIILWITLYGESRKLIKSKIEAVYGDIYSKDEISKMSRLVYKDWGRFSRKLLTELVSKKIYNEETGECLNIIGAMRQNDILFMELLADRFDYSHQIEEFNKALQQEVTDITPEILDDLYVSPAVKRSIWQTVRIVEELKKIIGCAPSKIFVETTRSNQEKKKPTDSRKKQLEALYKAAKKDAKELEKEIGDLNFDTLNERLSSVEPSKLKAKKLYLYYTQLGRCMYTGEKIELNELNTNKYDIDHIYPQSKVKDDSFTNTVLVKRESNAAKTDRYPLGSDIQTPSNRRFWKFLKDKGLITVEKYNRLVRTEEFSDEELTGFIARQLVETSQSVKAVANILGELNQETSICYSKAENVSSFRQNFGKIKDGNRKSDNNEQLIKVREINDHHHAKDAYLNVVVGNVYDTKFTRNVFNFIKDKKDGRKYSLNNVFYEDVSNTNTVAWEMNKTVYQVEKVMINNNILVTRRTSEQKGGLFDATVYKAKVAAKAKEGVYYPLKTSNPIVKDVTKYGGYTSIGIAYYSIFEYILISKKGEEKITRIIPIPIYVSQNIKDDSSLLEFGSTQTNIKSGEEIKDFKIKYKKLCIGSFIFINNYPYYIGGKSGNRFYYDNAVQVILDYESELYLKILSKYNNWKKENKDGELWKNITKEKNTELYNNLVEKMNSGIFIKKKPNKYDEMNSEEIRNNFSNIEIDEQVKVLLEILNLLTNKKSTFDLKNIKVGAARGLQLFDLTKLNQFSIIEQSVTGFYEKEITIIGDKENDLENNNC

SEQ ID NO: 4237 - protein, 1391 aa, unidentified
  REGION 1..1391: note = Description of Unknown: Cas Enzyme sequence
MTNKTWYLGLDIGTASVGWAATDNEYKIIRKNKKRLWGVRLFEEATTAEERRGYRSSRRRLARRKWRLNLLEELFTQEIVKIDANFFLRLKESQYHYEDKTHQVPYAIFNDKDYTDKDYYKEYPTIYHLRTKLMTEENPDIRKVFLAIHHILKNRGHFLLQGQSFKEGNLNNLIKELLNLDILHISIEITEENINKITEIALEKKTLTDKVNDLKKLYPKEKQLLEAFRLIFGGKTSLDKLFAIDEYKELDASVKSVSFKEKIYEEVRHDYEQVLSNYIELLDLAKLVYDSIILSDIKKEGKTLSESKVELYHKHREDLTKLKTLVKNDSKLSEDKKVELYSAIFKEDKDKGTNYVNYIRKSEEGKGCNYEDFKKFLVKELAKLEESSAKEEILRDLELELFLPLQRTKDNSVVPYQIHKEELVKILDNAAKYHKFLNEKDDSGYSIIEKVIQLLEFRIPYYVGPLNSSKKAKVDGFAWSVRNKGYENTPVTPWNYEKVIDESASAEKFITNLTNKCTYLKGEDVLPKSSLLYSEFALLNELNALKYDGNRISLEARNVIIEKLFKEQGKKVTKTSIKNLLKAEGYIDGKGEITGIDITVKNDLKSYRDFKKILGDKFNTEHVENIILWITLYGESRKLIKAKIEAVYGDIYSKEEIAKMSRLVYKDWGRFSRKLLTELVSKKLYNEETGECLNIIGAMRQNNILFMELLADRFDYSQQIIDYNKELQKEVTEITPEILDDLYVSPSVKRSIWQTVRIVEELKKIIGCAPAKIFVETTRSNQEKKKPTDSRKKQLELFYKAVKKDVKDLEKEIGSLNFDKLNERLSLVEPSKLKAKKLYLYYTQLGRCMYSGETIDITQLNTTAYDIDHIYPQSKVKDDSFTNTVLVKREYNAAKTDRYPLGSDIQTPSNRRFWKFLKEKGLITDEKYNRLVRTEEFSDEELTGFIARQLVETSQSVKAVAGILRELNPKTLICYSKAENVSSFRQNFGKIKEGNRKSDNTEQLIKVREINDYHHAKDAYLNVVVGNVYDTKFTRNVFNFIKDKKDGRKYSLNNVFYENASNSNNVAWELNKTVHQVEKVMNNNNILVTRRTSEQKGGLFDATVYKAKVAAKAKEGVYYPLKTSDPVVNDVTKYGGFTKVKIAYYSIFEYTLVNKKGEEKITRIIPIPIYVSQNIKDDSTLLEFGKTQINIKSGEEVKDFKLKYRKLCIGDLVKINNFFNFIGGKTNDSFVYDGAVQVTLDTESERYIKTLSKYQNWKKENKDGEPWESITKEKNIELYNILVEKMNSGIFIKKKPNKFSELNSEEIRNNYSSISVEDQSKVLLEVLNLLTNKKSTFDLKVIKMTAARGIASFNLTNQNQFSIIEQSVTGFYEKEITIIGDKKNDMENNNC

SEQ ID NO: 4238 - protein, 1359 aa, unidentified
  REGION 1..1359: note = Description of Unknown: Cas Enzyme sequence
MNLRNIPSYNVGLDIGTGSVGWAVTDENGNLCHFKNRPTWGSRIFPSANTAAETRLKRGQRRRYDRRRQRLDLLQSLFDEEMTKVDPEFFIRLRQSKLRVEDREEGHREYRYPFFNSSDFTERMYYKSYPTIYHLRKHLIESDQQEDLRLIYLAFHNIVKTRGNFLYQDTPSLSAKDASMSEAIEELLNALVLWAGTAYDFEIDSEKLRKVFEDSSLTRAEKKDEALKVLTLEDKKIAKELINAVLGYKANFSTIFKIEAEKSAFSFDNDEQREAFIASVPDEGMVLYEALQKAYSAYILMDIIEDANGKSVSYSMVAKYNKYGEDLKNLKDLVKEYCSTKYSEFFRGERYEAPYQKDYDKSKAKGYTKYNEVRGAKYDDFKKEVENLFKDTAATSDPRYQDMMTKFANGKFLRRLKTSDNGSIPFQLHLEEMNAIIDAQEKFYPFLSEIRYKLNFLVTFRIPYYVGPLTQKGAALDTSGKPRFAWSKRQEGKEGEKIYPWNWEDIIDKGASAREFIQRMTGTCTYLYGEPVLPKCSLLYEKFCVLNELNGAKWSQDNDKWYRFDADDRLSIYEELFERYKSVSFKKLEDWLKQRGEAFPHVKGGQGEGKFESKLSSHHFFKELLGTDEWSDQTKQMIEELILWNTLFEDKKILKEETTKKYGDVLTAEQIKKFCGHRFTGWGRLSKKLLTGIKTEVDFRKMSVMDLLIEGDPYGEHVGSSLILMEILHNKNFEFSKEIEAHNEKYFSKDQSVEDLPGSPAVRRSVNQALRIVEEIAKIAGKPAAHIYIESTRDDEEKKRSEKRADKIKRLLSELRPEDKNTDVLKELNEYVGKNLDKRLTLYFMQNGKSMYSGKAIDIRRVSDNTYCQIDHILPQSYIKDDSLENTVLVLSDENQHKGDSLLLDADIRRKMAGIWHELHRVKLIGDKKYKNLTRSVVTDRQMEGFINRQLVETSQIVKFVRMLLKSQYPDTEICSIKASLSHEIREKYDLPKIREVNDYHHAHDAFLACEMGRFLSIRYKEAFTNPVGLTKLMRKFVKKESEEAQKQHRIPGTTPFFVASFSRPGFDLETGEVTRDEWNPIEEVEKIKKTFDFKQCFVSRMPEMTSGAFWDETVYSPKGKEKTLIEMKKDLSVEKYGGYSGENSAFFFIYKSKGESEHLNFAPFPLSLATRKDDIYHLIETYAIDLCREAKETFTGIIIPQIYKYQKIEWNGQQFYLTGKKEIRSAASIFFSQQDQLCLIKYGSNSSSVSEEMLEAFERFSQRAYKQSEKLYKQLKLEDSRQVICDLSNQQVYEIICGLASIFNGKINMLNLSVIGGSKYSGCMHPSISSEINKRENTFFVIDQSVTGMFERRRRIGL

SEQ ID NO: 4239 - protein, 1375 aa, unidentified
  REGION 1..1375: note = Description of Unknown: Cas Enzyme sequence
MKKTEGTKTSKDTEKARDIKMVKDTKKVKDIRKATEYFIGLDIGTSSVGWAVTDTKYKLIKFNGKKMWGSRLFTEAATAEERRNHRTNRRRLQRRVDRINLLEEIFSEEISKVDPEFFIRLKESKFHLEDKVIDEKNIIFKEKEDGDEKYYEKYPTIYHLRHALIQGCNDIDIRELYMAVHHIIKYRGYFLFKGDISDSGASINDNIIEIIDLMSSVAGMKKLEYNDKLIEEIRNIICNVDKTINDKKKDINKVFSGSNNDYKAYKSIFALVVGAKVKPYDIFLEEEYKDLEDIKGIVFKNTEYEEVRDVYEQVFEDRVRIIDAAKSLYDMIILLSIKPEGKGLSENKVDVYNKHHEDLTLLKEVLKEDMTIYNMVFREDKKDGTNYINYIKKSKYGKGCSREDFYKSLKKALEKLEVNEKIEHILSEIDLERFLPLQRVKENSVIPYQIHRDELKKILANASLKFNFLNHASEGYSNIEKIIKLLEFRIPYYVGPLNNHHPVDNKETKGFSWIVRKEAGRVKPWNFDQLVDKKASAEKFIKNLTNKCTYLVGEDVLPKESLLYSEFCLLNELNNIMYDGKKLSLDAKNDLIEKVYKKEKKKLTKKGIKDFLKQNNYADGKGEVTGIDIDIKSDLKSYRDMVKIFGPDFGHKMAEDIIKWVTIFGESKDILESKIRESYGNMVDDKQLKMIKKLSYKDWGRLSKTFLTEIRSDILIDECTGQGKSIIESMRTRDQILMQLLRNEYDYTKKIEEFNREKQTDTREISYDLLKDLYCSPPVKRSLWQTIGIVEEIKKIMGHEPKKIFVEVTRTNKAEKKRTNSRKKRLLELYKDIKDGARNWIDEIEKTEDSKFNSKKLYLYYTQMGKCMYTDNIIDIETLFTDMYDIDHIFPRSKTKDNSFDNLVLVTRKANEDKGNAYPIDPSTQKKKIDLWRSLHERKLIGDKKFERLTRKHGFTDDELSGFIARQLVETSQSSKAAAEMLNMINKNSEVVYVKAENVSDFRHDNKFIKVREVNDHHHAKDAYLNIVVGNVYNEKFTKNPLNFIKDGGRKYSLNEIFKHPFPKNSGIIWDPEVSMETVKKMMKSNDVRVTRKVNEKKGALYDATIYKATNAKEESYFPLKIRDDRLKDVRRYGGYTSIKIAYYTIVSYDEISDKKQEHIVRMVPIPIYINESKNNFDDIIEYIHNTICSTSYSVENLEVVYKKLYEGSIIELNGFRYYMGGKTNDYVYIDSSVNLILDEQINKIISKIVKFYNSDFKRKNDDYINAENTIKIYKYLVSKKESKYYINKKLNKIDKFKSQASIDKFNELSLEEQCYILLEILNTLTDKKTTYDLKKIGISVSRSTTSMKLNSNQSFKVINQSITGLFENEIDILG

SEQ ID NO: 4240 - protein, 1365 aa, unidentified
  REGION 1..1365: note = Description of Unknown: Cas Enzyme sequence
MNLRNIPSYNVGLDIGTGSVGWAVTDENGNLCHFKNRPTWGSRIFPSANTAAETRLKRGQRRRYDRRRQRLDLLQSLFDEEMEKVDPEFFIRLRQSKLRVEDREEGHREYRYPFFNSSDFTERMYYQSYPTIYHLCKHLIESDQQEDLRLIYLAFHNIVKTRGNFLYQDTPSLSAKDASMSEAIEELLNALVLWADAAYDFEIDEVDSEKLRKVFEDSSLTRAEKKDEALKVLTLEDKKIAKELINAVLGYKANFNTIFKIEAEKSAFSFDNDEQREAFIASVPDEGMALYEALQKAYSAYILMDIIEDANGKSVSYSMVAKFNKYGEDLKTLKDLVKEYCPTKYSEFFRGEHYDAPYQKDYDKSKAKGYTKYNEVRGAKYDDFKKEVENLFKDTAAISDSRYKEMMTKFANGKFLRRLKTSDNGSIPFQLHLEEMNAIIDAQERFYPFLSEIRHKLNSLVTFRIPYYVGPLTQKSAALDASGKPRFAWSKRQEGKEGEKIYPWNWEDIIDKGASAREFIQRMTGTCTYLYGEPVLPKCSLLYEKFCVLNELNGARWSQDNDKWYRFDAEDRLSIYEELFERYKSVSFKKVEDWLKQRGETFPHVKGGQGEGKFESKLSSHHFFKELLGTDEWSDQTKQMIEELILWNTLFEDKKILKEETTKKYGDVLTAEQIKKFCGHRFTGWGRLSKKLLTGIKTEVDFRKMSVMDLLVEGDPYGEHVGSSLILMEILHNKNFEFNKEIETHNEKYFSKDQSVEDLPGSPAVRRSVNQALRIVEEIAKIAGKPAAHIYIESTRDEDEKKRGKRTTKRNENIKKMLSELKEEYKNADIFKQLAEHSDEQLDKRLSLYFMQNGKSMYSGNAIDIRRVSDNTYCQIDHVLPQSYIKDDSFENTVLVLSDENQRKGDSLLLDADVRRKMSGLWHELHRVKLIGDKKYKNLTRSVVTDRQMEGFINRQLVETSQIVKFVRMLLKSQYPETEICSIKASLSHEIREKYNLPKIREVNDYHHAHDAFLACEMGRFLSIRYEEAFTNPVGLTKLMRKFVKKESEEAQKQHRIPGTTPFFVASFSKPGFDLETGEVTRDEWNPIEEVEKIKKTFDFKDCFISRMPEMTSGTFWDETVYSPKGKERTLIETKKNLSVSKYGGYSGENSAFFFIYKSKGENEHLNFAPFPLSLATRKDDIYHLIEDYAVELCREAKETLTGIVIPQIYKYQKIEWNGQQFYLTGKKDIRNSAAVFMSREDMILILKYKTNTTDSNVEMIAVLKRLVERAKEKSEMLIKQLKLDGIDKKVSSLNARQIFDLICGLSSIFRGSEPVVNLDIIGGSKQAGRMQPDMNKKLNDSSNIFYVIDQSVTGMFERRRRIGL

SEQ ID NO: 4241 - protein, 1364 aa, unidentified
  REGION 1..1364: note = Description of Unknown: Cas Enzyme sequence
MNLRNISSYDVGLDFGTGSVGWAVTDENGNLCHFKKRPTWGSRIFQSANTAAETRRKRGQRRRYDRRRQRLDLLQSLFDEEMAKVDPEFFIRLRQSKLRVEDREEGHRNYRFPFFNSSDFTERMYYKSYPTIYHLRKHLIESDQQEDLRLIYLAFHNIVKTRGNFLYQDNPSLSAKDASMSEAIKELLKALVLWADASYDFEINEIDPEKLEKVFEDTSLTRAEKKDEALKILTLEEKKIAEELIKAVLGYEANFNTIFKIEAEKFKFSFDNDEQKEAFISSVPDEGMALYEALQKAYSAYILMNIIEDANGKSISYSMVAKYNRYKEDLRTLKDLVKEFCSDEYSQFFKGKKYEVPYQKDYDKSEAKGYTKYNVARDAKYDDFKKEVENLFKETAATSDSRYQEMMIKFANGKFLRRLKTTDNGSIPFQLHLEEMNAIIDAQEKFYPFLSEIRYKLNSLVTFRIPYYVGPLTQKGAALDAFGKPRFAWSERQEGKKGEKIYPWNWEEIIDKSGSAAKFIKRMTGTCTYLYGEPVLPKCSLLYEKFCVLNELNGARWSQDNDKWYPFDAEDRLSIYEELFERYKSVSFKKVEDWLKQRGETFPHVKGGQGEGKFESKLSSHHFFKKLLGTDEWSDQTKQMIEELILWNTLFEDKKILKEETTKNYGDVLTAAQIKKFCDHRFAGWGRLSKKLLTGIKTEVDFRKMSVMDLLVEGDPYGEHVGSSLILMQILHNKNFEFNKEIEAHNEKYFSKDQSVEDLPGSPAVRRSVNQALRIVEEIAKIAGKPAAHIYIESTRDEDEKKRGKRTTKRNENIKKMLSELKEEYKNADIFTQLDKHSDEQLSKRLSLYFMQNGKSMYSGKAIDINLIADNTYCQIDHVLPQSYIKDDSFENTVLVLSDENQRKGDSLLLDADVRRKMAGFWHELHRVKLIGDKKYNNLTRPVVTDRQMEGFINRQLVETSQIVKFVRMLLKSQYPDTEICSIKASLSHEIREKYNLPKIREANDYHHAHDAFLACEMGRFLSIRYEEAFTNPVGLTKLMRKFVKQESEEAQKQHRIPGTTPFFVGSFSKPGFDFETGEVEWDPIEEVEKIKRTFGFKECFVSRMPEMTSGAFWKETVYSPKDKKTTLALPVKGNLLPEKYGSYSSAQASFSAICRGKKKNKTQYYVVDIPRTKSVELYKNHSKTSGYLTKVLESSGVEFEKLIYPALLKNQAIEYGGQRFYVVSSTELRNGVSPSFSYDEYVFISNYFDKNQDDTSASLVIYDLLWKIVSSRMPILAEKLKLDSKRKVFAALDLEDSKKVLVSLLNTINGSTVHSDTKKIGGSTRTERICISISAQLNKNPAEFYVIEQSVTGMFERRRRIGL

SEQ ID NO: 4242 - protein, 1365 aa, unidentified
  REGION 1..1365: note = Description of Unknown: Cas Enzyme sequence
MNLRNISSYNVGLDIGTGSVGWVVTDENGNLCHFKSRPTWGSRIFPSANTAAETRLKRGQRRRYDRRRQRLDLLQSLFDEEMSKVDSEFFIRLRQSKLRVEDREEGHREYRYPFFNGSDFTERMYYKSYPTIYHLRKHLIESNQQEDLRLIYLAFHNIVKTRGNFLYQDTPSLSAKDASMSEAVEELLNALALWADTAYEFEIDEIDLEKLRKVFEDTSLTRAEKKDEALKVLILEDKRIAKELINAVLGYKANFNTIFKIEAEKSAFSFDNDEQKEAFIASVPDEGMALYEALQKAYSAYILMDIIEDANGKSVSYSMVAKYNKYGEDLKTLKDLVKEYCPKKYFEFFRGERYEAPYQKDYDKSKAKGYTKYNEVRGAKYDDFKKEVENLFKETAATSDSRYQEMMTKFANGKFLRRLKTSDNGSIPFQLHLEEMNAIIDAQEKFYPFLSDIRHKLNSLVTFRIPYYVGPLTQKSAALDASGKPRFAWSKRQEGKEGEKIYPWNWEEIIDKGASAREFIQRMTGTCTYLYGEPVLPKCSLLYEKFCVLNELNGARWSQDNDKWYRFDAEDRLSIYEELFERYKSVSFKKLEDWLKQRGEAFPHVKGGQGEGKFESRLSSYHFFKELLGTDEWSDQTKQMIEELILWNTLFEDKKILKEETTKKYGDVLTAEQIKKFCGHRFTGWGRLSKKLLTGIKTEVDFRKMSVIDLLIEGDPYGEHVGSSLILMEILHNKNFEFNKEIEAQNEKYFSKDQSVEDLPGSPAVRRSVNQALRIVEEIAKIAGKSAAHIYIESTRDEDEEKRGKRTTKRNENIKKMLSELKDEYKNTDIFTQLAEHSDEQLSKRLSLYFMQNGKSMYSGKAIDINRIADNTYCQIDHVLPQSYIKDDSFENTVLVLSEENQRKGDSLLLDADIRRKMAGIWHELHRVKLIGDKKYKNLTRSVVTDRQMEGFINRQLVETSQIVKFVRMLLKSQYPETEICSIKASLSHEIREKYKLPKIREVNDYHHAHDAFLACEMGRFLSIRYKEAFTNPVGLTKLMRKFVKKESEEAQKQHRIPGTTPFFVASFSRPGFDLETGEVIKDEWNPSEEVEKIKRTFDFKDCFISRMPEMTSGTFWDETVYSPKGKVKTLIETKKNLSVEKYGGYSGENSAFFFIYKSKGKSVHLNFAPLPLSIANRSADFDKLVENYSRELCNHDGEQFIELVIPQIYKYQKIEWNEQQFYLTGKKEIRSAASLFFSQEDMLLLEKYQSDESKCNDEMVDLVRRLIKRSYKHSERLYRLLKIESYAVSIPELSFKQAYELVCSLASIFNGKINMINLSSIGGPKFAGCMRATFNNEINNSNNKFYVIDQSVTGMFERRRRIGL

SEQ ID NO: 4243 - protein, 1367 aa, unidentified
  REGION 1..1367: note = Description of Unknown: Cas Enzyme sequence
MNLRNIPSYNVGLDIGTGSVGWAVTDENGNLCHFKNRPTWGSRIFPSANTAAETRLKRGQRRRYDRRRQRLDLLQSLFDEEMEKVDPEFFIRLRQSKLRVEDREEGQREYRYPFFNSSDFTERMYYKSHPTIYHLRKHLIESDQQEDLRLIYLAFHNIVKTRGNFLYQDTPSLSAKDASMSEAIEELLNALVLWADAAYDFEIDEVDSEKLRKVFEDSSLTRAEKKDEALKILTLEDKKIAKELINAVLGYKANFNTIFKIEAEKSAFTFDNDEQKEAFISSVPDEGMALYEALQKAYSAYILMDIIEDANGKSVSYSMVEKYNKYGEDLKTLKDLVKEYCPTKYSEFFRGEHYDAPYQKDYDKSKAKGYTKYNEVRGAKYDDFKKEVENLFKDTAAISDSRYKEMMTKFVNGKFLRRLKTSDNGSIPFQLHLEEMNAIVDAQEKFYPFLSDIRHKLNSLVTFRIPYYVGPLTQKGAALDASGKPRFAWSKRQEGKGGDKIYPWNWEEIIDKGASAREFIQRMTGTCTYLYGEPVLPKCSLLYEKFCVLNELNGARWSQDNDKWYRFDAEDRLSIYEELFERYKSVSFKKVEDWLKQRGETFPHVKGGQGEGKFESKLSSHHFFKELLGTDEWSDQTKQMIEELILWNTLFEDKKILKEETTKKYGDVLTAEQIKKFCGHRFTGWGRLSKKLLTGIKTEVDFRKMSVMDLLVEGDPYGEHVGSSLILMEILHNKNFEFNKEIEAHNEKYFSKDQSVEDLPGSPAVRRSVNQALRIVEEIAKIAGKPAAHIYIESTRDEDEKKRGKRTTKRNENIKKMLSELKEEYKNADIFTQLDKHSDEQLSKRLSLYFMQNGKSMYSGKAIEINLIADNTYCQIDHVLPQSYIKDDSFENTVLVLSEENQRKGDSLLLDADIRRKMAGLWHELHRVKLIGDKKYKNLTRSVVTDRQMEGFINRQLIETSQIVKFVRMLLKSQYPDTEICSIKASLSHEIREKYNLPKIREVNDYHHAHDAFLACEMGRFLSIRYEEAFTNPVGLTKLMRKFVKKESEEAQKQHRIPGTTPFFVASFSKPGFDLETGEVIKDEWNPIEEVEKIKRTFGFKQCFVSRMPEMTSGTFWDETVYSPKNKTMKLALPVKGNLLPEKYGSYSSIQLSFSAICRGKKKNKSQYYIVDIPRTKSTELYKNSITTSNYLAKVLRSSGVEFEELIYPALLKNQVIEYGGQRFYVVSSGELRNGVAPSFSYDDYAMISNYFDGNKDENATALIIYDLLSKTISSRMPVLADRLKLDSKRAAFSALDCEDSKKVLVSLLNTINGSKVPSDTTKIGGPTRTERICISIAAQLNKNPAEFSVIEQSVTGMFERRRRIGL

SEQ ID NO: 4244 - protein, 1357 aa, unidentified
  REGION 1..1357: note = Description of Unknown: Cas Enzyme sequence
MQEYYLGLDIGTDSVGWAVTDLQYKILKKNGKALWGTRLFPEANTAADRRANRIARRRIERREQRIALLRDIFAPAVAAVDPAFFQRLDESKFLEADKRPDGSGAPLGKYALFADGAYCDRDYHREFPTIYHLRRALLLEDRAFDVRLVYLAAHHILKKRGHFLFGDLALEDVTFESCLSELRECLREEYDQEFFLQDEESFSQALRDRSLGANRKKDALREAMGPDAKDRQLSTLLDFLAGKKGSAAALCGLELAEDVKFSFKDDFEAAEPQLIAALGDDMNLVYCAKRMYDWSALAEILNGERYLSCAKAKEYEKHKEDLQRLKGVLRDFPAEYRAMFRKSDVEHNYAAYSGHGSAQQRCNADDFLAYVKKVLGALREKMNAASRAEVEAILNEVEAGTFLPRQSSTANGRVPYQCHEKELETILERASRYLPFLREKDESGLTAQEKILAIFRFRIPYYVGPLNPKSKNAWLVRGEEKIFPWNFDQVVDLDKSAENFITRMTAKCSYIGAPVLPRDSLLYTRFVALNMLNKLSVNGHPISVALKQEIYEKHLIPRGKTNFKALHQWLLSNGKLQKSDELGGVDEEFKLAMPGYAVFRNLLARGNSEDMVEEIIRHIVLFGKERKLLSHWLEREYGGRLSEEDRAYVLRQRERFSGWGNLSAQLLRDIRCPVEEGGEPLSIDEALWRTNCNLNELLSNQYGFASAIEQRRAQVLGREKPTLEEFLRDSYASPGIRRAIHQSMGILDEIQKLMGGAPKRVFVEVTRGEGAKERTQSRKKQLEALYKSCKKDAEKIYEDYAELYAHLQKQDDAALRGKKLYLYFTQMGRCMYSGRRIDLADLFAEGYDIDHIHPRSVVKDDSFDNLVLVRAELNRSKTNDYPIRDSIRETMRGHWTFLRKHGLISEEKYRRLTRATRFEDSELAGFIARQLVQTGQAAKIVAELLRQRYGDDRVVYVKAGNVSAFRQDQRITAEGEQKQAGACKGLKIPQDPLFVKCREVNDFHHAKDAYLNIVVGNTYHVKFTRNPLRFVQSRQIYSMNHVFDYDVAEKDGFAWKAGEDGSIAMVRRMMRKNNILLTRYAREETGKLFDVQIVRKEKGKVPIKSSDPRMRTKDYGGYNSAKSAYFMLVEHGKGKKRVRSLEVVTILDKALCEREPLRYCEEVLGLEAPKVLISKIKIDSLFCLDGFRMHLSGRQGPQIKYKNANPLVLSPEWAPYIKQLAKCVERYAGEKEDVQLTAFDAVDAQRNCQLYQILLEKLTLQPYRVKYGTPAKTLAEHAAAFCRLTPLQQCKILLQILNLFSTNADSADLKLLCGKAGIGILLTSKNLENFAGHSFHLIYPSITGVFEQAINLLGDEF

SEQ ID NO: 4245 - protein, 1459 aa, unidentified
  REGION 1..1459: note = Description of Unknown: Cas Enzyme sequence
MKKILGLDLGTNSIGWAVVNADENGNPQSIEGMGSRDIPMGSDKIDYEKGATITKNADRRAKRTARKNNKRYKQRRDKLLFIMNKLGILPDQFVIKHKVADENGRISNRTEEGFPDAEHLNHLILAPIKKKTLQLDSLQHYELREKALFEKVELKELGSILYQYNRLRGYAGGGDDDNNQKKSDKEEEQDEVKKYETRVQKFFIKSVSLSDNTFKVKSGKDKGKELPLYELVVLDDDTEISGTTALQNLSDKVDKEIELEIRIKRNKNSENISFVLPQKTNWRKQMEETEELLKTRHWLPCQLFAVDLRKNKWIKIKNRVILRQQYTKEFDAVWDQQSKHYPFLNNCPKNILQEILEYIFPGQSNSQKTLREEGLKRGLKYIIKDQVIYYQRPLKPQKELISKCQFEKEERVIPITHPLFQEFRCWDQINRLYITSKQTVWNERKNKEVLQYTNRYLTDIQKTSIYDKLLSQKQLGFGEVAKIVGLKNDNSEFLNGLNAKAKLKGCDTIITLKKILGNIPVDDNTIVRLWQAIYDNVHEGSEYDENSKRVRSIFEALPESIEDKKRTELSLNIAQKVRFVRKYASLSQKAIENILPIMRLNPQELPERVKTNFENVKHLITTGEVRDESMLQDYIIDFVKDNPMALEHGGLMYAFAASLVYGRHTKEAVKPQITNYHDIKYVDRNLRNPIVEQIANETMQVVKAIWKQFQLNPNELEIRVELARDLKNSAQERDRIYKGQIKNRKINDEIKRRLVELKQEVNDRNIDLYKIWSRQSIEDYPKVKNIQQPTHDEIEKMRIWEEQKCISPYTKKPIPLSKLFSPERFYDIDHIIPKSRYFDDSIANKVICESNINEEKANRTAWEYISQQDSKYNICTPEVYLEHINKNFYGQKKKNLLAEKIPSNPVARQLKDTQYISVAIKNELAKIVGSDNVKTSTGGVTDYLRTHWGLKKLFMELTEPRFKQMELWNLNENGEPNESWVTKFFDKEKNKHIYEIKGWSKRYDHRHHAIDALVVALSNEKFIKRLNDLNKYFQEELEKRKESIPLGEQDTLEEAFFRLSKDKRDEIMEDIESSRKFEAPIDSLVSKTREFLETMIVSHKPKDKLSIKEDNKGKKQLKIRAALHQETYYGKTNGRDTKTINIPELKAKDIPQIIDPVLKDEIDAHRKNYDTLKEAFSGEGLIAFNESRFQKKNKNSLKPPVYKIKLWYSKKETEEGDLQRLYENNPKKSVITGDNYMFVVMEKDGKRVFEVASLFDSVALAKEEVKKGMQYDIDTIKKNICENIRMQVNKDKKGKEKPKPDKVLFYLQQNDLVYMPQNDDDEVVGFNASELKAWLSDNTHKKEFAKRIYKVVKFTGKDCFFIPNNYAKEISIPKVLSENEMEELKNKYKDKKIPKQELHYIEFGSYMNCSPHEKNAFFTISMKEGKKYKGEKPRKIQDFCVKIKTDWLGNIIEFNGQKL

SEQ ID NO: 4246 - protein, 353 aa, unidentified
  REGION 1..353: note = Description of Unknown: Cas Enzyme sequence
  MOD_RES 319..332: note = Any amino acid
LQTQLRNTFYFMKKILGLDLGTNSIGWAVVNADEATRENEITYLKPKGISTSGSRIIPMSADILGEFDKGNSVSQTADRTGFRGVRRLLERYLLRRERLLRVLKLMDFLPEYYANQIDRFGKFINHAEPKLAWKKDETGMPKFLFIDSFNEMIADFAQNQPQLVVDGKKVPYDWTIYYLRKKALSQKITKEELAWILLQFNQKRGYYQLRGEDEEEKTSVSKTRQYFDKQVITDIVDTGQLYKGMKILKVVLKNGDTGKIFKKEIPEWIGLEKSIIATVDIDKDGNDKYDEDGLLSRRFKIPTEAEWDSEWKLIKMKTXXXXXXXXXXXXXXPTRKSLANSSALLNENTTRMS

SEQ ID NO: 4247 - protein, 1180 aa, unidentified
  REGION 1..1180: note = Description of Unknown: Cas Enzyme sequence
VQKALIPELQDEKLYKACIEDLYPHNEAHRNNISKPDFANLFINDILFYQRPLKSKKSLISNCPYETRFDDDGNEHPIKCIAKSNPFFQEFRLWQFVQNLKIYQREKEIGGKLYTDVDVTNEFLKSEEDVVKLFDWLNDRASIKQDTLLNSYFKLKKEKGKDQYPYRWNYVEDKEYPCDETRATMLGGLTKCSIDTGILTHEKEMLLWHILYSVEDKIEIGKGLKKFAEKFDLPESFSEVFSKIKPFKKDYGSYSEKAIKKLLPLMRMGKYWSTDAIDAKTSERIDKIVTGEYDETIKNRVREKAINLTDEAHFRGLPLWLACYIVYDRHSEAKEIDKWEKPEDIDRYLKEFKQHSLRNPIVEQVVTETLRTVRDIWKQEGQIDEIHLELGREMKNPADKRKRMTENILQNENTNLRIKAMLMEFTNPEMGIENVRPYSPSQQDILRIYEENALDNLSKDDKDFDFISKISKTAQPSKSDIVRYKCWLEQKYRSPYTGEMISLAKLFTPAYEIEHVIPQSRYFDDSFSNKVICEAEVNKLKDRQLGFEFIKNHGGEKVQISQGKTVEILSVEKYEKFVKDHYSSNRTKMKKLLMDDIPDGFIERQLNDSRYISKLVKGLLSNIVREKLPNGEYEQESVSKNLISCNGSITDRLKKDWGMNDVWNSIVLPRFQRLNKLTGKDCFTTITPEGHEIPAMPLELQKGFNKKRIDHRHHAMDAIVIACATRDHVNLLNNEAAHSKKHDKSYRYDLQRKLRRFEKITIDGKEKEIVKEFLKPWDSFTTDAKQALEGIIVSFKQNLRVINKTTNHIQHYDENGKKVLVKQEKGDSWAIRKSMHKDTVFGEVNLRKSDKTVSLNEALNNPKAIVNKEFKKKVMKLKEAGRDAKYIKKYVEDNKDVWSDIDIKRIQVYYFTKDTNDRYFATRKPLDTSFNKKKIKESVTDTGIQKILLAHLDAKGSDPELAFSPDGIDEMNRNIVALNNGKFHQPILKVRVYEKADKFAVGQKGNKSSKFVEAAKGTNLFFAVFVPEKMNKETGETDNVRSYLTIPLNVMIDCQKKFGKDWRNNIEFYLKENNLVSNEVKLLFILSPNDLVYLPTKEQLAKGIKDNDIDKGRIYKMVSCTGNEGHFVPEKIASPIIQTTELGSNNKAQRAWTGEMIKETCIPIKVDRLGNIIELNGQKF

SEQ ID NO: 4248 - protein, 1509 aa, unidentified
  REGION 1..1509: note = Description of Unknown: Cas Enzyme sequence
MKKFSINVDMGAKNNGVFLASIEGANSAKITNKSAFNVKIDKGENFVLDRANRLAKRHTRRSFDRDCFVLRFAGQIFDLDKLPTRKELLEKIENQKIEYKKELKEPKELIFGLFKNRGFNYQNIKIKDEVFDDENFICLLENFKFLKEYGYEFSECRCLEDFENFINQKADELSNSDSFKDDMLNFLNEQSKIINDIKEFYDITNNLSDKALKNNAKAIEIAQQEINALSNGDENLVNLQTKLENLQENYPKFIEILKDKDKTLTLKFVKFFNELINAAKSELERNNKHRKAYLKDINKELNSSDNKILAWEYDEIFNNLRDKVEGKKWSKDEFYKFVGNVANIQTRVWRRYFNFANYKMPNFDKDKLKIYDDSKLAKQILRNFRDFRYEKKHEKDTFEKIKPIMQNLMKELKSKKEQKSLLALTFLKSTDPVLTIPPYESRINKNPRACNAMSIKPESKIITPNLTNITKKIFANNEFGFLLINENGEITTPDFNDTKITAKYLQRFLDISKSKLNDSDLYPRNLIQDNTQKNEIFKRFFALSDDEITKFVEFSKAYYDEVDSAKKGVLKGKILKVCGLHTPHKHKNKAELISALFIKNHGQISSEEFDKLCDFMQNTGEYKSKAKNTKTRKIAKFFEDLDEVRKSYQNAFFHEALNTLKALNENKNLDASLVKIVQDYEIIAKSIQENINFCKFQTPFEASNLATNLNYLLQLGDIIFSDKNAGFLKTCKEHTMENLLRSGGEAMASRLPSNSGKLINGKIEMYLDRLAYEIIKQSPNFDDFDEVEINVEMNKFAFEENAIAVGLKKGAKNDEKAQKAKKTKKTKNENDLICPYGGEGISQSNCEYDHIIARNDKGFNSVFNSTANLIPCESFENLKKSNKIYKLDDLHPKHLQSVFGTSNQAEIKDFISKNLATIEEKTYTNFYNLSKKEQIAFRYALFLREGQDFGKAVRLLNQDKIKGYSNGTQKRFVNLLIEKIKKLSKKIPNFSVNFIDSKMLSATRTELSIMREDIRKQNIQDSHSHCIDASLVFHLVNSKLIKNSNSQREFLYDYFDEIYLSQSEIITPKNKQYLELKTNIARKRLFDDSVYSLVYEQCDNGKFIRIEDLKTLRDLGLLHTRKNGKKIQVPAGQAIDENALKKYFVSTHKVFDKIFEYFENKNIAELEKLKFLDNYLQSYKREDITKIFGIGNDNKLIITKEKDATPSVTKFYEILKNHEDEISHTHTNEKGKVVYEIDENAIKSLYKQTFDKGEKRKRNKTRCIYSLSMIADNSQYVIRRNGGYMGLKGDKIAAKNYLFKNKIQSVSFYSKNVLPKKIGDILIILNLPKDAKPLYGEDKKYVFDNTDLKNLLPNINKEIADLVIKHVDKVEFKFTEKSRHMVRIYLIKSSLLDINFSIIDEKPRISKNEEFAKLLNKTNVFFKDIFDTPRKSKNLSKIEHLNYENFEVLNSVFKASKDAKNSICINDLSNMKCIQNDDKIIAFEYTIERTSASFKALIKELLNETPSAK

SEQ ID NO: 4249 - protein, 1270 aa, unidentified
  REGION 1..1270: note = Description of Unknown: Cas Enzyme sequence
MKLSICVDMGAKNNGVFIVKTDGKDIVDKKALTVVIDKNSINFSKKSRRENRHRVRSYARRKLAKRFLWQFLDKEKFSKEEIEQINGLLNNRGYTFLSTSSEFEELQEETITFLNEYISELKDLKTKEDFEAYISEFDLEELENFIKEVTSKIDEERVKKKSEFYKEYKEYHQVIKKDLKLIKDFFNDILKEIKTGAKPREKYLQEIKDEIQKYDFIKDKNSFYNLIGNISNLQLRILRKFFDNAIRKKDNYKLIKDYFNFFHWNYNDKEKEQRKKLFDELNRYDNLEEFLKNCDPQLTIPPYEDMNNRNTYKCNSLLINPKYITKSIKNSIDILSKQPQFEVLNLKELENAKKLQRILDINLSIIDKKIHPREVFYHNRGDIGYYQKLLGKDFEEFSSFAKEYYSLEKKALTGIYKDGLLVKCGKNTPSKNNFKHILLKPLYEYDFTKDEVEKFLEGIKNTKGLQTHLKKISEVAKEYQNAFYHYVEACFENDKCLNDKSLKDIVKNLKTDKNSLQKILNDMGIKSYLDEIENVDKTNLKRVLNIFKQTYEILFKDINGFSKTCKECTIENNIRSIGNEAIAKRLLSDVAKPIDGILDFMLDRLAWEIVEKVDDLEEDVEIVLEQNRFLFENNLASIKGKSLKKRESKDLLNLNICPYTGENITDTNGEYDHILPQSKELFNSKANLIYCSRKGNLEKSNKRYFLENLSIKHLKEIFKSDDLNQIKEKIRDGLKNIDKEKYTNFDNLSLNQQIALRYALFMEEDTEEFKKAKSIIEQDRIKTFSNGTQKRLARLIYEKLHKKFKKDFNCKVQVVDSLLVNATRKYLSYDKTTGEINELWKEEKQDSHSHAIDAMVAFYLANATIKGRHHKKRENIASIDPEYDFSAIYIKNSDVLNVKKRKTFINAEDIGSYKLFQDTLYKENYHHIAKDFKNIDLLIEKGLLYKNKNNKKYFIENIDELEENVIYKIDVDKTSKLLFDLFKQKNKDILKRLKFLDKLRFKTTRVDILKIFFDEKQTKLLEFEKIKNIPPNSKKIFKAMHNMLKNSDIFEQKDDKKVLNIDKFKNILSDFYRLQKRKRGKKRHIFSLAILGQNAKYRVRRGETVQVLAGENIATKTYIVKNQLKTIPYFSKNVVPLDISDMLSCLELENATFIYDIDIDVNHIEELNYLKYTLTEASRLTLIVEFNKNKIDFNFDKIKIYDGAKDEQFKNLIEEYINSDKLKPYIGSIRNNQKGKALLLKSNENIIRLQYKADINKEKKELILKNLNIK

SEQ ID NO: 4250 - protein, 1341 aa, unidentified
  REGION 1..1341: note = Description of Unknown: Cas Enzyme sequence
MNKLSISVDMGAKNNGVFIIKSDEHRILEKKANCIIINKGMINFSKKSRRENRHKDRNYKRRKLTKRLLKEFVDFSKYTEKQQELILGLLKNRGYTFISTSTEFEKLNDITVEFISEHFEELEGLAIKEDFENKISSFEELEELKEYIVKVNDKITLETKKKKDEFYKKYQNDFSSFIKKDLTEIKKLFLSILNEIETGSKPRVKYFDDIQSEINQGFDFLQDYTKEEFFNLVANISNLQLRVLRKYFNQKFDDKLDTLKLDTKIRGYFKAFHYKSDKEKKQRKELFDILNNESDMKTFLITTNPSFTIPPYEDMNNRDTYKCNSMLIKPELLNDDLKNSIDSLLCSDYFSNLLIGSDGEFVKAELIKTKPATNNTYIKTDFTYSKYLQRILDIKIEDDNKTYHPRVVFKNKNVKAIDLFKKLFGVKLYDSLKPIAQNYYEEETKIHNGIYESSTSLFEKCNTNTSYKNNVKELLLKPLYSYNFKDTQTTELINKIENYKEKINRTTLLGFLKFTEEEYKKYQNSFYHIIGHNFELENKKDIKDNDIKKLIDGLNPCVIALKNILNELNIKTYFDDVKAINKDNLSRILNILKQTYNILFYDLSGFSKTCKNCTKENAIRSDENFPIGKRLLSDVAKPIDGMLDMMLDRLAFEITEQISEDDIKNIDTLEILLEQNRFEFEENLNDIKRANDPTIKKYKNDKKYICPYLGVVFEKGEYDHILPQSKEVYNSKANMIYCSSQGNREKSNKIYKLENLNTKHLKEVFGFDDISKIKEFISTHIKTINEKEFKNFDNLKLNQQKAFRYALFTENNSEEYKKAFNLVKLDKLKTFSNGTQKRLARFIYEKLVKKYPDSFKEHKIKVDSKTVDNMLVSATRKSLAMKNEVLAKEKYQESHSHCIDAMIVFYLANAKISGRANKKKENLTTMIPTYNFDDIYLEESGINNLSKKVTFINSPKKEIGSVTLFQGTIYSEHYFNIVQKEDKYFANKKIIKLDSLKTLIQHQLLYKNIKGKKYYFNSTEMIELSDDCKIDIKKTSDLIYSLFNDKNKSQLNKFKFLDNLRYSTSRSEIESIFFDLKQTKLLDFSEIKKIPQGSETLYKSVYKKLKNEPKLFDIKDEKKTLNTAVLNELLKNMFETKQKTNKETAKRDKKRHKYTLPMVGQNAKYRIKRENHWQILGGENIATKNYKVGDSIKSIPFFTKNTIPLKISDLMDCLLIDNESKSIYDVEININDISQYISSLKYFLTEASRHTLVVTFIKNSFKDIDLNDIKIFDGSKDEIFKSFIENYIDNKELEISKYIGSIRDGVKAKAILIDNNSKTITLQYKAGITANKKKIILDNIK

SEQ ID NO: 4251 - protein, 1335 aa, unidentified
  REGION 1..1335: note = Description of Unknown: Cas Enzyme sequence
MNKLTISIDMGAKNNGVFFIKTQNEKVLDKKATCIIVDKGTINFSKKSRRENRHKDRNYKRRKLSKRLIQEFLDLSKYDNKQTEQIFGLLNNRGYTFISTSTEFEKLNDITVEFINIYFENLKGLSLREDFENKISEFDDLDDLKEFIENINEKIDFECKKKKAEFYKNYQESFLNFIKKDLQNIKKLFSSILNEIQTGSKPRKKYFDEIKDEIDKDFDFIEGFSKIEFFNIISNISNLQLRVLRKYFNNKYDNILDTKKLDTKIRAYFKAFHYKSEKEKVQRIELFEVLNKESDILNFFKNTNPMLSIPPYEDMNNRNTYKCNSMLIKPVLITKDLENSIDILLNNDYFSNLLISNYGEFKKESLIKTKPATNNRYIDTDFTYSKYLQRILDLKIDDDNKTYHPRVVFKNKNPKAIELFKKLFSDKTYDNLKDIATNYYEEETKIHNGIYKDNTSIFEKCNTNTSYKNNVKELLLKPLYSYNFTHDETKEFTSEIENYPEKINRTTLLGFLKFVEEEYKKYQNSFYHIISHNFELENIKDVKDKDIKKLILGLDSCVISLNNILNKLNIKTYLKEIKKVEKENLSRVLNILKQTYNILFYDLSGFSKTCKSCTKENALRSDETFTIGKRLLSDVAKPIDGMLDMMLDRLAYEITQQIDKKDIEDCESLEILLEQNRFEFEENLNEIKRANDSSIIRYKNDTKNICPYIDTSFEKGEYDHILPQSKEVYNSKANMIYCSSKGNREKSNKIYKLENLNMKHLKEVFNLDDLEKIKGFISLHLKTIHEKDFKNFDNLKLNQQKAFRYALFMPNNSPEYKKALNLVKIDKIKTFSNGTQKRLARFIYEKLVNKYPREFEHKQINVDSKTVDSMLVSATRKSLTSNNTNLEKEKYQESHSHCIDAMIVFYLANAKIEGRADRKKDNLTTLIPKYDFEDIYLEESGINNLSKNVTFINSSKKEVGSYKLFDDTIYAENYKHITKESLKKDEFECLIYHNILFKNQKSKKVFINNIEELDDESIYKIDVQKISNLIYKLFNQRDKSTLLKLKFLDKLQYFTSRKEIESIFFDEKRTKLKKFNEIKNIPYFSLNLYKAVYKKFENKRDLFIVENDKSVLNSKVLNDLLIDMFESKQKDVHKEKRKRAKKRHKYTLPILGSPKFKIKRGSTWQVLGNNDIATKNYIINGDIKPIAFFGKNTYPVKIKDLLDCLLINEDSKSVYHVPINISEVSKYVSKLEYFVTESKRCTVVVSFIKNSFLDINFNEIKIFDGAKDKIFELLIKNYIDNKDLEVSKYIGSIRDSLKAKAILIDNNSTTITLQYKAAINVNKKKIILENLKGNI

SEQ ID NO: 4252 - protein, 1373 aa, unidentified
  REGION 1..1373: note = Description of Unknown: Cas Enzyme sequence
MELKKSNKIYGDYYIGLDIGTNSVGIAATDPNYNLIKYKGEPVWCSHLFEEGHQCADRRGFRTARRRLDRRQQRVQLIDELFASEVGKVDKNFYIRKKESALWREDKTDSSTGNMYFNDEDYKDVDYHKEYPTIHHLIVALMEQDKAFDIRLVNIAIDWLVAHRGHFLSEISVKNVDKITDFETVYNKFIDFFNMEGLQDSYNAWIEADCKELEKIIKSKSGITTKKRELKQVIYGGKVPKEESVPYKYESMINFLAGGKIKAKDLFQQSEYESDFSFSISDDMEEILPQLGDDAEFVSKMTAIYEWSVLTDVLNGEKYISKAKVEVYDQHKKDLEQLKKFVRKYVPKEYYKIFKESGKELKNYTAYSYNLKSVDTTKDKVELPKQKANQKEFNDFLKKTLKLDKIEEQIEEEDLDFYEDMVSRIENAGFMPKQVNSDNRVIPHQLYQIELERILDKAENYLPFLKEKDVDGLTVTEKIKSVFTFRVPYYVGPLRNDKDNSKNAWIKRKAEGKILPWNFDQMVDKDASEEEFIRRMTNTCTYLPSESVLPKWSLLYSGFMVLNEINNIKVNGQSISVEAKQRIYHELFEKKVKVTVKMIRGFLESNNYMQKEDVLEGIDVTIKSSLKAHYEFRNLLAAGILDKKDVESIIEHNTYVEDRGRYRNWINREFPNLSAEDKKYIGKLKYNDFGRISKKMLNDLQGDDKTTGEMGSIMHFLWTTNDNFMQLLSNDRYTFAERIEEERKKYYESKEFSVEDQLDEMYVSNAVKRPILRTLDVVDDVVSTLGHAPKKFFVEMARGADPDPKGRTTTRKQQLLELYKNVEEDTRILEKELENMGDMANNRLQSEAIFLYYLQLGRCAYSGQAIDLSQIKSGKYNIDHIYPQCYVKDDSIVNNKVLVLSAINGDKKDVYPISEEIRTSQKAFWSKLRKANLMSDEKYKRLTRNTPFSDEEKQGFINRQLVETRQSMKAVTQILKQKYKDTEIVYVKARLASQFRQEFLTPKSRLINDLHHAKDAYLNVVVGNVYHERFTRKWFNISDKYTVNPKSLFKRTVQHGEEMIWNPDVHMDKVKSIYKKNNIKMTRYSFCQKGGLFDQMPLKKKADLVPLKKGMDPVKYGGYNKSGATFFIVAAYDKGTKKEVSFVPIELMFSEQFLKDEDFAKQYVQEQLQKLSAKPVSNVWFPLGMRKIKFKTVLSLDGYEVWVNGKSGGGKQLLLSSAESFIVSKEIETYIKKLENYKRKKDERKDVLLDEAYDGISKSENIKLYDCFINKLQTSIFSQMPGCQKEVISDGKQKFMDIAIEEQVDALISIITLLKSGRAGGIDLTAINGKSKSGAMYLGANLSSSPYDDIRIVDYSPAGLHRKESVNLKEFLK

SEQ ID NO: 4253 - protein, 1371 aa, unidentified
  REGION 1..1371: note = Description of Unknown: Cas Enzyme sequence
MELKKSNKIYGDYYIGLDIGTNSVGIAAMDQNYNLIKYKGEPVWCSHLFEEGHQCADRRGFRTARRRLDRRQQRVQLIDELFASEVGKVDKNFYIRKKESALWREDKTDSSTGNMYFNDEDYKDVDYHKEYPTIHHLIVALMEQDKAFDIRLVNIAIDWLVAHRGHFLSEISVKNVDKITDFETVYNKFIDFFNMEGLQDFYNAWIEADCKELEKIIKSKSGITTKKRELKQVIYGGKVPKEESVPYKYESMINFLAGGKIKAKDLFQQSEYESDFSFSISDDMEEILPQLGDDAEFVSKMTAIYEWSVLTDVLNGEKYISKAKVEVYDQHKKDLEQLKKFVRKYVPKEYYKIFKESGKELKNYTAYSYNLKSVDTTKDKVELPKQKANQKEFNDFLKKTLKLDKIEEQIEEEDLDFYEDMVSRIENAGFMPKQVNSDNRVIPHQLYQIELERILDKAENYLPFLKEKDADGLTITEKIKSVFTFRVPYYVGPLRRDNSENAWIKRKAEGKILPWNFDQMVDKDASEKEFIRRMTNTCTYLPSESVLPKWSLLYSSFMVLNEINNIKVNGQSISVEAKQRIYHELFEKKAKVTVKMIRGFLESNNYMQKEDVLEGIDVTIKSSLKAHYEFRNLLAAGTLDKKDVERIIEHNTYVEDRGRYRNWINREFPNLSAEDKKYIGKLKYNDFGRISKKMLNDLQGDDKTTGEMGSIMHFLWTTNDNFMQLLSNDRYTFAERIEEERKKYYESKEFSVEDQLDEMYVSNAVKRPILRTLDVVDDVVSTLGHAPKKFFVEMARGADPDQKGRTTTRKQQLLELYKNVEEDTRILEKELEDMGDMANNRLQSEAIFLYYLQLGRCAYSGQAIDLSQIKSGKYNIDHIYPQCYVKDDSIVNNKVLVLSGINGDKKDIYPISEEIRTSQKAFWSKLRKANLMSDEKYKRLTRNTPFSDEEKQGFINRQLVETRQSMKAVTQILKQKYKDTEIVYVKARLASQFRQEFLTPKSRLINDLHHAKDAYLNAVVGNVYHERFTRKWFNISDKYTVNPKSLFKRTVQHGEEVIWDPDVHMDKVKSIYKKNNIKMTRYSFCQKGGLFDQMPLKKKADLVPLKKGMDPVKYGGYNKSGATFFIVAAYDKGTKKEVSFVPIELMFSEQFLKDEDFAKQYVQEQLQKLSAKTVSNVWFPLGMRKIKIASVLSLDNYEVWVSGKANKGTRVLLSSAENLIFSKDMEVYIKRVENYVNKKNSKQNIVLDEKYDGITSEQNINVYDCLLSKMETSLFSKMPCCQAKIVRIGREKFLNLSLEDQTVTLIRIIECIKAGRKSNVDLRSIGGSANAASVYMSANLSSSSYKDIRIVDYSPAGLHRKESVNLKDFLK

SEQ ID NO: 4254 - protein, 1280 aa, unidentified
  REGION 1..1280: note = Description of Unknown: Cas Enzyme sequence
DANGNDPFILFNDNGYTDKEYYLKYPTIHHLIMDLIDDENPHDVRLVYLAVAWLVAHRGHFLSDVEKTNVEKVLDFSTSYNAFKEMYHSIGQDIPWVDEEETFKNILLKKCGVKDKEKAFKDELFKNNSNKKTSEGTEENDKLGTNSVITLLSGGTVTADKLFVQAEFQDKISISFKKNEDEFEQILTELDEYAEYLLKIRAVYDWAVLYEASQGQVYISKAKIEVYEQHKKDLAGLKAFIRKYCPDKYNEIFRDAGDNNYVAYSYNFNSLNLDEGEKRPKRKASQEDFCTYIRKIVKDIKCEMEDKEFYEDMGKRLELGTFMPKQVNTDNRVIPYQLYYFELARLLEKVSSYLPFINEKDSEGYITKEKLLSIMEFRIPYYVGPLHRDHKEDNSFAWIKRKAQGRIYPWNYEEKIDLDASEQVFIDKMTNQCSYLPGEDVLPKYSLLYCKYEVLNEINNIKINGQRITVDCKKEIFGLFKRNKKVTVKRIRDFLVSNNYMSDSDEITGLDISVKSSLKSYHDFRRMLENKTVNEEDVEKIIKRLTYTEDKKRINKYLEENYPNISEEDRRYVSKLKYKDFGRLSEKFLTGIKGVVKETGEILSVIQIMWETNDNLMQIIFSDHYTIRDVLEREREDYYSEHPASVEQILSDMYVSNAVKRPIYRTLDIIGDVTKACQNAPRKIFVEMARGGGEKGKRTVSRRDKIKELYKHMDKQEVREISKEISELLGELDKKTDNELQSEVLFLYFMQLGICMYSGDPIDITKLKSDAYVNVDHIYPQAYVKDDSLNNKVLVKSKLNGEKSDNYPINRDIRDKMSSIWKHYRKEGLISEEKYNRLTRKTPFTDEEKQGFVNRQLVETRQSTKAVAEILKTMFPETEVVYVKAGLASEFRHAFGIIKSRQINDLHHAKDAYLNVVCGNVYHSTFTKKFFQNNLKYSIKTETVYKRKIEVDGKLIWNGQESLSFVIKMLGKNNIHYTRYAFCRTRGQNGGFFDQQSKPAGANLVPRKKNLPSEKYGGYNGTTVTYFIMAKYTEKVKKEKTDIMIVPVELLYSHNLLQNEEFAVNYIRQEIARITNKKQEEIVNISFPLGLRPLKVNTRLSFDGFEACIASKYSGGQKMGITSLVAFKMDADLEAYIKRIQSYMEKRKMNSSIELDEKYDKINNEKNEKLYNVILKKLEEPIYNKVFSGQLELVKAAKEKFLKLTLEQQCQCLSSLIDVFKTGRSGGCDLTLIGGKKQAAVCTVSSKVSNWKKNYRCVRIIDESASGIFRKESENILEWL

SEQ ID NO: 4255 - protein, 1377 aa, unidentified
  REGION 1..1377: note = Description of Unknown: Cas Enzyme sequence
MKKRTIEEYYLGLDIGTNSVGYAVTDPQYKILKYHGEPMWGSHVFEEGSQCAERRGFRTARRRLNRRQQRVRFVQEIFAHEIEKVDSRFFLRIKESALYREDANGNDPFILFNDNGYTDKEYYLKYPTIHHLIMDLIDDENPHDVRLVYLAVAWLVAHRGHFLSDVEKTNVEKVLDFSTSYNAFKEMYHSIGQDIPWVDEEEKFKNILLKRCGVKDKEKAFKDELFKNHSNKKASEGTEENDILGTNAVITLLSGGTVTADKLFVQAEFQDKISISFKKNEDEFEQILTELDEYAEYLLKIRAVYDWAVLYEASQGQVYISKAKIEVYEQHKKDLAGLKAFIRKYCPDKYNEIFRDAGDNNYVAYSYNFNSLNLDEGEKRPKRKASQEDFCTYIRKIVKDIKCEIEDKEFYEDMGKRLELGTFMPKQVNTDNRVIPYQLYYFELARLLEKVSSYLPFINEKDSEGYITKEKLLSIMEFRIPYYVGPLHRDNKENNSFAWIKRKAQGRIYPWNYEEKIDLDASEQAFIDKMTNQCSYLPGEDVLPKYSLLYCKYEVLNEINNIKINDQKITVDCKKGIFGLFKRNKKVTVKRIRDFLVSNNYMSDSDEITGLDISVKSSLKSYHDFRRMLENKTVNEEDVEEIIKRLTYTEDKKRINKYLEENYPNISEEDRRYISKLKYKDFGRLSEKFLTGIKGVVKETGEILSVIQIMWETNDNLMQIIFSDHYTIRDVLEREREDYYSEHPASVEQILSDMYVSNAVKRPIYRTLDIIGDVTKACQNAPRKIFVEMARGGGEKGKRTVSRRDKIKELYKHMDKQEVREISKEISELLGELDKKTDNELQSEVLFLYFMQLGICMYSGDPIDITKLKSDAYVNVDHIYPQAYVKDDSLNNKVLVKSKLNGEKSDNYPINKDIRDKMSSIWKHYRKEGLISEEKYNRLTRKTPFTDEEKQGFVNRQLVETRQSTKAVAEILKTMFPETEVVYVKAGLASEFRHAFGIIKSRQINDLHHAKDAYLNVVCGNVYHSTFTKKFFQNNLKYSIKTETVYKRKIEVDGKPIWNGQESLSFVIKMLGKNNIHYTRYAFCRKGGFFDQMPVTAKEGLVSRKKNLPSEKYGGYNKPTASYFIMAKYTEKVKKEKQDIMIVPVELMVGEKVLNDKNFAVGYIQQQIAQISNRKVEEIVNVSFPLGLRPLKVNTRFSFDGFEACVTGKSSGGRQLGMSSLESLKVSFVIESYIKKIENYINKKSENTKIILDEKYDGINRTFNIELYDELTNKLLNACYHIIYEKTGDVLLKGKEKFENLSIDAQCQTLMNIIDVLKTGRNGGCNLKDVGGAVNAANFIINSRVSNWKKVYNSVKIIDESASGIFRKESENILEWL

SEQ ID NO: 4256 - protein, 1490 aa, unidentified
  REGION 1..1490: note = Description of Unknown: Cas Enzyme sequence
MTIENLEGKTNVLHANVGIDLGAKNTGVFIECHRSSEPDKFSSAAFTVVMPPDQTDFTYRLTSRTQARHRVRGGQRFSLARRLLKVLIEEMLRRKNETVPAPQKTQLWDALYGLLKRRGYSRVDSETDLSSLTEISDTEAFLKIFEEVFGIDSSSQLFSHLQAGSRDDQGNDVSPEAFWNSFKQNIADVEELSAAFAKLPDRTALKKAVTSCVKNDFPDLDPKLYLNAVISVVDDTGNLLLEKKHGHKSRREYIEVVLKEIEKDRRLWKIAELAGGKERLANLVCNVSNLQLRALRWYFNDQRFKGTDFYDGEKLKSVLVSAYRYFHPDDDRRQDMKDVISEYSGSGSIIDTMSTLDPRKSIPPYEDQNNRRPPADATLLLNPAVLNTKAPEWMDWAGKISEKYPVYAYETDFIARKEDRVSRINAKHGKLSDNFYQASYILQRIFDRNTKTDPFRLRENTEIYADSGLKSFDENNIGFKELSLVLGGNSSAVEFLKLAFDYYEETSAAKDGCWQAEFNMNSAKIPLLEKSGAHPPMKKSVLDILIGNILGADREIGRAFISSHVMDEPVEKRLKVKSICGKAADLLKKYGNGFKYSLEQAQEKNQQSKVTADEKELLTIDARSRKAAAVISEKLNLSPAQLTKFSNPFSLAQIYNLLNNDPDGFTGTCLAVHFENMYRMKTIEEHKGVSAEFSRLPADCVKPFDGILRRSLERVSFETAKRVAEEIKNTSNASLPVDVTIVVESNSFTFSADLAEIKNASKKKITQIAEKGDAENKRWADKDERIKQASKGICPYTGSILLPTDQSGEIDHIIPRALSGKNQGMIFNSEANLIFVSRKGNQNKKDQLYTLSNLNRNYLRKQFNTDDINLIESEIKSKVKALKENGRLKRFELMSEDEQKYVRHALFLKPGDEARREVERSLGRRNQTLVNGTQQWFAGTLVENIKRILSDNGYSRINFSVRRMPAEGTSDCRRRLSEIDSQFTKPASSEQPFASHAIDALCVYAGACDVPEIRSLMGGAVWDDESDESIPSQLVNNIFPRDVDCIHVERKPLAEKGNFWSRKIFNDGIYQLNFVPVLRKGNDLRIGFKIPSANSPKKNFVKGKNPLNLIELLKDVLSEPVKADDSWEKYEIVPTLAFEKIGKAMHSFVSEDELNAVKVILSLSYITQKASVVGKLYDSQKHKLKPLEEKSFHIKPAFSSKSLGFSFGCDLVIPVFNDWQRIAELDEIRKLFGQEKVDQNIVEKVIKKYWPDRKVQSNVRVTSRPHSAYRQAISLPMKAATGACYAVRRKNLDGTPIYQVIATLQNSSGFAADQGKKVDWKSPVLLGGLKAENIIPLKEERLYREDAVIVPLTEFRNVFVYKAQKHENSGSDQFSISIAPGTEGRRYLKISCPFSIFRKAAGLKNEDGFTQLKNEMKAPEFFIQKLAGSLKNTISDSGAAVAEADKIPSLLGKPRSNLFILSTGNQISFWYIVESSNEVMNSMFNDQTKS

SEQ ID NO: 4257 - protein, 1479 aa, unidentified
  REGION 1..1479: note = Description of Unknown: Cas Enzyme sequence
VVILKKEKYTIGLDIGTTSVGWAVIDDDFNLVQDKKKITEIDADGNVARRKSRVNLWGVRLFEAGQVAADRRIKRGGRRRLARRKKRLNYLREIFEPEILLFDDSFFIRMDESFYQNDDKSNKTIEAKYPFFNGIEGSGETYSNEIDYYEKYPTIYHLRERLIENPEQADLRLVYLAMHHILKFRGHFVNQGQDFNMKNIDVVASLSQLLERYADEDVTSFDFEFEKYDKTNDILTNRGGSKSEKASELTKLYNVLTDENYAKCDIDMTKSQAKKFLESKNAQQRALFTAVVGNGIDLAKIFDNPGYNQKENAEMPKAGEFKYSLDADKFEEKLTVIEAYITPEEFEIILLGKNVYESIVLCNILTANSLSASMVEKFNLHKKQLEALKVFTKSISYDFYATFFKEEGIYTKFIQGSGNPSKRTSREDFYKEVKKEFENEFKGLKFPDAGKDFDFSKAENITEEQQKELAEMAVAMEFETYLPKQRMSDNGAIPYQIHEDELIKIIENQSVYYPFLGEQVIVGENDNTKSEFKIQTLMKFRIPYYIGPLTPATLGNPGNKTSDISRFAWMQKRTDEKITPWNFDRVVDKEASAVEFIERMTSFCTFLPDKKVLPKNSLLYQEYTIYNELIIGGYYLNGKRCYFPSALRQKIVDKLFKHNKKVSAKMMLDFLNKEESLNLESPKELFGIDTFVKSPSYNTTFSTFIDLVKALKDDETTAEMAEQLIEDNRKKFEEIIKWQTIFEDNKVLKKRIKTANAEWNNLLTPAQVNKLSKKHYTGWGRLSKELLDGIKASNGKTIIANLKEEKYNNFMRLIDNDEQIIEQIRKAQVGDIDVNELNYDMVKNLAGSPAIKKGIWQSLKIIAELEQYLGKDKIGKIVVEMAREDGQGRSTKRIKQIENFYKNFKEKTGEDLSVELKRDFDMQAEESFNNEKLFLYFMQNGKCMYSGRSLNISELSSYEVDHIIPQTFIKDDSFDNKVLVLRTENQNKGGDVPAKGIVWKMRDFWETLAKNGQVSPKKLANLTKGSLSEKDKDGFINRQLVETRQITKHVANILASHFKEDEVEILTPKSSLTNQFREGVVYVPAKEFNAEEAVNNGMTYEVGGMKYFPNLESVESRYSNSSFVRVHFHEGFKKNRDINDYHHAHDAYLNAVVATYIYHIRPDLRKMWVYGEYQRKANIETGKWGSQRKNFGKQLLTGMADLTWEGWDLETGEVLELWKRDEVLEKIQKNLGLRGMNIVKKTEVQIGKFGDESVKKKNKSAIPVKSKLDPERYGGATAPISAFTVLVKNNKDEIKPLSIPSAVAKAYLNSDTKVEFMKPLYPKAKIEEIVIEKVPKYTHYILPNGGHRLVASFQEAKPAIQLPMMVIVNAKSNESELLEVFDSFSSFIQKNKLFSEGKLPLLDTEIKEYFENTSSDEKSNIINEMMRVTKGSNQGLNALKKSGLGAIKQQLTGSENIITNNTTLIYQSTTGLYETRKKL

SEQ ID NO: 4258 - protein, 1487 aa, unidentified
  REGION 1..1487: note = Description of Unknown: Cas Enzyme sequence
LKIIEESAIIKSGLTRKYATIRGKEIMDKKYTIGLDIGTTSVGWAVVDDDFNLVQGKKKIIEIDTDGTKRKRSSRTNLWGVRLFDEGKTAADTRLKRGSRRRLARRKKRLNYLREIFHGEITKFDESFFIRMDESFYQNGDDIKSIKTQYPFFNEVVGSGESYPDEKEYYKKYPTIYHLRQRLIDNPEQADLRLVYLALHHILKFRGHFVNQGQKFDLKNINVSENLRELLVRFNELSIAGLELDISKETKANEILTNRTLSKSKKAFDLTEIYSLLNNEQNFEKYDQGTKAKTTKFLKAKDTQQKALYTAIVGNSINLASIFAKDEYKEKDAPQAVKLKYSDETFDDKLMDIESHLSPEEFEIIGLGKKIYEAVVLSNILTQETLSASMIEKFDLHKKQLAELKDFTKSHSYDFYTMFFKADGIYTKYIEGVGNPQKRTSREDFYNEIKKAFEAEFKFTNLKFPNAGKEIDLTDAESLTDKQKIFIKNLAKAMEFENYLPKQRMSDNGAIPYQVHEHELVEIINSQKAYYPFLGEKIAINNEGKKQVDEYKIQTLMKFRIPYYVGPLIQANNGTEGNKTTDRSRFAWMQKKSDEKITPWNFDQVVDKEESAVKFIERMTSFCTYLPNEKVLSKKSLLYQEFTIYNELIIGGWYNGGTKCYFPPELRKKIVNRLFKKTKKVTAKAMIDFLNAEENLNLESPKQLFGIDTFVRSPSYNTTYSTFIDLINAGIPEQMIEDNRKKFEEIIKWQTIFEDSDVLKKRIKKANEDWNALLSQDQIKKLSKKHYTGWGRLSGKLLNEITAINGKTIIENLKEEKYNNFMRLIEDERIIEEIKKDQVGEKDIDTLHYGMVRDLAGSPAIKKGIWQSLQIISELEEYLGKEKIGKIVVEMARENSEGRSTSRAKQIENFYKNFREKTGEEISSELKKEHENQADDIFSNEKVFLYFLQNAKCMYSGASLELSDLSSYEVDHIIPQTYIKDDSFDNKVLVLKTENQNKGGDVPHKDIVRKMRDYWELLAKNGQVSPRKFANLTKGSLGDKEKEGFINRQLVETRQITKHIANILSSYFKETGIEILTPKSSLTSQFREGIVYVPKEEFDVEKTMNDNMIYEVAGLKILPNGETLASKYSNSNFFKVHFHEGFKKNRDINDYHHAHDAYLNAVVATYIYKTRPDLKKMWVYGEYQRKSEGETGKWGSQRKNFFRQLLTGMIEEVWEGFDLETGEVLEFWKRDEVLGMIERNLKRRNMNIVKKTEVQNGKFGDESIFKKDERAIGVKKNLSSTMYGGTKSPISAFTVLVKTTKGEIKPMSIPAMVALEYEKTANKVEFLKELYPKAKIEMIVVEKVPKYTHFITSKNAHRLVASYKEGQSVIQLPMMTFVSISSTTEEIYNAYILLSNFIKKNKLFTEIKLPLLDTTIKENFYSSSVDEQIGIIEEMMSITKGSNQGLKALQKAGLGTTSQQLRGNIITNDSILIYKSITGLFETRRKI

SEQ ID NO: 4259 - protein, 1423 aa, unidentified
  REGION 1..1423: note = Description of Unknown: Cas Enzyme sequence
MSKKILGLDLGTNSIGWALVNEAESSEEKSSIIRLGVRVNPLTIDEQQNFEKGKSITTNADRTLKRSMRRNLQRYKLRRENLIEILQAHGFISDETILSENGNKTTFETYRLRAKAATEGISLEQFSRVLLMINKKRGYKSSRKAKGQDEGQLIDGMEIAKKLYDENLTPGQLCLQLINDSKKHLPDFYRSDLQSEIDRIWAKQKEFYPEILSNELKDELRGKKREAVWAICAKYFVWKEKHVEWNNEEARNIEIEKEYKLVGIKRTGKTDEQKRENLLWRVQGLSEKLSLEQLVVILQEINTKIGNSSNYLGAISDRSKELYFNKQTVGQYQMAVLDKNPNASLKNMVFYRQDYLDEFNTLWETQAKFHAELAGELKREIRDVVIFYQRRLKSQKGLISFCEFESRKVEVEIDGKKKTKTVGSRVIPRSSPLFQEFKIWQVLNNIEVFVKGKNSKKQKEATLFDEIQDPLEISGRRELYQEEKELLAAELSIKKELKKTDVLKLLFDNANELDMNFNAIQGNITQASLFEAYKKIIEQSGHDMDVGKKPAKVIIKTIQDIFNAFAYNDDILHFDSDDELDKQPMYHLWHLLYSFEGDNSNVGNEKLINKIEEICGFEQEYATILANVTFQDDYGSLSAKAIRKILPYLKAGNKYDIACEYAGYRHSKSSLTKDEIDNKVLKDRLAILPKNSLRNPVVEKILNQMINVINSIIDTYGKPDEIRIELARELKKNAKEREELTKSIAETTKLHEEYKKILTQPPFNLTYISRNDIIRYKLYKELEQNGYKTLYTNTYISPSAVFSGDFDIEHIIPQARLFDDSFSNKTLELRSINIEKGNQTAYDFIREKYDEDGLEAYLSRIESLHKQGVISRSKYNKLKMVEKDIPNGFIDRDIRDTQYIAKYATSLLGDLVKFVVSTTGSITDRLREDWQLVDVMKELNFDKYKQLGLTYYEQDRDGRQIPKIKDWTKRNDHRHHAMDALTVAFTKRSIIQYLNNLNAKSDKSSSIYGIEQNELYRNDKGKLLFKPPFALNEFRSEAKKQLENTLISIKSKNKVVTQNINTTRKIGGTNKKVQQTPRGQLHNETIYGSQKRYVVKEETVNAKFDKAKIFTVTKPAYREALLKRLQQFADDPKKAFTGKNSLTNNPIYVDELHTKQIPEKVKTVSFETIYTIRKEISPDLKIDKVIDPKIRGILAKRLHTYNGDAKKAFINLDENPIWLNEAKGISIKRVTISGISNAEPLHDKRDKDGNYILDENGNKQPVDFVSTANNHHVAVYRDAAGNLQEKVVSFYEAVARANMGLPVLDKEYKRSEGWEFLFSMKQNEYFVFPNEKTGFNPQEVDLMNPENYSLISPNLFRVQKFSKVIYGNTAVRDYVFRHHLETTVKESKELKDIAYKSIKSLPIFNEIVKVRVSHIGQIVSVGE

SEQ ID NO: 4260 - protein, 1535 aa, unidentified
  REGION 1..1535: note = Description of Unknown: Cas Enzyme sequence
MFSQRNNPYCDLLHFGNTKIEKNYIKQKNMKKILGLDLGSNSIGWALIEKDDKNSTGIIIKAGSRIIPMDQGTLGDFEKGNPVSQTADRTKYRGVRRLKERAQLRRERLHRVLNVLGYLPEHYAGQIDFDKRLGKFKPETEPKIAYKFNAEVNTWEFIFKDAFNEMVAEFKEKNPELFINQKIPYDWTLYYLRKKALTQKVTEQELAWIILNFNQKRGYFQLRGEDENKVNDRKIEYYNLLVTDVIKADEKKATGDSWFNVILENGWIYRRTSKTDQLLEWKGKIKEFIVTEELDEKGNIKKDKEGKEKRSFRAPDENDWTLIKTKTENQIQNSNKFVSEYIFDALIVNPNQKIRGKLVRTIERKYYRQELEQIMKTQIEKHNDLRDRLKLTNCILELYKNNKSRSELLLTKDFSYLFINDIIFYQRPLKSKKSLISNCKFEYRFFKKEGKLEIAPIKCVPKSHPLYQEFRLWQFIHNLRIYEREQHIDNKVLHDIDITSTVLKTDDDRIILFDFLNDKEAVKQKSLLEYFFKKTAKLYRWNYVDDDEKEYPCNATRGQILSKLKNIKTASSDFLTRDIELQLWHILYSVEDKEDIKKALVTFAGKHNLPHEFVDVFIKIKPFEKEYGAYSEKALKKLLSLMRIGKYWNLNAISGKVKEHIERIDERLKAIDYNIKRIEEMADDDIQKPVLKSFINCSNKLSGYNTYQASYAVYEKHSEESDIKYWKTAIDIENFLKFDFKQHSLKNPIVEQVITETLRLVKSIWNKYGEGKESFFDEIHIELSREMKNTAEDRKQITKNVNENENTNIRIKTILAELANFNDVENVRPFSPSQQEILKIYEDGVLKSQKNLPDDIAKISKSKSPTKSDVLKYKLWLDQKYRSPYTGEIIPLSKLFTPAYQIEHIIPQSRYFDDSFSNKVICEAEVNKEKDRMLAYEFIKNNQNRIIECSFGKKVKVFDFISFSNFVKENYTQNRSKFKKLLLEDIPEKMIERQLNDTRYISKIIRNLLSNIVRVQGEEQTVSKNVIATNGTITGILKQDWGLNDVWNDIIAPRFERMNQLKNTNDFGEWINKEGNRYFQIQIPVEISAGFNKKRIDHRHHTLDAIVIACATNDHVNYLNNKFANEQNKSTRFDLQHKLCDKHKTDNNGNYKWLFKKPWHSFTQDTKNILLTTLVSFKQNLRIINKTVNTYQKWGKDLKTGDLKKINVKQTVGENLAIRKPLHKETVFAQVTLRKIKEVQISVALNNWQMIVDKQLKQQIKILVNQNMDKAKITKFFKELEYKWNGNDITRVKLYYYDTDNAATRIKIDETFTEKFINESITDTGIQKILLNHLHSDKYQNQSDDNNKPIAPETLAFSPEGIDEMNRNIVELNNGKYHMPLYKVRKYETIGNKFVVGQKGNKKTKFVEAAKGTNLYFAIYANETGKRYFETIPLNVVIERLKQKLKPVPETYIDSKTNTQYKLLFWLSPNDLVYVPSSEEFESKQILELENLSRLKLKNLYNVNDFNDITIYFTPNSFAKAIASKELHTSYDFKQ

SEQ ID NO: 4261 - protein, 1483 aa, unidentified
  REGION 1..1483: note = Description of Unknown: Cas Enzyme sequence
MAVGEFVSPIALDLGAKTTGVYTALYPSGISLSKFNENANKQAFVAKVEEGDKGYKLLQKDRTASRHARRCRTRGRQAKKLFLLILDKYCGFDTSTHEVAISALLNRRGYSYLDSEIDGDIVDAIAEASQQAWLQELDTLSNDPVFEVLNPGDLYDGIREVLSADPNHLSTLKGALGRIQKNNPAEAKGLKPLSELLDFYAKDFKSGAKPRRKYFQDIYADIQRLHKSNDTGAKKLARALKAHRFSQDITFEKVFHQLLCHINNFDLKLLNRILKSVQPSSSLAVLERNLSSHVSHWIGKLWSLSSSNGGQRLDEIRVLRRNLKKYIAENPNKIFSFLLDSAPELTIPPYESHTNRRPPSCQTLLLNSKQLDRDYPNWRHWLASLKEARTNDGQLGEFQKKIASLLSRKDISLASEDEVDARTLQLILDSAQDVDPFLLNKVWSQLKKRKELTRSKQEPSASSQLIDDFFRESCLPVFLKEQIQQEQKPGTFWHLVNRYFQTRRRTREGRYFIHYNNLKPQSSRWEEKGNLLVMCSHRPKQLKHQAVLDFSVTLGVSTDAVAHAIKDTELSTLCSSIRGLKTACQQAHGMQKKYGADLKIASITETEIRKLVEKLPLLAKQLAELLGLDAERQAQFSERNSSIFIFAQLYPIVWGDRSGFGSTCPVCALDNSFRMTGIHGHAIASRLNTLTMRLIDGSLKRLLNHQAHHIVNRIWPSLEETAQHAAKISVPLILEQNRFDFTENLARIKGVKPKKDDKANRYNEQSKFERILVATGGVCPYTGVTIIASENVDYDHIIPRSGPYGVLNDEANLIASSELGNRKVKMSRQLTLSDLSPVYLVKQFGTSDASEIERQIIQIIQGDTGQEFKFGRYRQFVALSPDAQKAFRHALFLDSAHPLRRQVIDAISHSSKTKVNGTQRYMAQLISDILLQKAAHKGVAHKFTFDYFEVSSNGVDEDSTVALRRSLTPLTENLDYDFADFAKVDGKAQQDYSHVIDATMAFMLAAQQHQGEGALRIEFAPSDSVWGNIDEDGVISPLVLDSVIVKPSQLTSLVQVKPQTVQHKAQVLESEPSRKLHQVLTRTIFKQNAIGLEFYDLALLEGKPFKGYIQIDTPSDQLVFVLANSKPIDKNSVLLESAIKLGLYEPCNVVPTTTLFKVNKSKLLPWLFDILNDVKHGVNSVDKADLELAKWIFGKNAGQLFYYSSKVPLEAAPAIVKKAEDSPYLQHWQRHYQSWMAMYPASKVENGRWVINPEQLQAWEDHCQEFLQRKGSVKQHVQTAEFTMRTSTSASGSPSLVKRTNWDGTPIYQLLMIDTNNFPKSQIAVIAKKSPRLALFNSEVLKFGYKVEIEEKQDLAGTIIPPSKFFNVTDISNSDLAIDLLEVIVKSGTAVSVSGLPKHWVADYLVQTGQPEGRRWDKMKSLMLATEPQVDDAIDRARLNSLLVKNARSDKPVGLAIVGEQVTLTIPYKSTDVLVQADGAELS

SEQ ID NO: 4262 - protein, 1332 aa, unidentified
  REGION 1..1332: note = Description of Unknown: Cas Enzyme sequence
MEQGRKRGDYYLGLDMGTDSVGWAVTDMDYRVPKFKGNAMWGVRLFDESNTAEERRLFRISRRRTQRRRERLDLLEMLFDGPVSTKDPAFFQRLRESDLYAEDKTTNTPFAVFADPDYTDTDYHRQFPTIYHLRNALLHEDGPYDVRLVFLAVHHIIKNRGHFLFDSLGEAQNFGSIYGAFRDYLQEEYECAVECTDEKAFGAVLKDKSLSKSRKTAAAAELFGVTKKSAPQLYACLALACGATVKLKDLFNDDTLVEAEKPSIAFTGSYEDNEPEYQSLLEERFDLVVRIKALYDWAILDEILAGHQYLCEAKVATYEQHKTDLQRLKTYVKTYHSELYKKIFKLSSKDDNYVAYSGHIKENGHTGVLEKTCNQEAFCAYLKKTLGDNGDPAYADMFAAIENGTFMPKQVSKDNGVIPMQLQKKELEGILDRAQRYLPFLTEKDETGLTVREKIISLCEHRIPYYVGPLNKHSKKAWIVRKEGKIYPWNFDQVVDLDRSAEAFIENLTSKCTYLPQYDVIPKYSLLYTKFMVLNELNNLTLDGQRVEVKLKQEIYRDLFEKRGKVTGKGLKNYLQSRGIAYEVMGGFDENFKASLKPWQDLAPYDLTYDEKEEVVRLITIFGDDKKLLKKRLRDLFGDRLTETERGKLARLKYTGWSRLSREFLTQVACTDKNTGEVTNIISALWDTNLNLMQLLYSADYMPTFGEQVAACNQFDKDVSLRQMVEDLYVSPKVKRPIYQSLLIAREIEKIQKCPPKKIFIEVARGEEKKERKKSRKAQLLELYQSCKKEYADLYAQLEGTEEDRLRSDKLYLYYTQMGRCMYTGEHIDLNSLLSGNVYDIDHIFPRSKVKDDSLNNRVLVKKVDNAKKTDVYPLDRETQAKMHGFWQLLLSKNLISKVKYQRLIRTTPLTDEELGAFISRQLVETRQSTKAVAQIMEQLYDKEQTEIVYVKAALASDFRHTYDMLKCREVNDFHHAKDAYLNVVVGNVYNVRCTHNLRNFIRGLQENGSRGYSMNAMFKWDIPGAWVAEGGELQKTQTKSLEIVKQMMAKNNIRYTRYAFCQHGGLFDQMPVKKGKGQIPLKQDGPKSDMAKYGAYNSAMSKYFALISYSDKKGKEVRQLVPIDAVTEKAYLADPDRYVSSYVGAPAKVLIPCIKYNACLSFDGFRMHISSKASKGKQIVYKPGVQLVLSYEQEKYVRNITKYLSQNKDRPLNKYDGISADENLTLFNALMDKMCNTIFHLRFADMYEKIVDKRERFIDLTDEEQCVVLSELLKMLHANVLTADLTLIGLAKGAGSMKTNSKLSEIKGVTSVKLIHQSITGLFEQQIELLP

SEQ ID NO: 4263 - protein, 578 aa, unidentified
  REGION 1..578: note = Description of Unknown: Cas Enzyme sequence
  MOD_RES 547..556: note = Any amino acid
MNKKDYYLGLDIGTGSVGYAVTDEQYQLMKCNHKYAWGSVLFDSSEGAEERRMHRTARRNRNREVERLNLLRDLFDEEISKIDPGFFHRLKESRYVPEDKRDQNGQKPDLPYALFVDEGYTDVDYHKEFPTIYHLRKALIEGKKEYDVRLVYLAIAHILKNRGHFLSDIDSDNGENNLNAALHELFEVWNRVVLGREEQFCAAIQITEIAEILKEKISKSRKKEKIAAVISDGDKRTKELAALITGNTVKFEKLFQVEQFKKLEEDKISFAQGNYEEKEKSYEENLGEYFEIISMAKTVYDQVILSKILDENSKGYISYAKVAEYEKHKQDLKELKQLIINHGGGKATELYHRVFRTPKGKENNYSVYIGNTSLNGKKQVLSEKKCSQKDFYDFLTKKIFPEIEDCKEKIEIMEKIELDNFMPKLRDKDNSVIPYQLQEKELKIILSNAKKYLTFLKRKDESGKSTEEKILLLLNFRIPYYVGPLNTNSENAWIVRKPGKITPWNFFKMVDVESSAENFIKKLTSKCSYLRNEDVLPKSSLLYEKYXXXXXXXXXXSFENQVETNFSRIKTGNLSGII

SEQ ID NO: 4264 - protein, 1343 aa, unidentified
  REGION 1..1343: note = Description of Unknown: Cas Enzyme sequence
MNKKDYYLGLDIGTGSVGYAVTDEQYQLMKCNRKYAWGSVLFDSSEGAEERRMHRTARRNRNREVERLNLLRDLFDEEISKIDPGFFHRLKESRYVPEDKRDQNGQKPDLPYALFVDEGYTDVDYHKEFPTIYHLRKALVEGKKEYDIRLVYLAIAHILKNRGHFLSDIDSDNGENNLNAALNELFEVWNRVVLGREEQFCAAIQITEIAEILKEKISKSRKKEKIAAVISDGDKRTKELAALITGNTVKFEKLFQVEQFKKLEEDKISFAQGNYEEKEKSYEENLGEYFEIIPMAKTVYDQVILSKILDENSKGYISYAKVAEYEKHKQDLKELKQLIINHGGGKATELYHRVFRTPKGKENNYSVYIGNTSLNGKKQVLSEKKCSQKDFYDFLTKKIFPEIEDCKEKIEIMEKIELDNFMPKLRDKDNSVIPYQLQEKELKIILSNAKKYLIFLKRTDESGKSTEEKILLLLNFRIPYYVGPLNTNSENAWIVRKPGKITPWNFSEMVDVESSAENFIKKLTSKCSYLRNEDVLPKSSLLYEKYMVLNEINHLKIKSKPISVELKQEIYRELFEKKQKVTIKKLQDYLKREKGWILSREDITGIGEEFHTSLTSYHAFKANFTNTDITEREKEDIIKDITVFGAEPVMLKKRLYRKYPEYQSQIAGLMKMLKCKEWGRLSEKVLSGIAVDVPGLGKVGTVIYQMWATNKDFMQIVGALDSPYAKMIEEENGIQKKNKIEYSMVDELYVSPASKRAIWKSLQIIDEIIGIMGKPPKRIFVEMIRENQKTSRSVTRKDRLMELYKNIEEEAQLYDVLGKTENDKLRNDKLYLYYAQLGKCAYTGEEIELDKFENYDIDHIYPQSQTADDSLDNRVLVLRKENEEKEDIYPIREEIRQKMKDVWKIWKDKGLISAEKYYRLTRESELTNEELTKFINRQLVETGQSTRALTTLLKEILPETTEIVYSKARNVNRFRQKYEILKLRELNDFHHAKDAYLNIVVGNVYHIRFTKDIRKYFLEKGTYRTYNIPKLFENRVCLGDEVAWDTDKSIAVVKKVMENNKVLVTKQLIERKGKLFDENPLKKGKGQIVLKSGDDRLRSIEKYGAYNSATITYFMLIEGEGKKGKTEKHFVPVPLYLKQKYEDETFVYDILKNDVKLDNIRILKRKIPIYTLFVTSGFKMRLTGKMGDRLIFNNANQLTMSDTNQKYLKEIIKYNNDIMIKKDAKINTQSVLDKQKMQELYEEFQNKIKTTIYGKDSMFQNVFNVMENGKEKFCALTIEEEAEVLFQILKLFQCTSEMPKLEKIGGKKSMGRINRGMNITNIDNLAIIHQSVTGLYEKVERII

SEQ ID NO: 4265 - protein, 380 aa, unidentified
  REGION 1..380: note = Description of Unknown: Cas Enzyme sequence
MEKVPYNIGLDIGTSSIGFAATDNLNKPIRAKGKTVIGVRLFEEGKTAADRRGFRTTRRRLSRRKWRLRLLDEIFDKEMAKVDNTFFARLKESNLSPKDANKKYLGSLLFPEKKDFKFYEDYPTIYHLRYALMHEKRQFDIREVYLAMHHIIKYRGNFLNSAPMNSFKTQDFDFVAKFEKLNELFESIDAEHETKFDIENISKFRDIMLNQDIRKLDRKKQAAKILILDSTDKTAKKINNKIATAVANSALGYKFALDAILKLDVEESKDWSISLNDEEIDSILDNLTSDLDAERIEIIEILRDLYSHIALNEIVPNGQSLSKSMMDKYDKHHADLDVLKKVISNMDDRKKAKSLKNIYNQYVGKTNDKVLDKDEFYKQI

SEQ ID NO: 4266 - protein, 956 aa, unidentified
  REGION 1..956: note = Description of Unknown: Cas Enzyme sequence
MKIVNEIELDQFMPKQRTSQNGVIPHQLHQKELDEIIENQKQYYPFLAEPNPNEKRKPHAQFKLDELIAFKIPYYVGPLITKEEQQAQSGAKFAWMKRKQDGVITPWNFDEKVDRMASANEFIRRMTTKDTYLLGEDVLPDESLIYQKFKVLNELNNVKVNDKKLTVSDKQDIFNDLFKKQKTVSVSKLQKYFVTEKHYLTEPTIKGLSDTKKFSNSLSTYIDFEKIFGNEILADQNKQNDLEKIIEWSTIFEDRKIFEDKLHEIEWLTEKQIKAVRRYRGWGRLSKKLLVDLRNNEGKSILDELWRTNDNFMQIQAREEFAKSIVEANQKLMNLGGAASVQNTVESTLEDAYTSPQNKKAIRQVIKVVEDIVKAVGYAPEKITIEFTRGADKNPRRTQNRQKQIMEVYKTAAKEIVDATLKGQLENEEKLTDKLYLYFTQLGKDIYSGETINIDQLNNYDIDHILPQAFIKDDSLDNRVLTSRDLNNGKSDSVPVKQFGANMKSFWMRLQAHGLISKRKLNNLMTDPDSIGKYTMQGFVRRQLVETSQVIKLTANILGAIYGENTDIVEIPAKLTHQMREKFNLYKVREVNDYHHAFDAYLTTFVGNYLFKRYPKLRPYFVYGDFKMTDNALKGMRRFNFLHDLKDDEVLVDNETGEVLWEGQKSIEELKKIYGYKFMLTTHEAYTQHGPMFKQTVYSSDTPGKLIKIKNNKPTEIYGGYTSNTDAYMAIVRIKARKGDTYKVVGVPRKEGDALSRIKLLDESKYHENLKNILAINLNKSLNKFDVVLDKVKYRQVIYDGTDHLMLGSSKYKYSTKQLVLSDQSMKILSSTGEFSDEELIKVFDEIMYIVNKNFSLYDTRGFRDKLNNARENFIKLPNKTLFEKGKLKQHSKLEILKQILIGLHANAGRGDLKDIGVNNFGAMVVTAGVTLSPDATIVYQSPTGLFERKVKLSDL

SEQ ID NO: 4267 - protein, 1387 aa, unidentified
  REGION 1..1387: note = Description of Unknown: Cas Enzyme sequence
  MOD_RES 429..432: note = Any amino acid
MSRKKIVPNYAISLDIGNASVGWAAFTPDYRLMRAKGRELIGVRLFEPAQTAEARRMARTTRRRYSRRRWRLHMLDAIFDAPLAEVDPSFLARRKYSWVHPADENNADYWYGGVLFDSKNQDKRFYKQYPTIYHLRKTLMEDDKQHDIREVYFAVHHLLKYRGNFLVEGDLDSSSVFDSKNLLNLIGEIILCVFDEQLDGSWTAGIDKKRLADTLCTTKGSRSMRVENALAVICESCELPKEQINVIKAIFAGLEGNKLDLAKIFPSEERTSDEKKALGIYFNKSDYEEVRAQVVDSGLLDDEQCELLDKMQKQYSAIALKQLLGNAKSVSESMCASYTRHQRNWDLIKKELRTEDNADEINKHYGELVGWTMVDGRRRSIRGTSTYEKTRQNANKYFSKLIEASNLSESKKMDLKHAIDEDRLFPVQXXXXSDNGVIPYQLHRNELRRILEKQGKYYPFLLDTFEKNGEQVNKIEGLLTFRVPYFVGPLVEREGMQPSDNGENHWMKRKKSGEITPWNFDKMVDKDESGRRFIERLVDTDSYLLGEATLPKNSMLYQEYEVLNELNNVRLSVRSGNRWENRRRQRLGREEKTLLIRNLFMKGGVVTKKAAENLLRKEYGRTYELSGLASESKFMSSMSSYGKLCRIFGAERVNKDSELMEQIIELQTVFEDKETLLHQLRMLDGLSDSDCELLARTHYTGWGKLSRKLLTTKVGECKIGDDFAPQKHSIIEIMRFEDRNFMEIITDKNYGFPEWIDEQNLGADKKQSLESMVDELHVSPKVKRGIIQSVRLIDDISKAVGKKPSRIFLELAGDIQASVRTTSRKNRLLELYKNAGLRKEFSDIYDRLEASDDKGLQDDRWFLYYTQLGKDMYTGEELDIDRLSSDYDIDHIIPQAVTQNDSLDNRVLVSRAANARKTDSFAYLPELVEARRGFWQELLDNRLISQTKFERLVRQNDFGRHEKERFVERSLVETRQIMKNVATLMRRRYGNSSAVIGLNSELTKEMRQYLGFEHKNRDINDYHHAQDALCLGVAGQFAVNRGFFDNGAVSDGAANAYNIYLQDYLRGYREKLKAGDRKHGKAFGFIVGSMASADENKRINPKTGEIAWSEADKDYLRRVMNYRKMLVTQKVGDSFGALYNETRYGAAVKEGHDGIAFDKNKADTSLYGGFSSAKVVYSILVELKGKVRLVNITMQEYSMLGDCPSDEALKKVLVAKKPEYAKAKILLRHIPSMQLIRYKGACMTIKSATELNNARQLWLDCDVYNALDDYLKCGTSKSSIDIMQIWDALFDAVNKHYPLHRVEESTLAKARTKFEKLDLDKQLDVLGMIVVALHADPGRANLSLVGLPSEWKRVRSVSFSDDDEFVFQSPSGLFETKITIAELKKAE

SEQ ID NO: 4268 - protein, 1341 aa, unidentified
  REGION 1..1341: note = Description of Unknown: Cas Enzyme sequence
MEDMERYHIGLDIGTSSIGWAVIGDDFKIKRKKGKNLIGVRLFKEGDTAAERRSFRTQRRRLNRRKWRLKLLEEIFDPYMAEVDEYFFARLKESNLSPKDSNKKYLGSLLFPDISDSNFYDKYPTIYHLRRDLMEKDKKFDLREIYLAIHHIVKYRGNFLEKVPAKNYKNSGASIGFLLEEVNSLYKDIIGDESVAILNSGKFEDVEKIILDEETRNLDKQKSVGKLLVEDKKKKNIVTAFSKAILGYKFNIEDLLLIESDEKNKLTFNDENIDDIFNELSHSLDDNQMDLLTKTREIYFKFKLNMIVPTGYTLSESMIEKYEMHKAHLKMYKEFINTLNAKDRKILKNAYSDYINNEKAKAANAQENFYKTIKKTIKDNNSDTAKKIIGLIDEGNFMPKQRTGENGVIPHQLHQIELDRIIENQAKYYPWLAEENPVEKNRKFAKYKLDELVTFRVPYYVGPLVDKTESNKNEKETKFAWMVRKAKGTITPWNFENLVDRTESANRFIKRMTSKDTYIIGEDVLPASSLLYEKFKVLNELNNIKVNKKKLDVEQKQHVYLDLFTTRKNVTKDNLATSLNCDVESITGLSDNEKFNSSLSSYIDLKAILGNAVDDCNKNKDLEKIIEYSTIFEDGNIYKEKLSEISWLTDEQIEKLSNIHFKGWGRLSKKLLTQITNENGERIIDALWNTSNNFIQIISDESIQAKLAEINGEYADKSNLEDILDEAYTSPQNKKAIRQVMKVVEDIEKAMKCKPTSIAIEFTRRKGKSKLTNTRYKKISETYEKITDELISEYELGKLQSKLDSKANNMRDIYYLYFMQLGRDMYTGEKINIDELHQYYDIDHIFPRSFIKDNSLNNRVLTRKEINNNEKADRTAADLYAVKMGDFWRKLRKQGLITEKKYKNLLTRTDSIDKYTKQSFIKRQLVETSQVVKMAANILQDKYSNTKIIEVRARLNSDLRKEYELIKNREVNDYHHAIDGYLTIFIGQYLYKTYPKLRSYFVYDDFKKLDSNYLKHMDKFNFIWKLEDKKAEDVYDNVNNEFILNVPKMKDYIQKIYNYKYMLISKEVTTESGAFYKETKYKAGGMNLIPIKQNKPINIYGGYKEKRNSYMMLVKIKKKKETIYKIVGIPRLLSDELDRLNTMSEKQLLLETIARTSLSKTEQNFKIILDKIYYGQLVIDGNQKYTLGSVIYKHNAMQLHLSKQALEILAVGKTKSREVKDEELIAVYEEILLVVNKYFELYDISKFRQKLNDGLEIFKELPIYNIYENNKIKKIGKFEVLNRILIGLHANAARADLSVLGFKDLGKLQVNGGIKLSPDAKLIYQSPTGIFSRAVRVKDLG

SEQ ID NO: 4269 - protein, 1354 aa, unidentified
  REGION 1..1354: note = Description of Unknown: Cas Enzyme sequence
MKKVGEYYLGLDIGTDSVGYAATDKRYELLKYKGKPMWGSHLFDPASQCAERRAFRTARRRLDRRQQRVQLADEIFAPEVLKVDPMFYIRRKASALCREDRPDMDDINSSFNDKEYKDKHFHDQYPTIHHLIMDLINNREKKFDIRLINIAVDWLVVHRGHFLSDVGTANIERVQNFDPIYEEFLAYYDIEDIEKPWDAVDAEAFGNILKEKGINRKKNDLKELLYHGTIPNDEYFMDKKELVNFLAGGKVQCNKLFRNSDFDDDLKMSISDEMEVLLPQLGDYATIVGRMAAMYDWSVLSDILSSSAYISEAKIKIYEQHSNDLKRLKRFVKKYYSSKTYFEIFRASSKDLTNYTAYSYNLKSVKDGKEYPKKKATREDFLVYLKKTLNLDNIEYDKDDQLFVEEMKERIGDGSFLPKQVNSDNRVIPYQLYYDELRRILENASRHYPFLSEKDADGYVNSEKLLSIIKFRIPYYVGPLRKDNNSFGWIERKAEGPIRPWNFEEVIDIDESEAAFIRKMTNYCTYIPGKDVLPKWSLLYTKYTVLNEINNLKSNGKGISVEAKKAIYNDLFCRFKKVTPKMIKEYLRDNGYIQKNDEISGIDVQINASLKSRQDFNDVLNQGILSEEDVERIITRNTYSEDTRRYRLWLKKEYPKLNDDVMRRIGKLKYTDFGRLSGFFLSELVGASKETGESGTIMYFLWNTNENLMQLLSDRYTFSDEIEQIRNNYYAENKLGINEQMESLGISNAVKRPVVRTLAVVDDVVSTLGKVPEKIFVEMARGEDEKKQRTVSRKEQILNLYRQVEEDTRLLEKQLEDMGETANNSLQSDALFLYYMQLGKCMYSGEAIDLSQIKKDKYNIDHIYPQSFVKDDSILNNRVLVLSKINGDKKDVYPIDKSIREKMQPFWKMLCEKGLITKEKYNRLTRGTPFTDEEKMGFINRQLVETRQSMKAVTQLLKNRYPDTEIVYVKARLASDFKKDFDLAPKSRIINDLHHAKDAYLNVVAGNVYHEKFTKKWFRITDTYSMKTKVIFANDLERNGEVIWNHKKDLETVKKTYERNNIHLTKYAYSQKGGLFDQMPVKKGSGQVCLKKGMDISKYGGYNKPTASFFVIAKYLKGGKKEVSFVPVDLMVSERFLADYKFACEYIKDVLAGMNTKKIENVELPFRNRVVKIKSTLCLDGVKVWVNGKANGGKIVLLSLAESAYYDNDSVYYIGKIERYVEKKKTNRRLQHDEQYDELSEEKNLRLYDILIEKMHTKQFANMPGNQCSVLKEGRELFIKNDFDSQIQILVNCVNLLKSGRAGGCDLKAIGGKNASGVMTLGANISSSKYKDIRIIDYSPAGLHLNESVNLMEL

SEQ ID NO: 4270 - protein, 1172 aa, unidentified
  REGION 1..1172: note = Description of Unknown: Cas Enzyme sequence
VNKMKYYIGLDIGTNSIGWAVTDCEYNILKYKGKAMWGSHLFEEASDNLERRTKRSGRRRIRRRNWRLNQLKDSFREEIDKVDIDFFKRLKLHNDKFMLFNDEDYNDKVYYDEFPTIHHLIKHLKESDEKQDIRLYYLACSYFMKHRGNFYTNMSEDANTIDIEPLIKEYKDYIGVDFDFNDLKNDYVKLATGKSVNIQKLFPNAEYDKQNIKLDSDFEKIKTDLIPILGDDFTLIELAQKIFDAISYKNILGNNANITDAKIKNYDDFKKKFELLPKGKDRENEHKKLIEEIKDEKKTHGVIPYQVQLQELKAVLKQANKHYYIDTDRIINIFKSRLPYYMGPLDFERKGENSWVVFNDQYNGQKLTPENLYQYIDKAKTHEAFIQRMKSTCTYLKGEDTLPKHSMLYEKFSLLNELNMLQLNGKRIENDAKQFLYNKVITTTGNITVNKIATFLKEHYNKEINKDDLTGIDKQIKTAPLAIREYANYKDKLAEQEFDDIILHITIFSQEKGELKEWMRQNFAKLTDADIKNILSKSYKDYGNLSHELLENILVEDKSIIQAMWDTNKLFMEIVCEEGYAQQIEEHNNEYLDNNPQTLAQRLDDEYLSNPVKRQIYRTFAVVKDIVKAMKCEPEHIFIEMARGGGEKGKITIRRKEELQKLYTTFKTDEDVKKCSEALEKYDNKQLQSRKLFLWFMQLGKCMYTGKDIQLESINDNNTCDIDHIFPRSKVKDDSIHDNLVLVKKDANTKKGDIYPIPCEFRQVNLWQMLKNKKLISTTKYERLMRTTGFTEDELGKFINRQLVETRQSTKVVAKLLGEHYTNTQINYAKAGWTSEFRKEFDCLKCREVNDYHHAKDAYLNIVCGNRHRVRFGDWFNRKDNNYSIKAETLYTCEKLYDDSWQKGYLDKVKKQVNEKNNCQYTKYACPRTGAFYDGRVYTAKEVKNNPKLQYYPLKNNLAPSSRGGYKSAKTAYGYVDNGEVKWVNIMGEDKFDKKGKTIINFNTLISVNGLKYYITGKSNFHHNVQLVLGYKYEKYFKQLVKINEKISTSKGSYQIGEYDKITPEENLKMYHLLGSKIRNCYGKYNAIKLTQPIFEQDDKFKALSLEKQVKFLVNSIKMFQCNASAADLTILEGKANAGKLDNKHRLDKKDDNKIELIYQSPTGLFERRVEL

SEQ ID NO: 4271 - protein, 1391 aa, unidentified
  REGION 1..1391: note = Description of Unknown: Cas Enzyme sequence
MNRENAVEDYAVSLDIGNASVGWAAFTPNYRLMRAKGHELIGARLFEPASTAEERRMARTTRRRYSRRHWRLRMLDSMFDQALSEVDPSFLMRRKYSWVHPEDKNNEGHWFGGVLFDSNEQDKRFYEKYPTIYHLRKTLMEDDERHDIREVYLAIHHMMKYRGNFLTEGELAPSSVFDVEDLLKLLTEILQYADEDETGDDLELQADANGLTEALCTTKGSRSIRAKNAISILKEDTALSKRQEAIISAVFAGLEGNKLDLTKVFPNKEYTPEDKKTLALYFNKADYDEKRIAIGDSGLLEDLEDNECDFLDCIQRQYSAIALKQLLGDSTSVSESMCARYEQHQRNWDLIKRYCREESNAENINKNYGALVGWEIVGGQRRSIRGAKDYENKRKAANKFFEELIKGSVLSDQEKERLLHDIENDELFPVQRDSGNGVIPYQLHLNELKKIIQKQGRYYPFLLETYIKDGKEVNKLEGLLAFRVPYYVGPLVSRDDMQSSDNGENHWMIRKKKGVITPWNFDEMVDKDESGRKFIERLVGTDSYLLGEPTLPKNSLLYEEFEVLNELNNVRLSIRTGNHWADKRRVRLGHNEKQLLLEELFAKQATVTKKDAEKLLRRTYGNTYEISGLADEKKFVSSLSSYGKMCRTLKASYVNSHKDVVEKIIELQTVFEDKKTLKHQLQLLGELTETNCELLSNTHYTGWGKLSRKLLASKVAVCKIGNDFAPAKHSIIEIMRETDRNFMEIITDKDLGVGEWISQQNVGAEDGNSYQDIIDDLRVSPKVKRGINQAIRVIDDISKAVGKEPSRIFLELAGDVQQSARTVSRKSRLQGLYKSAGLQKEFQDLAESLNECSDNDLRDDRLFLYYTQLGKDMYTGEPLNLDRLSSDYDIDHIIPQAVTQNDSLDNRVLVARAANARKTDSFQYLPEIANRMRNFWQELLDARLISRVKFDRLNRQNDFSSHEKERFVQRSLVETRQIMKNVATIMRKRYGNSAAVIGLNSELTKEMRQYLGFSHKNRDINDYHHAQDALCLGVAGQFAVNRGFFANGLVSDGAVNSYNLYLQDYLRGYREKVNAGERRRNKAFGFIVGSMNSRNPDKRINPKTGEIVWREEDKAYLRKVMNYRKMLVTQKVGDSFGALYDTTRYGALSKKKMRIPFNKEMRDTDLYGGFSSEKTVYAVLIESKKKTRLVNIAMREYAKLGDHPSDDALRMILVEKKPEYGKARILLRHVPPMQLIRYGGALITIKSAAELNNAQQLWLPYGEYCLFDDVMNSADSVSEEQLCGLFDAIVESIQNYYPKHRFDETELAAFYAAFNRVSLEEKKDVIKEVVGALHADAKTANLKNLKMPESWGRMNNKSGYSFADSDEFIFQSPSGLFEQRISVGELKRRAR

SEQ ID NO: 4272 - protein, 1387 aa, unidentified
  REGION 1..1387: note = Description of Unknown: Cas Enzyme sequence
MSRKNAVDDYAISLDIGNASVGWSAFTPNYHLVRAKGHELIGARLFEPAQTAENRRMARTTRRRLSRRRWRLHMLDALFDAHLAEVDPSFLVRRKYSWVHPADENNADHWYGGILFDSKNQDKRFYEDYPTIYHLRRALMEDDVQHDIREVYIAIHHILKYRGNFLTEGQLNSSNVFNPDEFLGLMGEIIFYTTGELDDSWKDNIDEESLTDALCAARGSRKARAEKALAVIQNGYVLSKVQSDIFKAVFAGLEGNKLDLAKAFVKDEISSDDKKILGVYFNKADYEDTRSRIIDSGLLDDSECDFLDKLQVQYSAITLKKLLGNAASISDSMCMSFEQHQKNWGIIKKEFRTDSNATEINKHYGELVGWKMDGKQRRSIRGTSAYEDVRKKANAYFRKLVDTSAFDESMRQWLLDDIEEDRLFPIQRDSDNGVIPYQLHQNELKRILEKQGKYYPFLLDTFEKNGKQVNKIEGLLTFRVPYFVGPLVQRDDMQPSDNGENHWMERKQSGVITPWNFDEMVDKDESGRRFIERLVDTDSYLLGEPTLPKNSMLYQEYEVLNELNNVRLSVRSGNHWADRRRVRLGREEKALLIHDLFMKGGSVSKKAAENALRRKYGRTFELSGLADEKKFTSSMSTYGKMCRAFSPKGGAEYVDKHFDLVEKIVELQTVFEDKETLRHQLSMLEELSEQDCELLCNTHYTGWGRLSRKLLTSKIGECKIENDFAPQKHSIIEILRSEDRNFMEIISDKRLGFTDWIEEQNLGVESNRPLMDVVDELRVSPKVKRGIIQSIRLIDDISKAVGKEPSRIFLELADDVQASVRTISRKNRLLDLYKNAGLKKEFSNIFERLSASSDKDLQDDRWFLYYTQLGKDMYTGEPLDIDRLSSDYDIDHIIPQAVTQNDTLDNRVLVSRAVNARKTDSFAYLPQLVKERREFWQKLLDDGLISRVKFERLMRQNDFSVREKERFVERSLVETRQIMKNVATLMRQRYGNSSAIIGLNSELTKEMRQYLGFEHKNRDINDYHHAQDALCLGIAGQFAINRGFFSDGMVSDGAKNSYNRYLQDYLRGYREKMKAEDRKHGHAFGFVVGSMSSPDDTKRVNPKTGEIVWSGADKEYLRKVMNYRKMLITQKVGDEFGPLYRETRYGASVKEGRDGIPFDKKRVSTALYGGFSSAKVMYSILIELKKKTRLVNITMQDYALLGDQPSDEELRRILKKEGREYEKSRILLRHVSPMQLIRYSGALMVVKSATELNNAQQLWLSRSHYDALDNYLNGRRCELASDELLRIIFSAVQKHYPCHAMTDEQILFACEKIKELKPEEQLNLIKQIVAALHADPRRADLSILGLPSEWKRFRNLSFNDEDEFIFQSPSGLFEKRITVAELKRRVR

SEQ ID NO: 4273 - protein, 1398 aa, unidentified
  REGION 1..1398: note = Description of Unknown: Cas Enzyme sequence
MSRKNYVDDYAISLDIGNASVGWSAFTSNYRLVRAKGHELIGARLFDPADTAESRRMARTTRRRYSRRRWRLRLLDALFDQALSEVDPSFLARRKYSWVHPDDESNADRWYGGILFDSSDQDKRFYEKYPTIYHLRKTLMEDDAQHDIREIYLAIHHMVKYRGNFLVEGTLESSNAFKEDELLKLLGRITRYEISEGEQNSDIEHDDENKLVAPANGQLADALCATRGSRSMRVDNALEALSAVNDLSREQRAIVKAIFVGLEGNKLDLAKIFVSKEFSSEDKKILGIYFNKSDYEEKRVQIVDSGLLDDEEREFLDRMQEQYNAIALKQLLGKSTSVSDSKCASYDAHRANWDLIKSQLRTKENEKEINENYGILVGWKIDNGQRKSVRGESAYENMRKKANAFFKKMIGASDLSETNKSRLIHDIEEDKLFPIQRDSDNGVIPHQLHQNELKQIIKKQGKYYPFLLDTFKKDGKRINKIEGLLAFRVPYFVGPLVSPEDLQESDNGENHWMVRKKKGEITPWNFDEMVDKDASGRKFIERLVDTDSYLLGEPTLPKNSLLYQEYEVLNELNNVRLSVRTGNHWNDKRRMRLGREEKTLLYQRLFMKGQTVTKKAAENLLRKEYGRTYELSGLSDESKFTSSLSTYGKMCRIFGGEYVDGHRDLMEKIVELQTVFEDKETLLHQLRLLEGLSESDCALLVNTHYTGWGRLSRKLLTTKAGECKIGDDFAPRKHSIIEIMRAEDRNFMEIITDKQLGFSDWIEQENLGAENGSSLMEVVDDLRVSPKVKRGIIQSIRLIDDISKAVGKRPSRIFLELADEIQPSGRTISRKSRLQDLYRNANLGKEFRGIADELNACSDRDLQDDRLFLYYTQLGKDMYTGEELDLDRLSSAYDIDHIIPQAVTQNDSIDNRVLVARAENARKMDSFTYMPQIADRMRNFWQMLLDNGLISRVKFERLTRQNEFSEREKERFVQRSLVETRQIMKNVATLMRQRYGNSAAVIGLNAELTKEMRRYLGFSHKNRDINDYHHAQDALCVGIAGQFAANRGFFADGEVTDGAQNSYNQYLRDYLRGYREKLSAEDRKQGRAFGFIVGSMRSQDEQKRVNPRTGEVVWSEEDKDYLRKVMNYRKMLVTQKVGDDFGALYDETRYAATDPKGIKGIPFDGAKRDTSLYGGFSSAKPAYAVLIESKGKARLVNVTMQEYSLLGDRPSDDELRKVLAKKKSEYAKANILLRHVPKMQLIRYGGGLMVIKSAGELNNAQQLWLPYEEYCYFDELSQEKGSLDKDDLRRLLESVVDAVQRFYPWHRFNEKELGCLYDAFARLSEDEEKNVIDGMVIALHADAKRSDLSKVGLSTNWRRMVNGVGFLFSDEDEFIFQSPSGLFEKKVTVGELKRKAKK

SEQ ID NO: 4274 - protein, 1420 aa, unidentified
  REGION 1..1420: note = Description of Unknown: Cas Enzyme sequence
MSRKNYVDDYAISLDIGNASVGWSAFTPNYRLVRAKGHELIGVRLFDPADTAESRRMARTTRRRYSRRRWRLRLLDALFDQALSEIDPSFLARRKYSWVHPDDENNADCWYGSVLFDSNEQDKRFYEKYPTIYHLRKALMEDDSQHDIREIYLAIHHMVKYRGNFLVEGTLESSNAFKEDELLKLLGRITRYEMSEGEQNSDIEQDDENKLVAPANGQLADALCATRGSRSMRVDNALEALSAVNDLSREQRAIVKAIFAGLEGNKLDLAKIFVSKEFSSENKKILGIYFNKSDYEEKCVQIVDSGLLDDEEREFLDRMQGQYNAIALKQLLGRSTSVSDSKCASYDAHRANWNLIKLQLRTKENEKDINENYGILVGWKIDSGQRKSVRGESAYENMRKKANVFFKKMIETSDLSETDKNRLIHDIEEDKLFPIQRDSDNGVIPHQLHQNELKQIIKKQGKYYPFLLDAFEKDGKQINKIEGLLAFRVPYFVGPLVVPEDLQKSDNSENHWMVRKKKGEITPWNFDEMVDKDASGRKFIERLVGTDSYLLGEPTLPKNSLLYQEYEVLNELNNVRLSVRTGNHWNDKRRMRLGREEKTLLCQRLFMKGQTVTKRTAENLLRKEYGRTYELSGLSDESKFTSSLSTYGKMCRIFGEKYVNEHRDLMEKIVELQTVFEDKETLLHQLRQLEGISEADCALLVNTHYTGWGRLSRKLLTTKAGECKISDDFAPRKHSIIEIMRAEDRNLMEIITDKQLGFSDWIEQENLGAENGSSLMEVVDDLRVSPKVKRGIIQSIRLIDDISKAVGKRPSRIFLELADDIQPSGRTISRKSRLQDLYRNANLGKEFKGIADELNACSDKDLQDDRLFLYYTQLGKDMYTGEELDLDRLSSAYDIDHIIPQAVTQNDSIDNRVLVARAENARKTDSFTYMPQIADRMRNFWQILLDNGLISRVKFERLTRQNEFSEREKERFVQRSLVETRQIMKNVATLMRQRYGNSAAVIGLNAELTKEMHRYLGFSHKNRDINDYHHAQDALCVGIAGQFAANRGFFADGEVSDGAQNSYNQYLRDYLRGYREKLSAEDRKQGRAFGFIVGSMRSQDEQKRVNPRTGEVVWSEEDKDYLRKVMNYRKMLVTQKVGDDFGALYDETRYAATDPKGIKGIPFDGAKQDTSLYGGFSSAKPAYAVLIESKGKTRLVNVTMQEYSLLGDRPSDDELRKVLAKKKSEYAKANILLRHVPKMQLIRYGGGLMVIKSAGELNNAQQLWLPYEEYCYFDDLSQGKGSLEKDDLKKLLDSILGSVQCLYPWHRFTEEELADLHVAFDKLPEDEKKNVITGIVSALHADAKTANLSIVGMTGSWRRMNNKSGYTFSDEDEFIFQSPSGLFEKRVTVGELKRKAKKEVNSKYRTNEKRLPTLSGASQP

SEQ ID NO: 4275 - protein, 1060 aa, unidentified
  REGION 1..1060: note = Description of Unknown: Cas Enzyme sequence
MYKKDFRLGIDMGSTSLGWCMLELNEHNEPCNVIKMGVRIFSDGRKAKNLEPLSVTRRSYRSQRRNLDRYLYRIRNLVQFFMEEGFLPIEKEVRDKFFTIDPYEIRVKALDEKIELPELARAIIHLAKRRGYKSNRKTDKDDKDNKDKKNSYTEAINNLKENLEATQARTLGEYLWQKNVDLPEKKQHFKKPLKFRYDKKETDDELIFPTREMVENEFDMIMLVQKKFHPTLTEEIIAKIRHTIFFQFPLQPQKVGKCQLLPEFERCPKAHPLFQEFRLRQNINNLKLIDISDNSVHELSAEQKNLLFDFAKTKANAALKNMRKKILAKEADNFIFNFESEARKDFQGDLTFCEFHKDKNKQLAPIWDNADLKKKELIIEAINGDTSDEIAISKLITLGISQEIAEELINVNLPDGHGNLSKEALEKLLPAMRNGEIYAKACELNGLKFSDDYNGEIYDEGNLPYYGELLRKETLELARKSGDTNADEFGKINNPSVHIALNQLQKMVNAITKQYGAPKQIVLELGKSIKLSTEQIKDLNNKNLKNQKYNEKIAEMLEKAGIENNYENRLKVKLWEELDQDPLNRRCIYSGKQINFTELFSPKYEIEHILPKSKTFDDSIANKTISYYIANKYKGERSPEEAFGNSKDGYDWNQISARSQHLPNNKKWRFLADAMDKFNDENEVIARLLNDTRYMARVAAKYMYYVCGKDNVWTVTGKHTAMLRGKWGLNSILGDDDNKDRSDHRHHSIDAFVIALTSRSFVKQLANTIKNSRDRFIEKLAPPYPDFDYDNFKNTVHSIVVSHKPDQINSKTLQKRNQTTGPLLQEQAYSYLGPNPENKNQNLYLIRKKIQKLTLKDVENIYSPEWREKISSISDLCNDEKEFKEKLNELAKIRNIKKLKMIEPKDPQTMIPIKNKEGKIHKYQASGENAYAEIYLPRPQEPNCKWEMEVVNSFFANQPDFIPQWKKDYPKGKKIMRLYKNDIVALDTSINNRKLLRVRKIRISGIYIRDLNISQKDDDKGEFYSVRQLHLKRACKAGVDILGRFFDPKAGKENANAGNQ

SEQ ID NO: 4276 - protein, 1075 aa, unidentified
  REGION 1..1075: note = Description of Unknown: Cas Enzyme sequence
SKMKERYRLGVDLGSTSLGWCMLKLDDNNDPTGIINMGVRIFPDGREMKSHEPLAVKRRGYRGQRRNLDRYLERIRALISYLLENGFLPEDERHRNEVFKINPYHLRTKALDEQLSPAEFARALIHLAKRRGFRSNRKIQSDKTTKITEGIENLRKQLDETGARTLGEYMWELYNKNPDHPNQKTLKKRGVEAYPHKMGHHIDQPIKFRYEKTYANPIFPTRQMVEHEFNAVWHAQADFSDIYTEEHRQKIHEIIFFQRPLKPAQQGRCEFEPDELRAPKAHPLFQEFRILQNLNNMKEVDLFQGTSSCLSPEHHDKLYALLHAKKEVEFKAMRKALWGKEADDHGFNLETEKTKKLPGDQTSAVFNKKDNADLKPVWDAWTDELKSSLIEILISDMDDVQKVEEMATLGLEEDIIDRMLDLNFPDGYASVSLKAIKKILPFLRQKLVLSEACREAGYDHSLEYSGEIYDQGDLPYYGEVLKQEVTKLTRNSGDEEADVHGKINNPTVHVALNQLWKLVNSLSLKYGAPAQVVLELGKEARMSAEKRKNLIKAMNDNEKLNDEIRAFLTEHHQPINHNNMLRVKLWRELGKNEIDRRCVYTGDQISVSDLFSHKIEIDHILPKSRTYDDTTANKVLCAARANRAKGEKTPWEAWHDSPGEYKWEDILARSSRLARDSQKWRFRSDAMERFEDEGELLKRMLNDTRYMSRVAMKYMWYVCGNSNVWTVTGKHTGLLRKKWGLNAVFEGQVREKDRTDHRHHAIDAFVIALTSRSMVKKMADNIKQAKGRLIEGIDLPYPQFDHQEFQNRIHNIAVSYKPDQINADKLAKRNQTGGALVKETAYGYAGPDPDSPKYHLYTIRKAVSELTRKDIKNVVQADLRNELEQLASKFPDDDFKVEIKKWAASNNIKKVKLALSKNPAVMVPIRDKNGKAFKYMDSGENLFADIYLSTPTDPNCKWGIEIVGSYYAQRPGFVPQWKKDHPKGKKIMRVFKNDIIALDGPDGKRELRRVRKMTNSKLYLRPINIAKKPQVDSTGKQVSEDKGEAFVMSTLQDLNARKAGIDIIGRVFDPIVNEQ

SEQ ID NO: 4277 - protein, 1342 aa, unidentified
  REGION 1..1342: note = Description of Unknown: Cas Enzyme sequence
MIKRGLTMKQPYSIGLDIGTNSVGWAVINEGFDLRKYKHQNMWGAHLFDEAQKAATRRSFRSSRRRLARRKRRITLLQQIFNDEIQKIDPHFYLRLSESMLHLGDKNSALELDANILFADHSFTDKSYREKYPTIYHLRSDLFHNSKKQDIRLVYLALHHIIKYRGNFLVEGGVDNVISSFDNQNLQKFMDFIGADESMAQKVKTILLDRSLSRSVRKSDIIKLLQPTPDNKRIVSEAVGAAIGLKWNANKLFEDDSLEAKGEFSNKNYEERRDEIAAAIGDDRYELVETLESVYQWTIFSQFIRKDSCLSDIMVEKYDDYRQDLSDLKSLFHEFLPKESYKSFFHGDTAEFEQYNKHKYSLEDLYKSIKNHLGNVAKEDPRYQRFEKRAELGEFLARQRIRDNGAIPHQIHQYEFERIVDNQAQYYPFLAQNRDKIISIFTFKLPYYIGPLKTGGNFAWSVKKKDGVIYPWNFDEMIDDEASAEKFIDRMRNNCTYLPDEEVLPKNSLLYQEYEVRNELKNVTVNGERLSPDIQNRIVDELFNKEPSVTHKKLIKYLYDNQIYSTTSLVISGTAKEKSFASSRKSYIDFTQKVGTPITPKNQQAIEEIIKWITLFEDKKILAKKLQKYSDIFNENQLRTILKLNYSGWGRLSCKLLDGITAHTRYGEMTVLETMRRCSDNFMQIIQSDQYEFKKIIDDILSLDQRTEITYDDIKNLAGSPGIKRALWRSVRIIDEIVDTIGYEPKLISIEMARNEEEKVRTKSRYSQLEKMYKDLYGKEYNNSEIKSQLADYKDKLDRKKYYLYFLQNGKCAYTGKPLDIENDLKDCEIDHILPRSLTKDDSLDNTVLVLRKENQRKLDDYPIVPDIQNRMRPIWMSLKNANLMSQLKFQRLTSQKQLSEDRIAGFVNRQLVETRQITKHLARMLTEKYHDSSTEVFTICAGMSSEYRRIHDLPKCREVNDLHHAKDAYLAAVLAQYVKIRYPKLDKTFIYGEYNRFKSTKQNDADRSSFILSSMKYNFTNTETGEIIWQSKTVHDVIDRTMKYNDCLITRKTKIGDDQFYDQTIYGKSSGKTMIARKVNLPVGKYGGYSGEKAAYFAAINYLKQIRNKDVSVNEIVSVPAQIYTLEKTRPDSINEYISNNYKQATVLLPKIPINQKIEYEGNEQFIVGSGEVTNAKQLKLPYDIEYAVAVALKRGIPRVTISEEQAKEDDNLRDKRAKQIEKRNKVTSGIERFWEVYTEKLSSQYQQFGGAVEKAKAANSEYQVMPMEDKIKAIDLVLAATHAGSGRVDMKKSFPKLQLPSDFGRMIGKNLDPTKITFIYESITGLHCRKLDGKLLEQDQ

SEQ ID NO: 4278 - protein, 1335 aa, unidentified
  REGION 1..1335: note = Description of Unknown: Cas Enzyme sequence
MMKQPYSIGLDIGTNSVGWAVINEGFDLRKYKHQNMWGAHLFDEAQKAATRRSFRSSRRRLARRKRRITLLQQIFDNEMQKVDPHFYLRLSESMLHSCDKNSALELNANILFADRSFTDKSYREKYPTIYHLRSDLFHSSAKQDIRLVYLALHHLIKYRGNFLVEGGVDNVISSFDNQNLEKFIDFIGADESMAKKVKAILLDRSLSRSARKSDIINLLQPSPDNKRAVSEAVGAAIGLKWNANKLFEDDSLEVKEEFSNKNYEEQRDEIAAAIGDDRYELVETLESVYQWTIFSQFIRKDSCLSDIMVEKYDDYRQDLSDLKALFHEFLPQKYKTFFHGDAAEFELYNNHKRNLDDLYKSIKKQLGEVAKDDPRYQRFEKRAELGEFLARQRIRDNGAIPHQIHQYELERIIDNQAQYYPFLAQNRDKIISIFTFKLPYYIGPLKTGGDFAWSVKKKDGVIYPWNFDEIIDDEASAEKFIDRMRNNCTYLPDEEVLPKNSLLYQEYEVRNELKNVTVNGERLSSDVQNRTVDELFTKEPSVTYKKLIKYLYDNQIYNTDSLIISGTAKEKSFASSRKSYIDFTQKVGVSITPKNQQAIEEIIKWITLFEDKKILAKKLQKYSDIFDDNQLRAILKLNYSGWGRLSHKLLDGITAHTPYGELTVIETMRSSKDNFMQIIQSDRYEFKKIIDDILSANQHTEITYDDIKNLAGSPGIKRALWRSVRIIDEIVDTIGYEPKLISIEMARNEDEKVRTKSRYSQLEKMYKELYGKEYTKSDIKSQLADYKDKLDRKKYYLYFLQNGKCAYTGEPLDIENDLRDSEIDHILPRSLTKDDSLDNTVLVLRKENQRKLDDYPIASDVQNHMRPIWISLKNTKLMSQLKFQRLTNQKQLSEDRVAGFVNRQLVETRQITKHLARMLTEKYHNSSTEVFTIRAGMSSEYRRIHDLPKCREINDLHHAKDAYLAAVLAQYVKIRYPKLDNAFIYGEYMKFKSKRQTDTDRSSFILASMNYDLTNTETGEIIWQSKTTRDVIDRTMKYNDCLITKKTEIGDNQFYDQTIYGKNSGATMIARKANLPVDKYGGYSGRKAAYFTAINYLKQVRNKDVSVNEIVSVPAQIYTLEKTRSDSINEYISNNYKQATVLLPKIPINQKIEYDGNEQFVVGSSEVTNAKQLKLPYDIEYAVAIALKRRIPRVTISEEQAKEDDNLRDKRAKQIEKRDKVISGIERFWEVYTDKLSSQYQQFGNAVEKAKAASSKYQAMSVDDKIKVIGLVLVATHAGSGRVDMKKNFPKLQLPSDFGRMIGKNLDPTKLTFVYESITGLHRRKLDGKTLEQGR

SEQ ID NO: 4279 - protein, 1334 aa, unidentified
  REGION 1..1334: note = Description of Unknown: Cas Enzyme sequence
MKQPYSIGLDIGTNSVGWAVINEDFSLCKYKHQNMWGANLFDKADDAATRRSFRSSRRRLARRKRRITLLQQIFDDEIQKVDPHFYLRLSESMLHLGDKNSALELDANILFADHSFTDKSYREKYPTIYHLRSSLFHDSEKQDIRLVYLALHHIIKYRGNFLIEGGVGNVISSFDSQNLQIFMEFIGADGSTAQKIKAILLDRSLSRSARKSDIINLLQPSSDKKRAVSEAVGAAIGLKWNANKLFEDDSLEAKGEFSNKNYEEQRDEIATAIGDDRYELVETLESVYQWTVFSQFIRKDSCLSDIMIEKYDAYRQDLSDLKALFHEFLPQKYKTFFHGDAAEFELYNNHKRNLDDLYKSIKKQLGEVAKDDPRYQRFEKQAELEEFLSRQRIRDNGAIPHQIHQYELERIIDNQAQYYPFLAQNRDKIISIFTFKLPYYIGPLKTGGDFAWSVKKKDGVIYPWNFDEMIDNEASAEQFIDRMRNHCTYLPDEEVLPKNSLLYQEYEVRNELKNMTVNGERLSSDIQNRIVDELFTKESSVTYKKFIKYLYDNQIYNTDSLVISGTAKDKSFTSSRKSYIDFTQKVGVSITPKNQRAIEEIIKWITLFEDKKILAKKLQKYSDIFDDNQLRAILKLNYSGWGRLSCELLDGITAHTPYGELTVIETMRSSKDNFMQIIQSDRYEFKKIIDDILSADQRTDIAYDDIKKLAGSPGVKRALWRSVRIVDEIVDTIGYEPKLISIEMARNEDEKVRTKSRYGQLEKMYKDLYGKEYTKSDIKSQLAKYKDKLDKKKYHLYFLQNGKCAYTGDPLDIENDLKDCEIDHILPRSLTKDDSLDNTVLVLRKENQRKLDDYPIAPDIQNHMRPIWTSLKNAKLMSQLKFQRLTSQKQLSEDRVAGFVNRQLVETRQITKHLARMLTEKYHDSSTEVFTIRAGMSSEYRRIHDLPKCREVNDLHHAKDAYLAAVLAQYVKIRYPKLDNAFIYGEYMKFKSKEQTDTDRSSFILASMNYDFTNTNTGKIIWQSKTTHDVIDRTMKYNDCLITKKTEIGDNQFYDQTIYGKNSGATMITRKANLPVDKYGGYSGRKAAYFMAIRYLKQVRNKDVFVNEIISVPTQIYTLEKTKPGSINEHLHNNYKQATVLLSKIPINQKIEYDGNEQFIVGSKEVTNAKQLKLPYDVEYAVAVALKQGIPQITITEEQAADDNKLQRKRNRQIERRDRVISGIERFWEIYTDKLTNQYQQFGSVVEKAKVTNNEYRAMPVEYKIKAIGLVLTATHAGSGRVDMKKSFPKLGLPDDFGRMKGKKLDPAKLTFVYESITGLHRRKLDGKTLEQGR

SEQ ID NO: 4280 - protein, 1342 aa, unidentified
  REGION 1..1342: note = Description of Unknown: Cas Enzyme sequence
MKQSYSIGLDIGTNSVGWAVVDEDFKLRKYKHQNMWGAHLFDEAQKAATRRSFRSSRRRLARRKRRITLLQQIFDDDIQKVDPHFYLRLSESMQHLGDKNSALELDANILFADHSFTDKSYREKYPTIYHLRSDLFHNSAKQDIRLVYLALHHIIKYRGNFLVEGGVDNVISSFDNQSLQKFMEFIGANDSTAKNIKTSLLDRSLSPSVRKSDIIKLLQPSPENKRVIGEAIGAALGLKWSASKLFSDDSLEREGKFSDKNYEEQRDEIAAAIGDDRYEFVETLESVYQWTVFSQFIRKDSCLSDIMVEKYDAYRQDLSDLKSLFREFLNEKNYKSFFHGKKSSFELYNTHKKYLSENNNKITPLYKDIKNILTNIAKEDPRYQRFEKRAELGEFLARQRIRDNGAIPHQIHQYELEQIIDNQAQYYPFLAQNRDKIISIFTFKLPYYIGPLKTGGNFAWSVKKKDGVIYPWNFDEMIDDEASAEEFIGRMRNHCTYLPDEEVLPKNSLLYQEYEVCNELKNITVNGERLSPDIQNRIVDELFAKESSVTYKKLIKYLYDNQIFSTDSLVISGTAKEKSFASSRKSYIDFTQKVGVSITPKNQQAIEEVIKWITLFEDKKILTKKLQKYSDIFNENQLRTILKLSYSGWGRLSHKLLDGITAHTRYGEITVIETMRRCSDNFMQIIQSDQYEFKKIIDDILSLDQRTEITYDDIKNLAGSPGIKRALWRSVRIIDEIVDTIGYEPKLISIEMARNEDEKVRTSSRYSQLEKMYKDLYGKEYNKSDIKSQLADYKDKLDRKKYYLYFLQNGKCAYTGEPLDIENDLKNCEIDHILPRSLTKDDSLDNTVLVLRKENQRKLDDYPIAPDVQKRMRPTWILLKRAKLISDVKFQRLTDPNQLPDDKISNFIKRQLVETRQITKHLARMLTEKYHDSSTEVFTIRAGMSSEYRRIHDLPKCREVNDLHHAKDAYLAAVLAQYVKIRYPKLDKTFIYGEYLKFKSKKQTDADRNSFILASMHYDFTNTETGEIIWQGKTAHDIVDRTMKYNDCLITRKTKIGDDQFYDQTIYGKNSGKTMIARKANLPVNKYGGYSGEKAAYFMAINYLKQVRKKDISVNEIVSVPAQIYTLDKTKPGAIDEYIRNNYKQATVLISKIPINQKIEYEGNKQFIVGSSEVTNAKQLKLPYDIEYAVAIALKQGIPRVTVSEEQAAENNKLQSKRNKQIERRDRIIDGVEKFWEVYANKLTNQYQQFGDAGHNAQSAVTEYARLSLDDKIKVINMVLKATHAGSGRVDTSKEFPQLGLSSRFGRTDGKTLDPTKLTFVYESITGLHRRKLDGKLLRQDQ

SEQ ID NO: 4281 - protein, 1339 aa, unidentified
  REGION 1..1339: note = Description of Unknown: Cas Enzyme sequence
MKQPYSIGLDIGTNSVGWAVINEGFDLRKYKHQNMWGAHLFDEAQKAATRRSFRSSRRRLARRKRRITLLQQIFDNEMQKVDPHFYLRLSESMLHSCDKNSALELNANILFADRSFTDKSYREKYPTIYHLRSDLFHSSAKQDIRLVYLALHHIIKYRGNFLVEGEVDNVISSFDNQNLEKFIDFIGADESMAKKVKAILLDRSLSRSARKSDIINLLQPSPDNKRAVSEAVGAAIGLKWNANKLFEDDSLEVKEEFSNKNYEEQRDEIAAAIGDDRYELVETLESVYQWTIFSQFIRKDSCLSDIMIEKYDAYRQDLSDLKALFHEFLPQKYKTFFHGDAAEFELYNNHKRNLDDLYKSIKKQLGEVAKDDPRYQRFEKRAELEEFLSRQRIRDNGAIPHQIHQYELERIIDNQAQYYPFLAQNRDKIISIFTFKLPYYIGPLKTGGDFAWSVKKKDGVIYPWNFDEMIDDEASAEKFINRMRNNCTYLPDEEVLPKNSLLYQEYEVRNELKSVTVNGERLSPDIQNRIVDELFTKELSVTYKKLVKYLYDNQIYNTDSLIISGTAKEKSFASSRKSYLDFTNKIGVEITPTNQKAIEEIIKWITLFEDKKILAKKLRKYSNIFNENQLRAILKLNYSGWGRLSRELLDGIIAHTPYGELTVIETMRHSKDNFIQIIQSDRYEFKKIIDDILSANQHTEITYDDIKNLAGSPGIKRALWRSVRIIDEIVDTIGYEPKLISIEMARNEDEKVRTKSRYSQLEKMYKELYGKEYTKSDIKSQLADYKDKLDRKKYYLYFLQNGKCAYTGEPLDIENDLRDSEIDHILPRSLTKDDSLDNTVLVLRKENQRKLDDYPIAPDIQNHMRPIWISLKNAKLMSQLKFQRLASQKQLSEDRVAGFVNRQLVETRQITKHLARMLTEKYHNSSTEVFTIRAGMSSEYRHIHDLPKCREINDLHHAKDAYLAATLAQYIKIRYPKLDNAFIYGEYMKFKSKGQTDTDRSSFILASMNYDFTNTNTGEIIWQSKTAHDVIDRTMKYNDCLITKKTEIGDNQFYDQTIYGKDSGATMITRKSNLPVDKYGGYSGRKAAYFMAIRYLKQVRNKDVFVNEIISVPTQVYTLEKTKPGSINEYLRKNYRQVIVLVPKIPINQKIEYDGNEQFIVGSSEVTNAKQLKLPYDIECAIAIVLKQGIPHVTISEEQAADDNKLQRKRNRQIEKRDRVISGVEKFWGIYAEKLANQYQQFGDAGHNAQSALVEYSELSLDDKIKVIGLVLRATHAGSDRVDMKGSEKKPVFPELGLPNSFGRMAGKSLDPTKLTFVYESITGLHRRKLDGKTLGRDR

SEQ ID NO: 4282 - protein, 1109 aa, unidentified
  REGION 1..1109: note = Description of Unknown: Cas Enzyme sequence
MAVLSGSTVKMCDLFDDDELKTAEKNSISFKSGYEENEETYASVLGDRFELVELLKAVYDWAVLADILDGKKYISEAKVAVYEKHKNDLKTLKKYVKTYLPEEYNEIFKISDGKCDNYAAYSGHIKESGKTGELKKACNCEQFCDYLKKKLGKNADPSYKEMFDEIENKTFMPKQVTKDNGVIPMQINEEELKAVLDNAKEYLPFLNSCDENGVSVYDKIIKIFEYRIPYYVGPLNTHTQKSWLKRKDGEKIYPWNFNDVVDVDASAEKFINNLTSKCTYLPQCDVIPKDSLLYSKFAVLNEINNLKINGEDIPVELKQRIYNDLFMTRRKVTVSKLKDYLKSLGCLKNDDVLSGIDANIKSSLKPYLDFKDYENLSPKDKEDIIASSVIFGDDKKLLKKRLKKLFPEKLTDDDIKKICKLKYSGWSRLSKEFLCDVEFTYKKTGEVMNIITALWETNFNLMQILYSEDFCPGDDEKKTVNDKINELSSDGKEHSMRELVDSLYVSPKVKRPILRSLLIAKEIEKIQGKPPKKIFIEVARGIDNREERHRDSRKNRLMELYKSCKKEAEKFCPDFDVLSKSLNDEDESRLRSDKLYFYYIQLGRCMYTGDEISLGELLNGNSRFDIDHIYPQSKIKDDSLTNRVLVNKTVNAGKTNVYPIDAAVQSKMSSYWQMLRNSGLISEETYKRLTRKTPLTDDELSAFVSRQLTETQQSTKAVAHILEQLYPKPKTEIVYVKAALAHAFRQKNDMLKCREVNDLHHAKDAYLNIVVGNAYNVKVTHNKINFIKGLQNNDKRYTVNPENFFNYDIPGAWSVKDSMNTVRRFMNKNNIRYTRFPRKKQGGLFKINPLKKGKGQVPLKASGARSCIEKYGGYDKATSAYFSYVEYTDKKGKTVRQMFPVNLYEVKEYEADMQGFVANRIDGASSVKILIPCVKYDACISFDGCRMYISNKTGNQIGYKPGIQLVLGYKYERYIRNIENYLTKYKDREIISRDNISAEENIELYDILTGKMLNTVLRVKFSGIGKKLENRREKFVLCSPEEQCYVLNEILKILHANVLSGDLRLIGESGQAGVMVTNVQFTGIKNVGSIKLINQSVTGLFEQEIDLLK

SEQ ID NO: 4283 - protein, 246 aa, unidentified
  REGION 1..246: note = Description of Unknown: Cas Enzyme sequence
MGKKLRNVDYDYYLGLDIGSDSVGWAVTDADYVIPKFNGNAMWGVHLFDEGQTSAERRGFRSARRRTQRKKERLSLLEMLFDEEICKKDCTFFRRLHESNLWPEDKSGDDKYAVFADENYTDKDFCKEYPTIYHLRYELIKNKEPHDVRLVFLALHHIIKNRGHFLFDSLSSAKDFDSAYGALCSYLGDNEIQLNCSDIEQFKDILKDRHQGKIEKTKNLASLFGITKKIRPRFLRRNGGFKRLDC

SEQ ID NO: 4284 - protein, 1335 aa, unidentified
  REGION 1..1335: note = Description of Unknown: Cas Enzyme sequence
MKQSYSIGLDIGTGSVGWAVINEDFSLRRHKHQNMWGANLFNEAQKAELRRSFRSSRRRLARRKRRITLLQQIFNNEICNVNPNFYLRLTESMLYIDDKSSSLDLDANILFSDHTFTDKTYREKYPTIYHLRSELFHNPEKQDIRLIYLALHHIIKYRGNFLIEGGVGGVISSFDSQNLQKFMEFIGAGDKEAKQIKSILLNQSQTRKSRKLSIIQLLQPSADNKSIISEAVGAAIGLKWNAEKLFDDKSLEIKGEFSDKNYEDQRDDIATAIGDDRYDLIETLESVYQWTIFSQFIRKDSCLSDIMVEKYNAYRQDLSDLKGLFRDFLSEKEYKSFFHGDTAKFEQYNAHKIDAKDLSDSIKKLLSESAKDDARYQRFEKRSELGEFLSRQRIRDNGAIPHQIHQYELEKIIDNQAAYYPFLAQNRDKIISIFTFKLPYYIGPLKTGGDFAWSIKKKDGVIYPWNFNEIIDDEASAEKFIERMRNKCTYLPDKDVLPKNSLLYQEYECRNELKNVTVNGKRLSPDIQNRIIDELFTKEYSVNYKKLAKYLYDNQIYDTSSLVISGTADDKSFMSSRKSYIDFTNKIGIEITPENKAAIEEVIKWITLFEDKKILSKKLQKYSDIFSKDQIDSILKLKYTGWGRLSGELLDGITAHTRYGKMTVIEVMRQCSDNFMQIIQSDRYEFKKIIEDALLEDANPEITYDDIKNLAASPGIKRALWRSIRIIDEIVDTIGYAPKLISIEMARSEEDKVRTKNRYSQLEKMYKELYGREYNKSDIKPQLENYKDCLDKKKYYLYFLQNGKSAYSGKKLDIENGLKDCEIDHILPRSLTKDDSLDNTVLVLREENQLKLDDYPISPDVQKKMLPIWMSLKNAKFMSQLKFQRLTSQKQLSDDQIYGFINRQLVETRQITKHLARMLTEKYKNSSTEVFTIRAGMSSEYRRIHDLPKCREVNDLHHAKDAYLAATLAQYVKVRYPKLDKEFIYGEYKKFKSDKKKNNREYGSFILSSMKYDFTNTNTGEIVWQGKSSCEIIDKTMKYNDCLITKKTEIGDSQFYDQTVYSKNSGKKMIARKDYLPVNRYGGYSGRKAAHFAVINYLKPSGKKESPATEIISIPTQIYTLEKTHPGSIDKYIQDNYKDAVVLLPKVPINQKIEHDGNEQFIVGSSEVTNAKQLKLPYDIEYAIAIALKRGVPRVTISEEQADEDDKLRDKRNRQIKKRNKVIDGINRFWKVYSDKLANQYQQFGEAGNNARNAAPEYDKLSIDDKIKAIRLALRATRAGSERADMQTNFPELKLPNGFGRMRGTLDPTKFTFVYESIAGLHRRKLDGKSLGHKR

SEQ ID NO: 4285 - protein, 1336 aa, unidentified
  REGION 1..1336: note = Description of Unknown: Cas Enzyme sequence
MKQSYSIGLDIGTGSVGWAVINEDFSLRRHKHQNMWGANLFNEAQKAELRRSFRSSRRRLARRKRRITLLQQIFNNEICNIDPNFYLRLTESMLYIDDKSSSLDLDANILFSDHTFTDKTYREKYPTIYHLRSELFHNPEKQDIRLIYLALHHIIKYRGNFLIEGGVDGVISSFDSQNLQKFMEFIGAGDKEAKQIKSILLNQSQTRSARKSNIIQLLQPSADNKSIISEAVGAAIGLKWNAEKLFDDKSLEIKGEFSDKNYEDQRDDIAAAIGDDRYELVETLESVYQWTIFSQFIRKDSCLSDIMVEKYDAYRQDLSDLKGLFRDFLSEKEYKSFFHGDASKFDLYNKHKIDTDDLYKSIKKHLGESAKDDARYQRFEKQAELGEFLSRQRIRDNGAIPHQIHQYELEKIIDNQAAHYPFLAQNRDKIISIFTFKLPYYIGPLKTGGDFAWSIKKKDGVIYPWNFNEIIDDEASAEKFIERMRNKCTYLPDKDVLPKNSLLYQEYECRNELKNVTVNGKRLSPDIQNRIIDELFTKEYSINYKKLAKYLYDNQIYDTGSLVISGTADDKSFMSSRKSYIDFTNKIGTEITPENKAAIEEIIKWITLFEDKKILAKKLQKYSDIFSKDQIDSILKLKYTGWGRLSSELLDGIAAHTRYGKMTVVEVMRQCSDNFMQIIQSDRYEFKKIIEDALLKDANPEITYDDIKNLAASPGIKRALWRSVRIIDEIVDTIGYSPKLISIEMARSEEDKVRTKKRYSQLEKMYKELYGREYNKSDIKPQLENYKDCLDKKKYYLYFLQNGKSAYSGKKLDIENGLKDCEIDHILPRSLTKDDSLDNTVLVLREENQLKLDDYPISPDVQKKMLPIWMSLKNAKFMSQLKFQRLTSQKQLSDDQIYGFINRQLVETRQITKHLARMLTEKYKDSSTEVFTIRAGMSSEYRRIHDLPKCREVNDLHHAKDAYLAATLAQYVKVRYPKLDKEFIYGEYKKFKSDKKKDNREYSSFILSSMKYDFTNTNTGEIVWQGKSSCEIIDKTMKYNDCLITKKTEIGDSQFYDQTVYGKNSGKKMIARKAHLPVNRYGGYSGKKAAYFAVINYLKPSGKKESPATEIISIPAQIYTLEKTHPGSIDRYIQDNYKDAVVLLSKVPINQKIEHDGNEQFIVGSSEVTNAKQLKLPYDIEYAIAIALKRGVPRVTISEEQADQDDKLRDKRNRQIEKRDKVIDGINRFWKVYSDKLANQYQQFKKAGDNARNAAPEYDKLSIDDKIRAIGMVLKATHAGSSRVNMSKEFPQLKLSSRFGRMDSETLDPAKLTFVYESITGLHRRKLDGKSLGHKR

SEQ ID NO: 4286 - protein, 1342 aa, unidentified
  REGION 1..1342: note = Description of Unknown: Cas Enzyme sequence
MKQSYSIGLDIGTGSVGWAVINEDFSLRRHKHQNMWGANLFNEAQKAELRRSFRSSRRRLARRKRRITLLQQIFNNEICNVDPNFYLRLTESMLYIDDKSSSLDLDANILFSDHTFTDKTYREKYPTIYHLRSELFHNPEKQDIRLIYLALHHIIKYRGNFLIEGGVDGVISSFDSQNLQKFMEFIGAGDKEAKQIKSIFLNQSQTRSARKSSIIQLLQPSTDSKNIISEAVGAAIGLKWNAEKLFDDKSLEIKGEFSDKNYEDQRDDIAAAIGDDRYELIETLESVYQWTIFSQFIRKDSCLSDIMVEKYDAYRQDLSDLKGLFRDFLSKKEYKSFFHGDASKFDLYNRHKIDADDLYKSIKKHLGESAKDDARYQRFEKRAELGEFLSRQRIRDNGAIPHQIHQYELEKIIDNQATHYPFLAQNRDKIISIFTFKLPYYIGPLKTGGDFAWSIKKKDGVIYPWNFNEIIDDEASAEEFIGRMRNKCTYLPDKDVLPKNSLLYQEYECRNELKNVTVNGKRLSPDIQNRIIDELFTKEYSVNYKKLAKYLYDNQIYDTSSLVITGTADDKSFMSSRKSYIDFTKKIGIEITPENKAAIEEVIKWITLFEDKKILSKKLQKYSDIFSKDQIDSILKLKYTGWGRLSGELLDGITAHTRYGKMTVIEVMRQCSDNFMQIIQSDRYEFKKIIEDALLKDATPEITYDDIKNLAASPGIKRALWRSVRIIDEIVDTIGYGPKLISIEMARGEEEKVRTKNRYSQLEKMYKELYGKEYNKSDIKPQLENYKDCLDKKKYYLYFLQNGKSAYSGKKLDIENGLKDCEIDHILPRSLTKDDSLDNTVLVLREENQLKLDDYPISPDVQKKMLPIWMSLKNAKFMSQLKFQRLTSQKQLSDDQIYGFINRQLVETRQITKHLARMLTEKYKDSSTEVFTIRAGMSSEYRRIHDLPKCREVNDLHHAKDAYLAATLAQYVKVRYPKLDKEFIYGEYKKFKSDKKKNREYGSFILSSMKYDFTNTNTGEIVWQGKSSCEIIDKTMKYNDCLITKKTETGDSQFYKQTIYSKKSTDPKPTIPIKANLPTNRYGGYSGVQAAYFAVINYLKQSNKKESPATEIISIPAQIYTLEKTHPESIDKYIRDNYKDAVVLLPKIPINQKIEYDGNEQFIVGSSEVTNAKQLKLPYDIEYAIAIALKRGIPRVTISEEQADEDDKLRDKRNRQIEKRTKVIDGINRFWKVYSDKLANQYQQFRKAGDNARNAAPEYDKLSIDDKIEVIKLVLVATSAGSGRVDMKGSEKNPKFPELGLPNSFGRMSGKAIDPLNVTFVYESITGLHCRKLNGKSLGHKR

SEQ ID NO: 4287 - protein, 1280 aa, unidentified
  REGION 1..1280: note = Description of Unknown: Cas Enzyme sequence
  MOD_RES 1274..1278: note = Any amino acid
MGKSHIIGVGLDLGGTYTGTFITSHPSDEAEHRDHSSAFTVVNSEKLSFSSKSRTAVRHRVRSYKGFDLRRRLLLLVAEYQLLQKKQTLAPEERENLRIALSGYLKRRGYARTEAETDTSVLESLDPSVFSSAPSFTNFFNDLEPLNIQWEAIANSPETARALNKELSGQKEADFKKYIKTSFPEYSAKEILANYVEGRRAILDASKYIANLQSLGHKHRSKYLSYILQDMKRDSRITRLSEAFGSTDNLWRIIGNISNLQERAVRWYFNDAKFEQGQEQLDASKLRNVLIRALKYLRSNDKEWSASQKQIIQSLESSDNELDVLAGLDPDRTIPPYEDQNNRRPPEDQTLYLNPKALSSEYGDKWKSWANKFAAAYPLLTEDLSEILENTDRKSRIKIRSDVLPDSDYRLSYILQRALDRSIALDECSIRRTAEDFENGVVIKNEKLEEVLSGHQLEEFLEFANRYYQETAKAKNGLWFPENALLERADLHPPMKNKILHVIVGQALGISPTKGTEFIDKIWNSKVKGRSTVRSICYAIENERKTYGPYFSEDYKFVKTALKEDKTEKELSKKFAAVIKVLKMVHEVVPFIGKELQLSDEAQSKFDNPYSLAQLYNLIETERNGFSKVSLAAHLENAWRMTMTDGSAQCCRLPADCVRPFDGFIRKAIDRNSWEVAKRIAEEVKKSVDFTNGTVKIPVAVEANSFNFTASLTDLKYIQLKEQKLKKKLEDIQRNEENQEKRWLSKEERIRSDSHGICAYTGHPLDDVGEIDHIIPRSLTLKKSESIYNSEVNLIFVSAQGNQEKKNNIYLLSNLAKNYLTAVFGTSDLSQITNEIESTVLQLKAAGRLGYFDLLSEKERACARHALFLNSDSEARRAVVDVLGSRRKASVNGTQAWFVRSIFSKVRQALAAWTQETGNELIFDAISVPAVDSSDMRKRFAEYRPEFRKPKVQPVASHSIDAMCIYLAACSDPFKTKRMGSQLASYEPINFDNLFTGSCQVVQNTPRSFSDKTNIANSPIFKETIYAERFLDIIVSRGEIFLGYPANSPFERTPNRISIGGKEPFSILRVLEPYLNNAPSDEKEKQTIYKVNKNKAFKLLSKVAGSKFTAEEDKAAKILEALHFVTVKQDVAATVSDLVKSKIELSKDSIENLAKQKGCLKKVEYSSKEFKFKGSLIIPAAVEWGKVLWNVFKENTAEELKDENVLRKALEAAWPSSFGTRNLHSKAKRVFSLPVVATQSGAVRIRRKTAFGDFVYQSQDTNNLYSSFPVKNGXXXXXEN

SEQ ID NO: 4288 - protein, 1043 aa, unidentified
  REGION 1..1043: note = Description of Unknown: Cas Enzyme sequence
MGLILGLDLGVSSVGFGIIQEDSYEIIDYGVRLFEEGTAEKNLKRRTMRGARRLKARKRNRINALKYFLIELGIIESKDFQVLNHVYELRVKGLTSKLSSLELANVLVNLAKHRGVSFDIICDDQDKDAQTSYQALTDNTKLLRNKNKYICELQLEKLERGEKLRSIDNLYHTKDYENEIRKILSNQDLREDAKEKIINIILRKRDFSEGPGSEKFPTPYGSYRIIENEVKKVNLIDEMRGKCSIFPDEPRIAKNTYKACLFNFLNDLNNLTIIRNGEKIKLKEEEKLEIIKIVDEKGHITPNQLIKFLEIDMDSISGFRIDKKSKPLLTTFDIYEKIIKLKLDYNLIEHKNEVNSIIEVLTKTVVKEKRVEEIKNLKLNLTDNDIDKLASLSKVNGYHSLSEKAMDILIPELLSTSTNQMEIIYKNNLIQNKLNFKGTTIPFDDTAILSPVALRVHRQALEVVNELRKKYGEFSAIVIETTRAKNSAEEKKEEKEKQKRFEDNNKKVDDFIRDLGRDPEKINVTGRLKLMLYKEQEGKTIYSWEPIDLDRLFNDPIAYQIEHIIPYSISFDNSLNNKALASYKENQDKGNCTPWAYFSSGKVKGPNQTWEDYEAFINSLPNLNMNKRKNLLNQEDITKYETRKEFINRNLNDTSYGIRTVMNTLKAYFKQNSISTNVFTIKGKVTSAFRNKVRLKKDRDNYIHHAIDALIIAGFKNQNTFYHAFNLDTDDNLVFDSRTGEMLDLSDPLEDRKLLSFIENLRKITGKPQDFSYKVDTKTNRQFSDETIYSTRIYDDGEYVIMKYKDIYGKEGEALKKKFIEGKADVLLAFRNDRPTYDLLNKIVESYPYEKNPFAKYKEEHGYIRKYSKNGNGPMIKQLKYRDCKLGNHCDITHKYISTKNKKVILLQNTPYRTDFYIDKEGKYKFLTIRRYHVKQKNGYNIIDSTEYKKLMDYKNISVEDKFLFSMNRNNIIRVISENDEYYRFIATNNDKTSTIEVKRIECLTEKQMMISISKKIKKLEKYNVSPTGKYAKVEKETLKLKW

SEQ ID NO: 4289 - protein, 1413 aa, unidentified
  REGION 1..1413: note = Description of Unknown: Cas Enzyme sequence
MGQVISPISLDLGGKYTGVYMPHYYTGVLPEKDDAVMATLVMPEDGDKITWSQTNRTATRHRIRSNKRRKLAKRLTKVVIETLVDRPLLPQEINALSGLLNRRGYNRLEIELDLSCLEQTPSIYFAQLLPDYFTEAATLLEQWDSLLENTEYLRELQQLEVFKYSKRDAKKVLFTKLEKSEQEECLIAYHTLQEAVSQTLDSLDYGHQHRREYLHKIKVEIGKDARLRNILKTTSVDELFCLLGNIGNFQLRNLRWYFNDVQMRSADRFDDKRLRDTTIRWLQGWHPQTDEEKQNRRLALAHMQSSISGLDALRNLSPLMTIPPYEDQNNRRPPKDQTLWLNPVTLTARYGEKWLVWAQNAQRKNPSWGEGIQENLANFERKSRLKRHDLPAPDKEYAAAIFLQRLLDRSRQHDCYGLRLISRGHNQSQEAQQYLENLTRDLGSQHIEGFLQLARDYYAEVASAKQGIWFQSKSGLLERADINPPSKAKIKHRLVSNIICTELSPSELDFFLREVWESKVQGNSTVRSICKSIEDIRKHYGNSFNHEIQKISYRISKDPALEKKLKGEEKSIWNANQRALLAARKIAQQLEHTDEQLKRYNNSFSMAQLYSILETDRHGFSKISIAAHNETAWRMRMVETSDGISARCSRLPADSVRPFDGILRRLLERQAYEIAQLKIRQLKDLNTSTGKILIPIIAEENKFEFSIGLAGIKKNRVKAQQLEKQLQNQQVRWQDKTTRIKEAAGGVCPYTGELIRQRGEIDHIVPRSLSLERSSTIYNSEANLIWTSRRGNQDKLDMRKGMTDLHPGYLQKIFGKPDLASIEQHIEAVVAQLKERFIFTELTKEQQDAVRHALFLSPYSNGYKKVYASLATQQVTRVNGTQAWLIKRVIELLEKEFSGTELELVFLTARVNAQQTSELRTQLGQFDERYAKQDIQSVASHSLDALCAFAVAAGNELHEQLGLGKSLLVTEQQSAELLVSLIAQQVVVLQVERKPRFAKDSIVSQAVFKEGIYAENLLPLWVYGNEIYVGFDGYNKEQCVAFNTNNPEKILELLQPVLTCKITEPMQLLNSPKPQKLELQKNAAFMHLDKVAKQSCCDQDLLLADLIDLLRYTTINKECRNTIYDSQKKTYKSQQELLDSKFFTINLSFKDKNLGKIDGKLILPAREDWKNLLKIPEISTRLGTKGDDLNWQCIFKSNFKYGSQRAHNKTRRVFSLPRIDAPSGGFRVRRITPDQQSVWQLMSIEGLSSCGFQVSKGKIHWDQTMPIRQLVTENLTEVKARFFAGTGEYISFDHWLQIKQDYSEIISLEMAPGTKDRRYLRITQPYSVFHKWILEAGVSNLDSYWELRSEVKIDAKNFASAHAIPLLGVPRSNLFIQSLGEQVTYWYIVSSSTSIMKEAYQAAYLESIKKGSQ

SEQ ID NO: 4290 - protein, 1610 aa, unidentified
  REGION 1..1610: note = Description of Unknown: Cas Enzyme sequence
MKNIVLSLDLGAVNTGYYLCSYDNNADFIDTLLTDAGTVVVNPDKIKFSQEERRIVRHRIRGFKRFKFARALLDQIVTKLLSNSAESLDSKELMDLKICLSGLLKRRGYTRFEQDIDETDISNFFIEDYYKLIIEPLLNCNEGLCIPNDLAWASDATIIDLIQSLLEVSNDNYSFINSQLERLINVLDSLNKPQDILDEFGDSVDSSIIGIIQSFDGTERKSLKRSMQEILKFVENWNNENQLGNKHRKKYFEDINLEIERDSRLSRFLKITGLNGRQLANLIGNISNLQLRGLRRYFSSENKQPVTVFDPEKLKNAFIYNLNYNHKDNNNRDHWNEIQKAKQLFKTNSVIEVLKELDPCATIPCYEDMNNRNPPKDQTLLLNPDVLNKEYLNWKVWVDRIVDDYKCNEQFQIDYHIEHIYKRIDRKSRIPVQVGGVYVKKDDENYKYSYLLQRIMDRTISADPYRIKSLCKNSRSQIAIQNAESKERCDNGRLRRLLGENEFAQFMIFADKYYKEVDSARAGCWLLTDSSLFELSNINPPKKNSIKHILIENIFGQNVSDGEFKFFENFKELWTEKDGRSSLRSLCSKIEEIRKKYGNYYNVVYQEVSKKRLVANSKFKDEFADVNKSIEYTEQAVKILEKNINRLHIDNESVMLVNNPYSLSQIFNLMEKDLAGFSSNVLAVHLENACRMKKCGDKSLCTRLPADSIRPIDGIVARITDREAFELSEIIVAYIKKLDQNINLKNEHLSLIVALEKNEFSYEVELNKDIKKNKNKKEKYEKLAKKQTVFFDNKENRIKKSSHDICPYTGYALTNDGEIDHIIPRAETRSRYYAVFNSEANLIYCSQKGNQDKTNKTKLLRDLNPDYLFKVFGTRDVNEIREKIGKEVNRIKNEYGSNIVFHALSENEQNCLRHALFLEHDSEIFKMVLALLNTRSSNIVNGTQGYFAKCLSSKILQNLSFNNWLNDKGIKLDISFVKTPLDDNRIVRDKVLGITKLDKQPVFSHSVDAFCSFLSAVKNCSHLVDFNMSENLDNILANPELSENRDFIKSLLPESLKVKAIESKNCLTKDDSSFKLTNDGIYAMKFINIIGCKGELFAGFDTNESNSVCLDKRKLKKINLLSDYYVNNDGIKGLNLDFNGVWKIDKTRVLTDYFDGKLSDEQCKVLQEIEYSTQKRDLTDILFPKDNPILLKEINFTESLKNKNNSSINQDTIDLSEFVAHIDTLKIKLIGQVNANSIDFSKYTCELSFFTDCSNGEKIYLGTSASNIEALTSKTENLSKIIPIVENIIETKLEFEKGSIKEYRIPNNNYKKYFVFSFLNADISEIPRSKLFCFKIFNNKKLMLPSGFDLINKFLKNQAFIGNLYLEKSNNFSDSEIIQNAIKKIFKPNGDKETSHRASRRVYSLPCIANPSGGLIIRRMNYDRSYLYQQVSKGTVLYKAFSKVNEKKGRKAVLADFVANSSNIMLSEFENKGAEKLQFVDFSKVVELKINKYNFEYLGIEKILMSLATESRTKMTVTIDKEKFMRLLVLSDTESSVFSAYSIPHSLLIKSFNELLDDNSICKEELLILGQPRDNKITLVAVSDDCVTFTYNNNKPDQKSYELFSDSIEE

SEQ ID NO: 4291 - protein, 1420 aa, unidentified
  REGION 1..1420: note = Description of Unknown: Cas Enzyme sequence
VSNIVISPLAIDLGGKFTGSFMAHYEPGEDPGHGTREARIICLPREGSDMVWSQRARTLRRHLVRNNKRRKLARRLLSLLIAHALNLQPTPEQWTRLNGYLKRRGYNRLQVELDPQPLDDCPPDWFAEKLPDVFDSVEPLSTRLDEILQDTETSQSLLDHEVFTPSGKREFKRKLPKDMDKWEKDRITDAWAVMRDALVAVRREREGNRHRREYLDNIAHDLDRDELLAPLFADTSFNAAQMANLIGHISNLQLRPLRWYFNDPSMAGGDRWDAPRLHRILRRWVQGLRPEDDEQRAARRRVLRALNESEDILGLLLTHDPRDTIPPYEDQNNRRPPKDRTLWLSSTAMDRLHPNWKLWTAALRRANCELEDGLNALTDMTDRRSRPPASERQGALFLQRLLDRSRALDPYLLRLQVSGSDSEIAQSARNRLSRDLGSQHLDAFLEFARSYFDEIRLARQGIWQPGDTRLLERADLNPPHKSRILHLLVGNLFGEASDRWSGDRLDCFRREAWNKPFKGRSSPRSVATKWVELQKNWGNLLADQLRRLVYRHDKLGQKPGEWKKEEKDLWKQRESAFLAIDHIAAWLGHDEQRKTYYANPWTLIQLYNLLEKDSHGFSRTTLAAHIENAWRMTKVRGEDGRESARCSRLSSDTVRPFDGVLRRLLERQASAIARAKLAQILKLTDTDRELLIPILVEENRFTFTLGIKELKKRRDDKLQKFLSERRAQQDQEWQDKMTRIRSASMGICPYTGETIGEHGEYDHIVPRSASRDRAGTVFNNEANLIWCSRKGNRQKGDKRYTLAQIAPAYLERQFGSADIDTVRAQLQRTINTLPDGFPFQELSKEQQRAVRHALFLDTSDPAWQKVARSLAEQQKARVNGTQAWLARRIITLMGRELEARGIAHRFLVQRVDGRQVHDVRRLLGEALPRFAKRDPQPVSSHAVDALCILAAAVTDETTAERLTLPTTLLEDPEWLATFLPDNIVLDPIQRRPAYRKDNISAQALFNEGIYAERFLPVWIHEGTLHFGFDLESNILSLAEKHAPYWLDRLWPMLRRADGQVPEGNPDTLLQSKQTLRFIIDRDAAFTHLHRVAKEPAEARDLELADLLDGLSYMVEKQDLHNAFGWDKRNKKGKCKKREEVFKEKDFTKKFNCAPCKGKRHGRVKGKLRLPVMDDWDRFLRHLDSQGHFQPGENLPDADTWQRICAGYFRDTGNRDPGRKHQGTRRQYSLPRIPSLPRKPFRVRRKTADGRTIWQLLVSKNPSCGFAIRDGKVCWTEPVLLPLLAQSPDLVMCGARHAPPAEAIAWLDEWRELPAPKPLVELAMSPGTERYAYLRLALPWETFRAWADPGVTDPFDLPATLKVNAGDFAKAHGITLLGKPKNGKIMLLELGPVIRLQYTVDNTSPEMRRAWEAAPPGTPKT

SEQ ID NO: 4292 - protein, 1408 aa, unidentified
  REGION 1..1408: note = Description of Unknown: Cas Enzyme sequence
MEKFVSPIAVDLGGKNTGLFLAHYAPGEVPENRIAATLVMPEESGKMTWSQSGRTATRHRIRSNKRRKLAKRLLRQVITAQAGRAPNNEEWQALSGLLNRRGYNRIEAELDMAPLSLVDSKWFEENFPAHFDDTFLPEQFDRICQDLDRLRRLQQDERFNLGRKEFGRQFLAGIDQQEKKALSDASSRMKEAAQDIISQLDFGHQHRRDYLRDVWDELNKESRLSDLRKEIKLETLYRLVGNISNFQLRTLRWYFNKPAMYAERRLDDQRLHSILKRWLTGWHPGPEEKENRKQALEVIDSTDSALAAMALIEPEWTIPPYEDQNNRRPPKDQTLWLSPASLNSHFPKWDIWANNLRRSNPGWDAEISQILELYDRKSRLGGNAASTKQLHCSYLLQRLLDRSIAHDPYALRLLCHNPKSHKAAAFRQRLESHLGEQHTPEFLKLCGQYYSETNLARQGLWNPNDSTNLLERADINPPHKKRILNLLVGNVLGIKLNEDDYHAFLTKAWRKRVVGNSKLKGLAEATEKCRKEYGNLFNERLRRLRYRIEHLEEKSNKLKDDDKKIWSAFTKSQQAAKAIADYFDHTAQQQSHYANPYSIAQLYTLIESDPKGFSRTTLAAHIENAWRMSMKNHSDGKQAARCSRLTADSIRPFDGVLRRTLERQANEIATLKARQIMVSGCREAELLIPILAEENRFAFSAGLADLKKNGKKRKDALAALKKQGTPWVDKDNRIRDAGKGYCPYTGEQLGTVGEIDHILPRSGSTSSAGTVYNSEANLIWCSRKGNQAKGSSIYTLADLAPRYLKKLYGTDDRSQITRTIGKSLNSIDDHKTWDLLNNEQQRDLRHALFLAPEDPLRNIAVQRLASQQKSRVNGSQAYLIKRIIEQLKVQLGDWSKNNHITVRFSAARIDAREASALRHRLGESRPELAKPEEQQSAASHAIDAICVLASAAAVPKLADDLALGEGLSEDMEWLADLLPQQIEVHWVEHQPLYRKDKLGSRALFKEGIYAEHFLALWLDSKGLRVGFEPSRNNLTVTGKNPLSLAHLLHDFFEQKIDLEQAANQDKPQKLTINKNHAFSFLKKVASQHHTDEEAKQAELLEALRYSTAKKNIRAALFDESKKQFATLNTVCKDKLFTINTKFFNDKQARFEGNLLLPAHVDWKRLCKHPSVTGKLGKKLDKGEIFDWHTLTESFFRPKGNGRPHGKTRREFSLPIIDNPSGGFRIKRKDASGMAIWQLHAIDDTPSRGFAVKAGKIDWTEGVAIDGLSSSDNLTPLNVRYQSPPEKVVAFDHWLPIQIEEGGITLLEMAPGTKDRRYIRVTQPFDIFTQWLQSSGYEIPNHPFGLFSEIRLKDKSKFQKAHEISLLGKPRSNLFITRMGEQVTYWYRVESSNSAMKAAYQKSWSQSES

SEQ ID NO: 4293 - protein, 1433 aa, unidentified
  REGION 1..1433: note = Description of Unknown: Cas Enzyme sequence
MTQSERRFSCSIGIDMGAKYTGVFYALFDREELPTNLNSKAMTLVMPETGPRYVQAQRTAVRHRLRGQKRYTLARKLAFLVIDDMMKKQEKRLTDEEWKRGREALSGLLKRRGYSRPNADGEDLTPLENVRADVFAAHPAFSTYFSEVRSLAEQWEEFTANISNVEKFLGDSNIPADKEFVDFAVAEGLIDKTEKKAYLSALSTMRANANVLTGLRQMGHKPRREYFQAIEADLKKDSRLAKICEAFGGADRLARLLGNLSNLQLRAERWYFNAPDIMKDRGWEPERFKKTLVRAFKFFHPAKDQNKQHLELIKQIENSEDIIETLCTLDPNHTIPPYEDQNNRRPPLDQTLLLSPEKLTRQYGEIWKTWSARLTSAEPALAPAAEILERSTDRKSRVAVNGHEPQPTLAYQLSYALQRAFDRSKALDPYALRALAAGSKSNKLTSARTALENCIGRQNVETFLDCARRYYREADDAKVGLWFDNADGLLERSDLHPPMKKKILPLLVANILQTDETTGQKFLDEIWRKQIKGRETVASRCARIETVRKSLGGGFNIAYNTAQYREVNKLPRNAQDKELLIIRDRVAETVDFIAANLGLSDEQKRKFANPFSLAQFYTLIETEVSGFSATTLAVHLENAWRMTIKDAVINGETVRAAQCSRLPAETARPFDGLVRRLVDRQAWEIAKRASTDIQSKVDFSNGIVDVSIFVEENKFEFSASVADLKNSQHAKDTKKNKRTKNKMLSEALKLETHWLNKNERIKAASQGICPYTGQRLAEGGEIDHILPRSLIKDARGIVFNSEPNLIYVSSRGNQLKKDQRYSLSNLNTDYLKKIFKTSNIAAITAEIEDVVTKLQQTHRLKFFDLLNEHEQDCVRHALFLDDGSEARNAVLELLATQRRTRVNGTQICMIKNLANKIRGELQDWCRTTNNRLHFQAAATDVSTAKNLRVKLAQNHPDFKKPNIQPIASHSIDALCSFAVGSAEAERNQNSFDYLDSKAVFALYPQSCEVIHLQAKPLEEKSHFDSVAIFKEGIYAEQFLPVFTLNGKIWIGYETLNAKGERCGAIEVSGKRPEELLTMLTPFFNKPVGDLSAHATYRIQKKPAYEFLAKAALQPLSAEEERLAALLDALRYFTSRKSLKSLFMAANGKSLKKQEDVRKLKQKLFKLNVELKGEKSFKLNGSLKLPVEQDWLRICNSPELIDSFGKACTEAELISKIARIWKRSATRDIAHAPVRREFSLPVIDNNFGGFRIRRTNLFGNELYQVHAINAKKYRGFASAGSNVDWSKGILFNELQHENLTECGGRFITSADVTPMSEWRKVLTEDNLSIWIAPGTEGRRYVRIETTFIQASHWFEQSVENWAITSPLSLPGSFKVDKPAEFQKAVGTELSELLGQPRDKIFIESIVNAKRIRFWYTVKNSNKKMKESYNTAYKS

SEQ ID NO: 4294 - protein, 1435 aa, unidentified
  REGION 1..1435: note = Description of Unknown: Cas Enzyme sequence
MTQSERRFSCSIGIDMGAKYTGVFYALFDREELPTNLNSKAMTLVMPETGPRYVQAQRTAVRHRLRGQKRYTLARKLAFLVVDHMIKKQEKRLTDEEWKRGREALSGLLKRRGYSRPNADGEDLTPLENVRADVFAAHPAFSTYFSEVRSLAEQWEEFTANIGNVEKFLGDPNIPADKEFIEFAVAEGLIDKTEKKAYQSALSTMRANANVLTGLRQMGHKPRSEYFKAIEADLKKDSRLAKISEAFGGAKRLARLLGNLSNLQLRAERWYFNAPDIMKDRGWEPDRFKKTLVRAFKFFHPAKDQNKQHLELIKQIENSEDIIETLCTLDPNRTIPPYEDQNNRRPPLDQTLLLSPEKLTRQYGEIWKTWSARLTSAEPTLAPAAEILERSTDRKSRVAVNGHEPQPTLAYQLSYALQRAFDRSKALDPYALRALAAGSKSNKLTSARTALENCIGGQNVEKFLDCARRYYREADDAKVGLWFDNADGLLERSDLHPPMKKKILPLLVANILQTDETTGQKFLDEIWRKQIKGRETVASRCARIETVRKSFGGYFNTAYNTAQYREVNKLPRNAQDKELLTIRDRVAETADFIAANMGLSDEQKRKFANPFSLAQFYTLIETEVSGFSATTLAVHLENAWRMTIKDAVINGETVRAAQCSRLPAETARPFDGLVRRLVDRQAWEIAKRASTDIQSKVDFSNGIVDVSIFVEENKFEFSASVADLKNSQHAKDTKKNKRTKNKMLSEAEKLETRWLNKNERIKKASRETCPYTGQRLAEGGEIDHILPRSLIKDARGIVFNSEPNLIYVSSRGNQLKKDQRYSLSNLHTDYLKKIFKTSNIAAITAEIEDVVTKLQQTHRLKFFDLLNEHEQDCVRHALFLDDGSEARNAVLELLATQRRTRVNGTQIWMIKNLANKIREELQDWCRTTNNRLHFQAAATDVSTAKNLRLKLAQNQPDFEKPDIQPIASHSIDALCSFAVGSADAERDQDGFDYLDGKAVLGLYPQSCEVIHLQAKPQEEKSHFDSVAIFKEGIYAEQFLPIFTLNGKIWIGYETLDAKGERCGAIEVSGKQPEELLTMLTPFFNKPVGDLSAHATYRIQKKPAYEFLAKAALQPLSAEEKRLAALLDALRYCTSRKSLKSLFMAANGKSLKKQEDVLNPELFQLLFQLRVELKGEKAFKLNGSLKLPVEQDWIRICNSPELIDAFGKACTDAELTSKIARIWKRSATRDLAHAPVRREFSLPVIDKPSGGFRIRRTNLFGDELYQVHAINAKKYRGFASADCNVDWSKGILFNELQHENLTECGGRFIISADETSMSDWRKVLSEDNLGIWIAPGTERRRYVRVETTFIQANHWFKQSVENWAITSPLSLPASFKIDKPAEFKKAVGTELSELLGQPRDKIFIENIVNAKRIRFWYTVRNSNKKMNESYNNASKS

SEQ ID NO: 4295 - protein, 1441 aa, unidentified
  REGION 1..1441: note = Description of Unknown: Cas Enzyme sequence
MSHSTITTPQPLLSSCLAIDLGAKFTGSFLVVRDAFQPASSADCHAMTLVLPDDGDKMTYSSQARRAVRHRLRNKKRYNLARRLALILILQKIKDAGITLGNEEEKKLIEAICSLLKRRGYSRLESDSATDLTSLENLDPGVFANHPELGQFFCELSDIPSQWENLTQDLQQISAFIEKKPADKAFQAYFSKNFADLKSQKKAYSNALKVLSDDANLLLQQVRFGHRHRKQYLDEIHQDMRNDSRLAKAVEAFGDLDRLWRLIGNLSNLQLRAMRWYFNAPELFEDRFWIPERLQKTLVRAFKYFHCSPGKESQNQQALIKTLESTEDILEVLCSIDPERTIPAYEDQNNRRPPVDATLLLSPHKLTEKFGPIWKSWADSLSKEDPALDENLDLILTHTDRRSRIAISTNTQKYSVLDYRFSYILQRALDRNKKLDQYALRLLAHNSQSQLANKARAELSRVIGSQHVEGFIALAKLYYAEVADARVGLWIESQANLLEKSNIHPPMKKKILDQLVGDVFGLDADFGRTFIENYWNCKLGEKSRSSMRSTCQFIETIRKQYGGEFKLLFNDKNSTSKDFTSIKDRIEDVKSFLADQLHLSEKTIKRVANPFSLAQLYTLIELDRSGFASNTVAVQLENSWRMSSPDGINAQCSRLAADCVRPFDGVLRKLLDRQAYELAKHTFDTWKKNALVDGTTIHHATVVEENKFAFTASLATLKKNTTAKKKATDALQRQEARWLSKDERIKEASKNICAYTGVALDTCTCEYDHIIPRTLTKSILSTAFNSEANLICVSQAGNQQKKDARYRLTNLHSRYLSAVFGTTDCKAIADKIETRIDELKHKRRLSHFELLNSEDQAYVRHALFLDDDSEARKSVLSELAASNRSKVNGTQAWFIRRYLEKLTQMSGAWLTKHHHTLICQATRTSAQAGHDLRQALTKQSSTKSNKESKDSSENSIFYKPEVQPVASHSIDAMCAYAAACVSDQFCEFTHSDPELSNQENTATLAALHPLNCYVNWITAQAQEEKTDHDSRAIFKEGILSENFLHVLTCKQNVFVGFTLGKKDVDTTSQINAITVTGKSPTRLLTILSNYFDKPVDPNQDRLTCYQIHKKKAFELFTKAILQPEELTAEEKEAVVILDKLRYITERVPVRSALVDKANKALVKDALNLDKKAFTINCDISSKAFKVKGALTLPAYAEWLKVWKSPEIQNRLGKDLKDLGAFDLDAWLQSMHRMNSSKCAHTAVKRVASLPIVSKASGGFRIRRKTLDNNDVYQLHNIANAKYSSFACDEKGIVDWKKPVLFKHLATRSVTSLEINDSAKASTSVKMREFRRVSTENDMVIEMAPGTLGRRYIRIEMNFDTFASWLKNAEAEYELTHQLSPRADIKLNKPKAFIPIELSTATLLGTPRSHLFIEHVGKRVKLWYIVESSNANMLKAYNDAAK

SEQ ID NO: 4296 - protein, 1646 aa, unidentified
  REGION 1..1646: note = Description of Unknown: Cas Enzyme sequence
MNNNILSLSIDLGAKNTGVFSAYYKENSLLKDIKKKGFVYNLDKDKYTLLLNNRTASRHQRRILDRKQMVKRLFKLIWKNELKIDWNLDIEKSASFLLNRRGFSFLTEEYNVKELKKFPKRCLEYLKLNDLGIDVSKYHNPKYGKDNYNLYDLLIDLQKESKITNLFDHLSRNYKNSLEKKEYKKTLENISKYKKSSDKKLNVKKSVIEQIINSGYNIFKDSFSEKYMDKKKNGELNPYKILLHKFLYDNEGNLGDIKSEINNYNLNKSEEIWSNIKIDSFSLEKINFGKDDVDVVKHFFYALSQINSEIINGSRHRSKYFKEIKEILKNKNHTHNYLKNFVEIASHNNLINNNKLFNLIGNISNLELKPLRKYFNDKQHQESDYWDITRFKKFYLNWILQEWRVGEEDKDKNNDNSKYSYKELCDEIKSLKDDGDFNIISYLQFKDPNWTIPPYQDNNNRKPPKCQSLLLNTNYLDKKYPDWQIFLEKISQIEEVSRYLGNYIEDLKNAKSGKGKSYFSKQKSENFKISSGQRSLKEVKTRQLQFIFDRSKSSDELKLNHIYSLAKKIRQNINNNNEEIKKYRSDLELVIRESKLTEDLKERPNYSTNDIFSEGSFLHLICKYYKLRQRARDGRLFIMPEFRYDSKKESYINTGRFDDKDHLLSYCNHKPRQKRYQLISDLAAILQVAPDILKEKLGDTEDKVMKSLMAISGLKSNSEKAVKEQKEYKNNLNDEISKAKSEIKKNKEENKIKYKHPLCKLIEEIEKLSKELSEKIGNKELYQKFNSIYSFAQINQVAFTDRAGNSKICAICSIDNANRMNIENNYSKAQRLPAISTRVIDGAVKKMANIIANQIVRDNWDEVKSSLENNYKITIPIIIESNNFEFEPSLRKLKGKSEPEDVKDLRENNYNDKSKRIVDLSSNICAYSGENMSNNNIEYDHIIPRSSKKYGTLNDEANLIAVTRSSNQERGNKRYYLKDLNQSYKNKIFENKNDQEIKKFIYDEIWDEENKSFKFGRYKNFVNLTKEERIAFKHSLFLEDNDILRNEVVKAINNINRALVNGTQRYVAEVIANKFYLAAKKENLDVKKLSFDFFNIESSPNRRGDSIYDLRKSYENLYPDIEKYTKGGKSQENYSHLIDAMIAFTVAANNHKKEGSMKLNIDDNCALFPYDPNTGEVSDNNIFNEVKINNNDFEIVSLEKRSRLEYETHIREKLMQEYINSKENGIEIDLKEYYQNQENSHFHKIPYKIHNDSIKRERFVPLLKIKDCKKESDKWKIGFSIDNCDNLKIDPKIEEKLLQFFIHNKETKNYDLFIVNKTKTQDFLINLYNSDQLDKESKKISEILEKFSYFTIRKPIKSLKDAKNLKDLSDCIKYLEDNISKLSEKKIDNSSKNKIKLPIYNEWQKLLQEMKDYHDPNENIDNFLKESKYFNHQNDKKEKLDHQKTSKSYVIPSLFESSSSIRIKRKSWNGENIYQITSEEKMPNYGDSRPLTISSKNQSPNKTRNPHNWKDLELIKLKWVEIALSKEDNITEDLDEYDIKKLYIKYQSNKHSKIKIIFKKLGNLPFTDDNYNLEIKAIFKKNGNNEIKDNKIEINQDKWFKNDNLKLASEEKELILNKKDNLYEMEYFVNFKDTKRSNHRKWLYNQ

SEQ ID NO: 4297 - protein, 949 aa, unidentified
  REGION 1..949: note = Description of Unknown: Cas Enzyme sequence
  MOD_RES 760..763: note = Any amino acid
MSTISPLVIDLGANNTGVLLGHLSTDTGLDSILKEGMVLHIPDDKVTFAQESRRAKRHQKRGSIRRKMAKRLFRLILTNVFQFDLNAQPRSIREALHHAFNNRGFSFTDEGLDGEAIDHPAAAAFIRSHFPSLATVDTAISEHLALLSSDLNAIQAILASEPFHWNKEEEKRYIADAAEDSSSKKIILKGFRALKEFADSVINSEINGHKPRAQYLANIAKDLSCSSDLKEVWATTGLPAEDAARLIGNISNLQLRVLRKYFNDEAMSDQGDGLWNAPRMARFFKLYVESWHAKKEVNERRKSILSFCAQHGDDVVGLWRKLDPVLSIPPMEDMNNRHPTKCASLLIDETVLATRLPHWSKIAELLMVADFEKIFTSQVPPLRRFQALLDRSKEHEPWHLRGLAYRNPAKPINPRDAESLDRLQQALGKTDTEKLLAFARDYYVEREASDHGDWSEAWPNRILRLCGLNCPRKSKVMHLQMGILLRRSFVEQDVETMRGVFSERAFGHSTVRGIAEKAAEAQKSNGAAFKELLISGRDKDLRKLLDDSEAAYAKIATHFSVDPAATDRFGKPFVLAQLYNLLETDSHGSSSTCQSCSADNARRSLPLGQDTAHARRLPADAGRPFDGLLARILERQAYEVAKAKIAQLATAPLSGDVFLPIILEQNNFEFALGLLSIRKKQIESARLKAKDRQAGIEEGEERTVGLWSEKAKRIRQDSKGLCPYTGMALAEQGQVDHIIPRSLSRDWGGVVYNTEANLIXXXXHQGQHRQERRPLRPLPTPPRLSARPVWHRRLRRHRHRNPRGTPALAGRSPSHHRLPRLVRPRPPAHPARPLRGRPARRRPQRPATAEKGPRQRHPKMVRQATRPKHPATRLHPAPRRSHRNPHLLGPGRRRPRPARHPRRFRAVLRQNPATIRLQPCRRCRYGVGRLAQNGPAIPRTYPHSRKQPR

SEQ ID NO: 4298 - protein, 1403 aa, unidentified
  REGION 1..1403: note = Description of Unknown: Cas Enzyme sequence
MAEVFFSVVAIDMGGKHTGSISFTAKGIPSSEEINASIIEMTENGKGINYTVKDRTSVRHHKRAVDRFKKARKLIYSLLECATKRTLQLDEKNAISSLMKRRGYTRLESELDLSPLDEVSPDFFASAYPNLFTDSESLITQFKKNCCDLNSATKYFNALKDNLLDAYLENAGKNEKKRYENALKTMKEAANLIIQQEKFGHKHRKIYLKNIRSDIEKDSRLKDLRTLFNGGENLFRCIGNISNLQLRALRWYFNDISMKNTVKPFDENRFKDIWIRAYQFFHYPSREEGLNISTLIKKIRESKNIIETLCSVDPVLTIPPYEDQNNRHPPIDQTLLLSPKLLDESFSNKWLRWAHAFADDYPLLTDALDNIISTTDRKSRFDKSQSNHYSFEKVKYAYVLQRLLDLTKATRVISNIRGWSKDPDSSRWANVDELIRNKVGEQDRDLFLKFTQSYYKECELSKKGLWSIVNKPLLEMSGIHPKMKSAILDLLVASVLGINSDFNFEKFKKIWVTPFKGKSSVRSLCRSIEEKRKSYGNAFNHKYKAALYLLKKNGEKSLNKEQKELVNIASVTKEVSDYLGKELLLNKLSLDSMKFENPYSLSQLYNIMETDIHGFSSNCISVIKENDWRMQFSEDGSAICCRLPTESVRPFDGSLGKILERQAYEIAKRKAIELKSIPDIKNSIINLGILVESNEFEFSASIAQIKKTAASRKIKKRTDEFLKEQLKNWQNKDARIKGASRNICPYTGVHLENNICEIDHIIPRSLTKAQMGAIFNSEANLIYVSQDGNQIKKEREYTINNLHPAYLQQVFGTSNHDDIRNEIIQVVSELENSNPRLIFDLMTQHEQDCCRHALFLPGTSAYFTVISAMAKQYSTRVNGTQSWFIRSIISKLKNELSQWQIETNNVLNFDAWKIDSGKDVHVVRNNLGDKYSLFKKKEQQSITSHAIDALCVYAAACDNKSISNFILPKNIDITISEPEFLEKIVPTQYDIIQINRKSFSQKTAPESRQLYKDTIYGEAFVPIMKMGDEVRIGFDWGKNCIKVIKDAEKFLCLLSPFFKTKETSGTKLQTYHIDNQKAFDLFFYASSSKDISNLVKDQLECLKSLYYTTSHLDKTSIFDVNKKTFLTREKILDKKRFDIKISKPSVKGIQFDLTNQIFLPAKNEWSNLAEKFSDVLGSNNEDGLEILNGRMNLSQKEASSLQHKKAKRVSSLPIIDAPSGGVRIRRRNLDKTPIYQTVAANTPSTVLSKGFLLERKNGIAKVDWKKPITMDSYIGKNLTFSDGTPISSNDFVTMDEKRIIYRDHETIIMMSPGTEGRRNIFVEQNFEKFNECVSNIYGSYLDIDSEITLDDPKVFSTKLGIDIAGIPRGTIKISSIGKTIKYYYTVVSSNTAMNKAYDEGLSY

SEQ ID NO: 4299 - protein, 1763 aa, unidentified
  REGION 1..1763: note = Description of Unknown: Cas Enzyme sequence
MSKRFISPIAIDLGAKNTGVYFAHYPAGSTLGVFEEPGTKTGKVYQLDSNNYTYLMANRTAKRHQRRGFDRRQMAKRLFKLIWCKHFKLPWDKDVQQTISFLLNRRGFSFLTEEYDAEILSQFPQEAFFELPIESDELQNDNGDYDFDSALTEWTNEGIGKVKQKYDAIKTKIYIEKLRGACLQFQKSKKYVERIRDNNKLSKLDQDVFNKLKDQGVEGISLAKTGSYSYTTRDGEQKTLPYRYGEKVNLAEYVNHSGNTKEILASLPEETNRDYWNFNAAKFDIEKINESEKEEERFFNSESKPNIKTHLHHLTFALGKILNELESGGRHRSKYFEEVKAVLENENHRHGYLKRFCKQLQSGKYQELNVDRLTNLIGHISNLELKPLRKYFNDEKHKISKTNKEGDQWDEQRITRFFERWILREWRVSEKDKDKADNKKASYSKLKRLWNEHDKVVNFWLHTCPVYTIPPYQDNNNRRPPKCQSLILNVVFLNKKYPNWQQWLDELKKLKPVKDYLDNYEEELKGLKSSKEKEYFSDDHKGNLLTDSGRRSMAELNTRILQFIFDRVKDEDPLNLNEIYSHAKKYRQPQSTDEEKKDAREKLEQAIKDSCLTDKLKTARDYSNEALFAEDTFLHLICKYYKQRQRARDGRIYIHPEYRSVKGRGYENTGRFDDKDHLLTYCNHKPRQKRYQILGDLAGILLTTEEILKSKIGITNEIKKSNDATKFFETVEKFFNEVKDDTSSLRYFMKDCADAQKDYGNSLKDVIDYNYQKYTRLQKDKEKLIDANIQNIHGKNKISDQKKESIRKSTKRLIKLKEKSHDFAELLSNKIHRQLTDDKKKVITDKFNNPFSLAQIYNIVYKERNGNSKTCAVCSADNSFRMKTDFHKKKNNFVAKAQRLPAIPTRIIDGAVMRMARIVGGAIADDKWKKIKNELKQGNEVYVPIITESNRFEFEPSREELVKDQRSNSKPRKGKALERGVECKIFASKEERIKSAGKGICPYTGVDLGNVGEIDHIIPRASEWGTLNDETNLIWASKSGNQHKTNRELSLVDLDSEYKERLFTGKSDSDIKKWIIDKIGDGSGENFTFGKYKNFRNLTEDQQKAFRHALFLVREPLQKKVINAINNKNRSLVNGTQRYFAEVVANQIYKKTKKEKIDTKNIRFDYFGVASDGSVNSVPRIRKKLENKKDNDGNLIYPELQRHKKEEKEEGEKQTIYSHLLDAKFAFMIALSNHYCSPQTPTRLDHPGRNGGSLGIFAKQIDLYCDEYFDSNGELHNFYDAIKISVVDESKIARELSRTRPRPDNEKVSHRPLFSENSVAMHFLKLIQIDLDGQEEPVYLNGFLALGELKKCLETEDCDYANEYCKQNYAEILKDKEELEEIKKLYLDKFKIKKGTNAGSIIIKEFGKRKSCVKIYSLDKKEVYKFLVKNCNSASPLKEKDLSIIKALQKLWYFTKKENVIKKEKGKKDKFNKQKEVKFKCAGFVNPQIKNAWGKLENTLDENEDIYNQVKNYFLKEKDKKPEEKIGHQKSRKVFSLPMSTQKGFLIRKKSWMGKDVFYCRPASNDFSKTVLHKDNDGGLPDKGRDERLSMSYRKKNIFYIADNPTKMGKELKPISNDLAIDPNEYYEAKIPEKFRPCIIRIENKRTDAKRPHFKFFLNPNEKMDFACFIEFILHFPFRKLQDLNAKIKIEYFMSDEKFKNENQLKRCINEIEGMKKKPEKLLPVLKEFQKLWVSSRENNVLKYQAERKFTICPQINEASSRS

SEQ ID NO: 4300 - protein, 434 aa, unidentified
  REGION 1..434: note = Description of Unknown: Cas Enzyme sequence
  MOD_RES 10..16: note = Any amino acid
  MOD_RES 419..425: note = Any amino acid
MNDQSARMDXXXXXXXIPMSKRFISPIAIDLGAKNTGVYFAHYPAGSTLDVFEEPGTKTGKVYQLDSNNYTYLMANRTAKRHQRRGFDRRQMAKRLFKLIWCKHFKLPWDKDVQQTISFLLNRRGFSFLTEEYDPARLSQFPQKVFDELPDELKIKPNDNGDYDFANALTEWANEDENKIKSMSATLNQESRRIRARLVFIRKTEKLREYCSTCKKGEKIPEEKKANLSRLSRWILEDWKKSGIQGLPAHLSENTFDMVKYLNEEEPATAEKTLQSLPDLKEEKKELEKSNWNFNAPDFKEKTADFGEPENPKIKTHLFHLAFALSKILNELESGGRHRSKYFEEVKAVLENENHRHGYLKRFCKQLQSGKYQELNVDRLTNLIGHISNLELKPLRKYFNDEKHKISKTNKEGDQWDEXXXXXXXLKVSMYTKT

SEQ ID NO: 4301 - protein, 1425 aa, unidentified
  REGION 1..1425: note = Description of Unknown: Cas Enzyme sequence
MVKNVDYVSTINIDLGARFSGVYFNTYEYGELPSQGKGVTLCLPQEGGKMTWSQSSRTATRHRTRSNKRRKQSKRLLILLLSELVRTHSIEMSELEWERLLEASRGLLNRRGYNRIEAEVDLTYLEHVEAGLLSEKIGQFNSVDNLLEQWNALSQQPDAVRGLLESELMQYNKNDLKKVLKDVAKEDRTSLAEAISLIKSAAQSIVEQIDYGHQHRRDYLCDIKLEIHNDSRFSVLTSHVGTEALWHLVGNISNLQLRTTRWFFNDEKHKKGDHLDTHSLKHVLTRWVTFWRPSTPEEKARQRSVISKLKDENNALKLLTALDPNLTIPPYEDQDNRRPPKDQTLLLSPLSLSQIYGDKWEKWALILRKTNNEWYEGLDEITSFYDRKSQLPKTINGERVVSSVSREQLKLAYFLQRLCDRSSRLDPYALRYISKSPNSHKAHSFYHQLEVDLGEQHVRDFLHFTSHYYNEVEQAKQGLWINNESTILERSDLNPPHKNKLLHLLVGGILGETLSPESLQAFVEQLWSSRVKGNSTVKGLCRKIEDVRKSHGNLFNEKLKRLRYQIEQLGKDETSVLQTIDDKSIWNAHMSSFTVKKAIASYFNHDESKSKRYSSTFSLAQIYNLLESDPRGFSANGVAINLEQNWRMGEIVHDGNVFARCSRMPADSIRPFDGVLKRVLEQQAHAIANKKLGELTSLQFAPHSVIDVHINIEENRFAFTEGLLDLKKASAAKRKQFSEKLAKQSQKWMSKTERIVNASRGICPYTGTSIGQHGEIDHIVPRASSRAKSGTVFNSEANLIWCTRDGNQRKQASVYTLKDLHSTYLVSLFKSASVSEVQVYIEKTVNELPNDFIFESLTSKQQDAVRHALFLSPDSEARQKVTLRLTAQKTSRVNGTQAWFARRIIEQLQSKLQQWIKVNDLSIRYHTTRVSAEEVSRIRAQLGVDFPETKKSERQGVASHTLDAVCVFARAGVEPKIMDRLAIGEVFTEDASALRKLIPSTIEIETLERRPRYHKTNIASQPIFKEGIYGEHFLSIWKHHNEIKVGFDPYHNPIVVEGKSPDLLIDCLSPVLQKTTGTQIEENLFKYDINKAQAFALLDRVWRVPCSEDESMLANLLESLRYTTSKKNVEAALLNVQGNAFKNQSEIVRDKQFCIKVNFTNAKAFKVKGELTYPAKYDWIKLLKNAEIAPLLGTKPKSLPQLRPILERHFYAGSDRAHNKTRRLYSLPIIDAPSGGFRIKRQNGDGTSIYQLHAIEGTPAKGFTVTKGKINWDQLAPIEQLRQSDNVTPVGGRFVSSTDDVVLFDRWLVIQLPDEMSKLVQEVQICPATKSRMYLRVTQPLSIFKQWVNNASEYELSGIYDVGDQLKIEPKAFFENHNLKLLAQPRGTLFIEQLDGSYVSYRYEVGSNNAIMKQAYQDAFDRLSG

SEQ ID NO: 4302 - protein, 1026 aa, unidentified
  REGION 1..1026: note = Description of Unknown: Cas Enzyme sequence
MKKNYSENTLRKMRYRLALDLGSNSLGWVIVRLDKEGNPCAIIRAGVRIFSNGRDPRGESLAVTRRNARAMRRRRDRLLNRKNRLMKQLVAHGFFPEEEKARKALERLDPYFLRAKGLDEALTPHEFGRALFHINQRRGFKSNRKTDKADNDSGVIKSALRTVRTQLQEENCRTAGEWLYKRTLAKQPVRARYRERALTGENGRRIEKSYDLYIDRAMVEAEFDALWEKQAALNPAQYNEQARGDLKGTLLYQRDLKPVKPGRCTFFPGEERAPLALPDVQRFRIYQEANHLRILMPGLNEKPLDIQQRNALADALEKNGQRTFLQIRKLLGLDSADRFNLEDVKRNDLQGNKTSSTLSRKEHFGKAWFGFSRSHQNEIVMRLLTDENEATLIDWLCQNTAVSSEQAEKIANVSLPEGYSNLSIIAIRQILPELEKDVQTYDKAVVAAGLEHHSHSATGEILHELPYYGIPLEKHVGFGTGDPEHSEEQQYGRIANPTVHIGLNQIRTIVNALIKEYGHPSQVVIEVARDLKQSREERGKIMREQAKNKKTNEERRKEIARLRKITEEQVSITDLRKWVLWEELNPAGPMERYCPYTGDPIGINRLFSPEVEIEHILPFSRTLDDSMNNKTVCMQKANRFKGNLTPWEAFGRQPVAGYDYEAIVERANLMSRQKRYRFAENGYEQWLKTSGDFTARALNDTRYLSRIALHYLNLVCPRNTWVIPGNLTAMLRRQFGLDSILGLKGEKNRDDHRHHAVDACVISVTDRALLQKISRISATARERQLGRFLDGLEVPWPTYREHVARAVRNIKVSHRPDHSHEGAMHNDTAYGLRGDGRVVHHKMVDGKRERVEETLTVIPISGTARADRHGLLPDGNPRPYKGYKGDSNYCMEIVKNDRGRWTGEVISTFEAYQVIRQLGEKEGIARLRNRSQSLSGKPLVMRLMRNDCVQLDVDGERRIMRVTSIVSDGRIALADLKEANADARNRDKNEVFSFTNRTPGSLQRDRARFVTVSPTGMIRIHPLKDG

SEQ ID NO: 4303 - protein, 1393 aa, unidentified
  REGION 1..1393: note = Description of Unknown: Cas Enzyme sequence
GIGMTLCLPEEGGKMTWSQAGRTATRHRIRSNKRRKQAKRLMKLVLQELVKANSIQLDEHSWNKLWEATKGLLNRRGYNRIESETDITPLAEIEPTLVAEVLTEFNTTENILEQWERYSQDIRFVRQLVDTELLQLNKSELKKHLRSSGVDKEDLKQLEQAVGLIKEAALSIIDQVDFGHQHRRDYLKSIKLEIEQDSRFKPVVDSVGVIPFWCLVGNVSNLQLRATRWFFNDVRHKSGDTLDLNRLKSVLVRWLNYWRPETPDEKERQAKALELLQSSHNTLQLLCDLDPNLTIPPYEDQDNRRPPKDQTLLLSPVALTNHYGDTWQRWALILRQSNVDWFEGIEEISSYYDRRSRLPKTINGVRHESPITQQQVQLAYFLQRLLDRTRKLDNYALRYLRKNRTNGDIKGNPFYKQLEADLGSQHISDFLDFCDRYYDEVEQARQGLWIQSKETLLERSNLNPPHKRKLMHLLVGGIIGERIGAEELQAFVEGIWGARIAGNATLRGLCKKIEEVRKEYGNLFNKRLHQLRYLIETKGRNEKEVLANNDDKAIWKVYQSVNVAADGIAQHFQHSPEKSKRYRNAFSLAQIYNLLESDPRGFSSNGLAVSLEQSWRMSEVEIDGQKCARCSRLPADSVRPFDGVLKRVLEKQAYQIANKKAEELFQATIDPNSVIEVHINLEENRFAFTEELLDLKKASAKKRKEFSDKLKRQAGRWLSKTERIKQASKGICPYTGKPFEPYGEIDHIIPRSQSLASGTIYNSEANLIWCSREGNQSKRDERYLINNLKGNYLQKIFGTQSVSQVTEIIESTVARLPRDFIFESLNQDEQAAVRHALFLPSSSPAYEKVIATLGAQGTARVNGTQAWLARRIIEQLQSILSDWAQQHQLKIRYHATRVNAEDVSRIRTLLGDMYSEFAKSETQGVGSHMLDAVCVYARAAAEPKVMDRLSVGAIYAESVEELRKLIPAITYIESLERRPRYHKSDIASQPIFKEGIYGEHFLPIWVHNNIIKVGFDPYKNAVEVSGKSPTQLIADIQAYCKDPNGQQVNDHLTKFEIDKHKAFELFDRVWREPVSPEELQAANVLDALHYVTQKKNVAATITNDKGNGLKSYGEIVADKHFSVKINLKGSKAYKASGKVVHPTIFDWQKLLNHPSLTGLLGSKLESMPNISEVLASYFNPGSDRAHSKTRRVYSLPVIASASGGFRIKRQGEDGNPVYQLHEIEGTVGKGFAVNHGLIDWNEVVYITQLRESANLTPLKGRFRPEPESFVAFDQWLAIEIPETLADSVTELQFCPATKDRMYIRVTQPLSVFSRWLSEASDSPLDSLYDLRNQVRVNEAAFFKCHNNKLLPMPRGALLIEKLTPDLIRYRYIAAGNNTEMKQAYQEAYSNLRE

SEQ ID NO: 4304 - protein, 1449 aa, unidentified
  REGION 1..1449: note = Description of Unknown: Cas Enzyme sequence
VLTEALVQMFELRGRFMKKVISPIAIDLGAKYTGLFLSHYAEGEKLSVSHNEAHTIVIPKEGPKMSWSQVARTATHHRIGGSKRKELAKRLLKLCVENLIKTNDVTLTEIELKKLWECLYGLLNRRGYNRLTAEFDEASLDLCEPYWFSENLPSLFQVGIPLSEQWRLIIQSPTVLRELLDNQNFSVKKNELKKTIKQTGIDKFEIESIVEAISAMKIAASNLIQELDFGHKHRKDYLTAIKKDIQKDTRLTKIVDVCGIEGLWSLIGNISNLQLRCLRWYFNDSEMKQHDLWIPQGLLSSLTRWFEFWRPYTEDERTNKNQAIHLLGNETDALKFLTSFDPIKSIPPYEDQDNRSPPKDQTLWLDPEALTRHYGKKWLVWAQKLERCNPELTEGIDEIINQTDRKSRLPKEIKGIVTASPVLNGEIKSTYFLQRLFDRVFKNDQYKLRYVAKLKSLDSADRLVLDLGSQHVDQFLDLLSRYYDEVLLAKQGLWRPNDQCVLERANINPPHKSKILNQLFGALIGERLSAEDLNDFIQKQWTQKVVGRSTLKGACGAIEKTRKSHGNLFNEKLKRLIFRVESQGLAPKEMSKDEKDIWSAWEKTLSAASAISNYFGHAENVKAKYSNPFSLSQMFNLLETDRRGFSKTTLAAHMENSWRMVQEKTDDGFSARCSRLAADSVRPFDGILRRILERKAFEIAKLKVRQIKALNIDVDELVIPILIEENQFSFSLGLADVKGKDADAKGKIKKLLQTQVTEWQSKDSRIMSSSQNICPYSGNIIDSNGEIDHILPRSLSLKKSGTVFNSEPNLIWCSQKGNLQKGIQRYTLADLNSKYLETQFGTSSAKEVEEIICGVIEKIPSQFVFDCLQVYQQRAIRHALFLDVSNPYFQRIVSFLGSQMTTRVNGTQRWFTRQIIEKIEFELADWSRENNVTIKYKAIRIDSYAVHLVRNQLGAAHSKFRKQTPQGVASHAIDAASVFAVAAASPDLMAVLGQGNGISEDVDSLASVIPDNVKMTWIERKPMYRKTEVASRKLFKDGIHAEHFLPLWVSSSAVSVGFDPVKWPTGAEDCSPIPVIGKDPTQLVRTLAPFLENVDIDKAISSTRPILLKINNYKAIEHLEKVATQICADKELEQADALDALHYTTLKKDVWARIYDLSKNTFKSQSEVLKRKDFLVKVGLNGPGKGKEPTYKIKGDLVLPCENTWKQFIESELVGYLIGTKPSTPVDQRKICEKFFNPGSKSKHSRSRRVFSLPVLSRPAGGYRIKRKLPTGNFNWQLQVPEDTPSEGFSFENNTINWKRTVAMPAFKARAGLFSVGERYSTPCNRVIGFDQWIEIKNPDGLPSSVVIEIAPGTKGRRYISVRQPLYLFIDWVGDSDQSRDHFFSSLTSELKVDGAKFAAVHGIKLLGKPRSNLFIKEVSSQFISYWYIVDSSNADMNKAYGEGLIKGV

SEQ ID NO: 4305 - protein, 1322 aa, unidentified
  REGION 1..1322: note = Description of Unknown: Cas Enzyme sequence
MLSLISLDLGGKNTGFFSFTTRDVSKIDDFQSGTIIYDESFVLSQVARRGKRHDKRNNLRNTLVKRLFLLLLQKHYGLSLDFLPDEILGLFNKRGYTYASFELKDENREKLENENLREILEERFGTITQDSIERFLTDFASSETEFKKFYADFKQFKEEVLKEKQSQDIKSGLKIIEDILNDHDKQQNQGNLPRAKYFEEINIEISGQPIDKLQNPKIQEFFKTHNLQIHAMQNLIGNLSNYQLKELRRYFNDEAMAKEDFWTPQKLHHITWRFIQSWHPKSPEDKQRQKENLAQLKNKNIVEFLTTTNPLMTIPPYDDMNNRGAVKCQTLRLNEAYLDKRLPNWRDITHALASEAQKENLESSTVKGYSEDSTLLHRILDTSSAIDPYKLRSGEIDGYIDMLTQEDAKNLQKFTKEYYQLVKEKVRTGIWTKDDAMFKKCDHNPPHKNNQIHNLVAGILGKAITKEQFEAFENELWNVKFGNKKLSSYCKNIEELRKSNGNLFKQIVEMGEDKEVQKYQKDLNEWVRKIGEFFNIEEPYRTRFNNLFSMAQLHTIIDTSRSGFNATCKWCSSENQYRAATKIEINEQTGEITTNANCQRLPADTQRPFSGKIERYIDKLGYEIAKVKAKELESIEADVIDLKIILEQNAFAYEESIRNAKIKNANAKAKKALEEAKKRGLKNIEDKNKRIKDFSNGICPYCGQSSGEDGEIDHILPRSYTLKKYDTIFNSEGNLLYVHQKCNQSKAEKMYLLQDIKAPVTQAWIEEKIAHLKTYKTFSALTQEEQKAFKYALFLDNQNETYKKVIGWLRTDQSSRVNGTQKYLAKKIQEKLKAMLPRKTFNFEFILADANDVHDLRGNYATQNPLLKKPDTQPPSSHTIDAIMSFLSVYPKITHKEELPESQKVLGWVEINNIKTKPLGKIEKDQRENLGGTTIFKDSIYQERFAPIYAYENKFYTGFVGNGKNLDFSNCAELKQKDFESIKEYFKNKIQKPNGLNIYELDKQKVLTLFHDISKGSSSEIKLAELLNKFSYNLLKTNVEEAPKILKDDKKLSTKIYDKTIVLPIKNEWLAFDRAFKKHLEAKEVEYKEKDGKYNVGEDVLNEFCKSYFGIQNKPIRNKARKVFSIPTVEAPSGGFRIRRKNHKGENVYQLVGIDGAKSAGFAIEEGKINTSKDVPLATLAKSKNVSFKDPQKMELQSYIDMANYRDISHATSINGVKIFVAPASTNRPQIRCVISSDTFMQIVNNQEFNYLELSDLKFTTDESFGVIKEKFDVLFKGCNFAPRDKLKIIKANTYGIEIEFSNNNKTIMKHYDNGTDVTLDD

SEQ ID NO: 4306 - protein, 1635 aa, unidentified
  REGION 1..1635: note = Description of Unknown: Cas Enzyme sequence
MKIISPIAIDMGAKNTGVYYAKYERGSSFEKIDNKRGEVLVYDDYTPLLKDRTAKRHARRGYQRRKLAKRLLTLVLENYFDFPAKKHAQALGFLLNRRGFTFLDETYSKEHLANFPADAWENLPASVRNAFECKENIAANLQKFSEAADGKIHRIFQAVESKNKDVRADLVYFAYIGKIGRACEDRVNGNPVNEKSKGPNKLSRTAVWIVARLNEKQAIFAVGNGRNVDLLKQINDLIPAQAKSLRERLPDIQAGEKRAKESAWNFKISEFPLNAKNEQALSSADANAHLHHLSHAIHQLNAELTSGARHRTKYFDEIERDLEAFSREAYVNNAHNPNYIKNFACAVNASENLNMNKLHRVLCHISNLELKPLRAYFNDNAPVLRKKDLPNGVQSQSNFVSHAAKNGGDVFSSEKLSRIASTWFLKNWVVSAEKDDKSKVSSYRDLKTRWNEHGEKGDLVAFWAKTDPVLTVPPYQSMTNRRPPICQSLVLNPAYLNEHYPHWNTWLDQLQPDPDYRKKLQSLQSGKGKRKNRDGKLIRGDLLCARQLQFVLDASKKTDRYSLNDIWSIHHKLQNLQAGDDEAVWNERMRAARDASELPCDLKNDLQNHSPGGFGHFINKYYQTRKRAKEGRYFLHQQRKNQWETAGKLFAMCAHRPKQKKHQWQLDLAAIVGADSDDMVRKIGKQTPEKWLLEIKGFKGACGDAATMQKKHRGALKIKIGYAKKQALLKKNLAQEDSQLVKLAGKCEYLAVRLAQVLHPAAAPEKQQANAEKFGNVFGFAQINNIVFQDRKGFSKTCPVCSVDNAFRMREIEKGGQGVARASRLPAMSIRLIDGLVMRICDAVSRHVAAVCWERIKDDLHNGSRVTIPLVLEQNRFEFEPNLRKLKGKPSTESDSDQADSLDPGDIQSTKERRIVDAASGVCAYTGADLAGRREIDHIIPRASKHGVLNDEANLICVSALGNQGKDKQTKFLDDLSKRYKEKIFPGMSDEEIKGFLYEQLEGERASEADADVPFVFGPYLSFINLDEKQQVAFRHALFLRDDDKLKQKVINALQNRNRAIVNGTQRYMAQCVADKIKKLADKAGRASQIEFDYFEYPAARVQELRRFFAEYQRGIAKTKAQNLHSHLIDAQMAFLLAVQNHQDEGGMALKLSDLETIWEEAIDPATGEISPKYCALSYIDEEQFAKKNLRAKTSNKKIADIVTAGKRGPVNLSKVFSRYVFKGNAIGERYQPIAEYDGELYRGYPQKTKGGKYECAQYCTKIAKSQIKRFRHVVESGKYYALTTDNEQIKIWTIKMVGKKYKQIDKDSHKYFSREYQAQSAQEKDEIAQIKLIIGVCRYYVARTDVRCAPHVIKTAQRNPVLARWIAFDEAWKREAGGDYAVEEKQNKLQYKFAGAEVREKWDRFCARQQFPVLRAETAYKTSHAKTSRKFTMVAATSPSGTVFRVNRGGKDIYQAVPLDSNVVAKDRSNFLIQHSKNLALVSKDADEILKRPINTVDERELDDEPVKAALFFKSEFLGERESDVVRVFLSNTAAEIKNFPLEKFLHYCRYHDAEKLTAEQKRGILGKTSMRFRGADNADDVYADKSTVDDSIELTTRDGGIKGIKIDGTTVNFSLPFKSDAVRRFLESIADDA

SEQ ID NO: 4307 - protein, 1413 aa, unidentified
  REGION 1..1413: note = Description of Unknown: Cas Enzyme sequence
MKREIFSPVAVDLGAKFTGVFMAHGSDGENLLEPAAAVIVTPQDGKSITWSQAARRQRRHQQRCIKRRKLAKRLLRLLLTEVAGRPLSHDEVKAVSGLLNRRGYNRLEAEIDWELLEGISPDWHAQRFPDWFNNEESLAEQFARMIQDIDLLKEIRKSNSIFWKPVKELKKDIRKFYGESDPETMEAHKAMQVAIEGILTSIETGARHRKEYLHNIKAEICKDSRLKSLAEAIGGQEQLYAVIGHVSNLPLRVLRWYFDDERMKQGDFLDHRLFKCLKRWIERWRVYTDDERERRKRLLSFFESWEKQGWLRQEKPLSELIVEWISKLDPVETIPPYEDMNNRRPPKDRTVWLDPRAMTREFGQEWTLWADSLMAAAGNAPWKEGLSEAAGRLDRKSRLGVKAHDRDYQRALFLQRLLDRTMAFDEYRLRLLAKGHDGQQEEHAHNRLAHDLGRHRLEEFLRFCSLYYQEIERVRSGAWSPKSALLLERSDLHPPRKQRILHRLVGQALGIANLREDEFKRFRSEVWTARHGRTTVRAMCEKVEKTRKQFGNLFDILLARAKAQKERGEKIDKKSEEYAALLAEERASKAAGIIADHFGHGPDAKAYYNNPFTVAQLYNLIERDRHGFSRVSLAAHLENSWRMEKLELPDGGSAARCTRLSADTVRPFDGILRRIVERQAIEVARIKAQQILKHLKGNEPIHIPIMVEENRFSFTLDLKDLKNKKSKREEARLLALIARQEGQWLEKAERIKKASKGVCPYTGDPLENSGEIDHILPRAFSQGRHGTVFNSEANLIWVSIKGNRDKGPRRYHLKNLSPAYLKAVFGTENVEDISSQIEETLSRLSPDIPFDVRSDDEQKALRHALFLRDSAPAFQKAFSLLATRMKNRVSGTQAWFARTLAWAIKKELKKLGGEPSALRFSIHRVDAGQVSQLRHLLGEYDSRFEKTDSQGAVSHAVDAMIVCAEACETAQELLPGLSESPERLANMFPASVTIKWIERLKPYDPKKDVKSIPMFKDGLYAERFLPIWWSDRGVWIGFSAKNWLPVKGSKPEILINKLKRWLNGKVPSEPPKGQPVCFKINRKAALELLHRAAKQGIEEEAEQEAAELLMTLRYVIVKEKISSGLLDKNKRLKEANTDKFKIKVQQFVYPRRSRKPELKIPKASIRLPSERDWKRVYNEAKAKATDGNLTDSQWQEIVEQLFHPGSRRPHRKARQKYSLPMVATESGAFRARRRGPRGELFQLMMIGDYSICGFPVKNGKIEWKKPVSMPFLRKSPNISPASSLAPEPQYDKIIRLDHWSRLDVHDIEHIDEAWACPGTKDRMYVKIRQEMGDFLAMADIADRGFAEIPAEIKLSKDEKKDFGEYLDWIGKPRSNLFLLSIGDKVEYWFIVSSTSAELKTRYGQAWRAENMRG

SEQ ID NO: 4308 - protein, 1740 aa, unidentified
  REGION 1..1740: note = Description of Unknown: Cas Enzyme sequence
MSKLIISPIAIDLGAKNTGVYFAHYPAGSSLDEIEKDGKVYQLEKDSYTLLMANRTAARHQRRGYDRRQMAKRLFKLIWCKHFGLEWGKDVQQAVGFLLNRRGFSFLTEEYDADVLRQFPKEAFDELPDNLKIQQNDSGYYDFAGALTEWGNEGEAKVKSLYESLNKEPKRVRARLLFISRTDKLREYCLRRKEGNTIPKEKQANLSRLSRWILEEWIKEGVHGLPGIPAENTVDLVEYLNNKSATTSGEILHSLPSESSLKQKKSELKKSNWEFEPEKFQMGKANFGEPENPDVKAHLYHLAFAIHKIHDELRSGGRHRSKYFEEVKNVLKKKDHTHDYLKKFCGDLQSGRFHGLTVDGLSNLIGHHRLGHRRVARRDLTVDGLSNLIGHISNLELKPLSKYFDDKRHRKGDYWDESRFTRLFDRWILREWRVGEKDKDKADGGKWPYPELKGHWNRRDRSIVDFWLETPPGYTIPPYQDNNNRRPPRCQSLLLNVNFLNHKYGGWREWLVELKGVESVRDYLGDYEGQLKEPKSGKGNCYFSDERAGKLRADSGRRSMAELDARVLQFIFDRVKAEDRLNLNEIYSHSKKIKQDMHKQDDQSVKAVDQAKRELDESIRNSGLPQELKIAPDYGRDDLFPESSFFHLICKYYKLRQRARDGRIFIHPEYRYTKESGYKNTGRFNDKEHLLTYCNHKPRQKRYQMLEDLAKILFTTKETIKSRMGISDEMEKDKDASKLFDTVEQFFNDIKHEGAGLKGFMEDCAKAKKDYRGALKMMIDVAYKDYEKYQNQIRENREESGQKPLPVTRLKSQAKKKLVEEWSKARSKESVEKKVDRLIRLKEKSFDFAKLLAEKIHGDIGIAEREAIIEKFDNPFSLAQIYDIAYKERHGNSKTCSVCSADNMRRMDAKFSEERRNFVAKAGRLPAMPARVIDGAVMRMARIVGGAIAEDKWKKIEKELDKERDVYIPIVTESNRFEFEPSREELVKGQRPPSKPRKGEVTKRSEETDIFSAKEERIKDAGKGICPYCGGQVFDKNGEIDHIIPRRSRYGVLNDETNLVYAHIQCNALKGNKDYGLRHLSDSYKEAQFGETDTSKISQLIIEQIGDDSGENFEFGKYRSFINLTPNQQTAFRHALFLVGDPLREKVINAIDNKNRAFVNGTQRYFAEVLANELYKLAKAKRKEKSLTFDYFGVPADGDIDSVPFVRGEIENLKDGNGNFLHPELQGHKKPKGEDKEKKRQTPPSHLIDAGVAFMIAVSKHYKDGSFKINAPYITPYCYVGEYGEERDLYGAVKVRIEEDKIRKELVRVKPNENFSSHRAFTRDTYYADHYFPVLLKNESNVVTVRVGFDWKNSAQVTANSDRNRQKLLGDLVALLPVCEGAQMLTGRQYGDLGDLFDAMKGVEKFSDQLQKNGYCRLVVNKQKLHELWMEKYNTKTGVDFNRDDFSYKNLQYRTERVAIGGPEVLLARLNETGKKANKNFTKKVDRQNIILPAKKDWENCLAAWRENEARGVPFDRFLREYFKYQTKIPHQKVRKVFSLPVLTGQGKFMVRRKSWNGSCTYQIVNDSNSRMPDNKPNVSVRLNDGLLGIRLAKWAKSSNIVKFPSKENYQDGKIINPADWYAADKSRHAFPDGIEQIWYRIDDSTAPSIAVKLAKNGNQLQPEFLEEPVCQHGSRKVDARKETKEAPAQPEKSPQDVRNEFFEKEIKPAKKGKIICYKGKAYNAVIREVFRTATIGELQ

SEQ ID NO: 4309 - protein, 1422 aa, unidentified
  REGION 1..1422: note = Description of Unknown: Cas Enzyme sequence
MGKTHIIGVGLDLGGTYTGTFITSHPSDETEHGDHSSAFTVVNSEKLSFSSKSRTAVRHRVRSYKGFDLRRRLLLLVAEYQLFQKKQALTPEERENLRIALSSYLKRRGYARTEAETDVSVLESLDPSVFSSAPGFTNFFNDSEPLNIQWKVISNSPETARALNKAVSGQKEADFKKYVKTSFPEYSAKEILANYVEGRRAILDASKYIANLQSLGHKHRSKYLSDILQDMKRDSRISRLSEAFGSIDNLWRIIGNISNLQERAVRWYFNDAKFEQGQEQLDADKLKNVLIRALKYLRSDDKKWSASQKQIIQSLEQSGDVLDVLAVLDPDRTIPPYEDQNNRRPPEDQTLYLNPRALSSEYGDKWKSWANKFAAAYPLLTDDLAEILKNTDRKSRIKIRSDALPDSDYRLTYILQRALDRSIALDECSIRRTAEDFENGVVIKNEKLEEVLSGHQLEEFLEFANRYYQETAKAKNGLWFPENALLERADLHPPMKNKILNVIVGQALGVSPAKGTEFIEEIWNRKVKGRSTVRSICNAIENERKTYGPYFSDDYKFVKTALKEGKTEKELSKKFASVIKVLKMVNEVVPFIGKELRLSDEAQSKFDNPYSLAQLYNLIETERNGFSKVSLAAHLENAWRMTMTDGSAQCCRLPADCVRPFDGFIRKAIDRNSWEVAKRIAEEVKKSVDFTNGTVKIPVAVEANSFNFTASLTDLKYIQLKEQKLKKKLEDIQRNEENQEKRWLSKEERIRADSHGICAYTGRPLDDVGEIDHIIPRSLTLKKSESIYNSEVNLIFVSAQGNQEKKNNIYLLSNLAKNYLAAVFGTSDLNQITNEIESTVLQLKAAGRLGYFDLLSEKERACARHALFLNSDSEARRAVIDVLGSRRKASVNGTQAWFVRSIFSKVRQALAAWIQETGNELVFDAISVPAADSSEMRKRFAEYRPEFRKAKMQPVASHSIDAMCIYLAACSDPFKTKRMGSQLAIYEPINFDNLFTGSCQVVQNTPRSFTDKTNIANSPIFKETIYAERFLDIIVSRGEIFIGYPSNMPFEKKPNRISIGGKDPFSILSVLGAYLNKAPSSEKEKLTIYRVEKNKAFELLSKVAGSKFTAEEDKAAKILEALHFVTVKQDVAATVSDLVKSKKELSKDSIEDLAKQKGCLKKVEYSSKEFKFKGSLIIPTAVEWGKVLWNVFKENTAEELKDENVLRKALEAAWPSSFGTRNLHSKAKRVFSLPVVATQSGAVRIRRKTAFGNFVYQSQDTNNLYSSFPVKNGKLDWSSPIIHPALQNRNLTAYGYRFVDHDRSISMSEFREIYNKDDLRIELAQGTSSRRYLRVEMPGEKFLAWFGENSISLGSSFKFSVSEVFDNKIYTENAEFTKFLPKPREDNKHNGTIFCLVLEKVLMFPCVNWSRVFICLNKSSKF

SEQ ID NO: 4310 - protein, 1212 aa, unidentified
  REGION 1..1212: note = Description of Unknown: Cas Enzyme sequence
MSKILGLDVGIGSLGWAIIDEDARRIVDLGVRIFESGEEGATDAAGRASQIRRSYRSTKRLNKRRKHRNIRLKSFIEELNIISVEDINCSYKTKGFNPDTWRYRSEGISRKLSPIELASVLINLSNYRGYRDFYEDDEEDSGKLAVAKNRINTIYEEKKDQYRTIGQMIYNEPCFRDERNGKLVIRNRAIRGTDGKKETNYVYLINRSTLIDELKVLLSCQREFGYEQLTDDAIDKICSIIFVQRDFEDGPGPNKAESPERRESMMKSLKGHQSYSGFDELVGNCSFYPTEGRGHKNSQLYDMYVVINTLSQLRFYCDNKEVNCPESVVMEIRLQLFENGGSLSKKHLEKICKDHKIEVSFPGELSKKKVIIKAPYIKILTDDHLFDVDFMQQFKEENYYDDCSLSSKIGLAIAKYATPRRRKDEIKNNVTDEEYNRLGYADGLKTIKSLGVSNVSFKYMKEAISAYLNGIKYGDFQADFIKNNIENDEKKFLSNDGKLLPINDPDMVRNPVVYRTINETRKIVNAVMGLYKDIKTINIEIARDIGKSFEQRKETAKYQKENENSNEELRAELLRKLYSEGYSVMLSDRLLDKYKLWKDQKHMCMYSGKEIQFKEIVAAVNVQIEHIVPQSIILDETLNNKVLVLTEENQKKNNRLPLEYMDSSQAKGFKNRVNNLYRTNNINRIKYEYLMLESLTDDVISGFVDRNINDTRTISKYVSNYLRLSFNGDVTVNVIKGSVTSRFRRRWLGTRSKRYDGVPSVYGLEQKTRKLHYYHHAIDAAVVANLTRPYIEIAQDYLRIESIRKDAEYHAKKGNSKTSLVLYDELEKEKAKSLDKIHHFYGFNREYTRSLLDSGFVPSICKDFRSEIEIRVPLEITFDAFGYTQMEKSYRSLRNNMDAIKSNLTDADIEAGTVIVPNMLEDINSDLPIVCPEAVCIKPNAQIVFSDKDFDPNADSDVIRKQFDKFTKNLSPRDVMDYIEDIRMVTEDEYATRVKKYYSSDPTFAERIKLPYVSFKISKKFRGNMVASDNPIALKKTGFNTYIELENDIKNNLKSPYYVRFNKGINESGNFTIYDARSYYCIEIFIDDKGTYQIRGIRYVDVVHDSKRGKLRLLKPLPLGYKHVMYLFKNEYIISYDKKGNIKNNGFGAYRGVENINRNTGKIRLFSNMNLSGRDNSINLAGACSKIEISILGHIMGMKKCGDQSLFITEKS

SEQ ID NO: 4311 - protein, 1389 aa, unidentified
  REGION 1..1389: note = Description of Unknown: Cas Enzyme sequence
MNLRNVQGDYNIGLDMGTGSDGWAVTDGEGRLLHFKKQPTWGSRLFDSAETAASARIPRSQRRRYVRRRWRLDLLQGLLQEEVEKVDPDFFLRLRQSRLVDSDPNKTTAAYRWPIFNESDFTEVDYYDRFPTIYHLRKHLLESDEQADIRLVYLALHNIVKCRGNFLREGSSLSAKSAKPDDAVKAFCEALEAWSEGRDGEYSPISVDDVVAALTAKGASNSERAAAIADYVTLSFGDRAADKKLKKALATAMVGLKAEFKDVFGEFPAEKTKISLSNDEEVDALREACPDDSKDVFDSLCGVYAAYVLQGLLSYAPGETISANMVAKYDRYGADLKLLKALVREYKDAKAYDSFFRGPLYSDKSGYNVAQSKGYTRYNLGKTSYDDFAKEVKKLFAGTAAEGDGRYLDMMDAFENQRFLRCLKTSDNGSIYYQLHLEEMETILDNQAKFYPVLKEQREKLLKLVTFRIPYYVGPLTQRNARLDAHDNPRFAWSERKPGMENAIITPWNWDSVIDKSKSAENFIKRMTGICTYLQGEDVLPKCSLLYEEFCVLNELNGVRWTEDGDYEQRLDEEQRRGIVEDLFHRFRTVSYERIENWLVENGYASSAHVVGGQGVSGLESKMSSYIFFAKDVFKTGKIEQSDYPMVEKIIQWNTLFEDRGILREKLQEKYGAEGEGRLDDAQINAICKKRFTGWGRLSEKFLTGLKVDTQLDEKSIMDILREGDPNSDNRRGRAMVLMEILHDDRLGFQNEIEAFNRAYFEQASDALGINDLPGSPAMRRSLNQAIRIVDEVVRIAGKAPAHIFIEVTRDDDMKKKGSRTKRRYDNLKDALANFKEQDPQWTKRVLAELKDVSPDDLDERLTLYFMQNGKCLYSGKPIDITQLSNAGLYEVDHIIPRSYIKDDSYENKALVLREENQRKTDAMLLDPAIRQRMSGYWRALHDAGLIGDKKFKSLMRSSVNENAMRGFIARQLVETSQMVKAAQSLLSAKYPDTKIVPVKASMSHNLRDAAGFVKCREANDFHHAHDAYLACRVGLFISKWHPGIYEQPIAYAHAMRKYVRDQAELFNARHEAPGSSGFVVGSFMGKHVDEDTGELWDGAAEVEGIRKALNYRQCYITRMPVEDSGAFWNATIYSPRDPKMGPKLSLPLKNDLDPQTYGGYSSQQFAYFFIYEARDKKGRTVFRFAEVPVWLAPRIRVDEGALEAHARRLAEGEKLQFVGIQRAKLLKKQLIEIDGERFLITGKRVMRNATEISLREDEIALLQQYLLKRASRPCSHVVTAVSADDLVESALQSVSRYANRLALLLKPSQLRDGMMTLCDDEKIEIVLRVLALANASTDMSDLSAAGGPKCAGYMQPTYSKLLSDPNVDFYIIDQSVTGMFERRTRVGV

SEQ ID NO: 4312 - protein, 1388 aa, unidentified
  REGION 1..1388: note = Description of Unknown: Cas Enzyme sequence
MNLRNVQGDYNIGLDMGTGSDGWAVTDGEGRLLHFKKQPTWGSRLFDSAETAASARIPRSQRRRYVRRRWRLDLLQGLLQEEVEKVDPDFFLRLRQSRLVDSDPNKTTAAYRWPIFNETDFTEVDYYDQFPTIYHLRKHLLESPEQADIRLVYLALHNIVKCRGNFLREGSSLSAKNAKPDDAVKEFCQALKAWSEGRDGEYAPISVDDVVAALAAKRGSNSERAAAIADYMTVSFGDRAADKKLKKALATAMVGLKVEFKDVFGEFPAEKTKISLSNDEEVDALREACPDDSKDVFDSLCGVYAAYVLQGLLSYAQGETISANMVAKYDRYGADLKLLKDLVREYKDAKAYDGFFRGPLYNDKSRYNVAQSKGYTRYNLGKTSYDDFAKEVKKLFAGTAAEGDVRYLDMMDAFENQRFLRRLKTSDNGSIYYQLHLEEMEAILDNQAKFYPVLKEQREKLLKLVTFRIPYYVGPLTQRNARLDAHDNPRFAWSERKPGMENAIITPWNWDSIIDKSKSAENFIKRMTGICTYLQGEDVLPKCSLLYEEFCVLNELNGVRWTEDGDYEQRLDEEQRRGIVEDLFHRFRTVSYERIENWLVENGYASSAHVVGGQGVSGLESKMSSYIFFAKDVFRTGKIEQSDYPMVEKIIQWNTLFEDRGILREKLQEKYGAEGEGRLDDAQINAICKKRFTGWGRLSEKFLTGLKVDTQLDEKSVMDILREGDPNSDNRRGRAMVLMEILHDDRLGFQKKIDAFNRAYFEQAGDALGINDLPGSPAMRRSLNQAIRIVDEVVRIAGKAPAHIFIEVTRDDDMKKKGSRTKRRYDNLKDALTNFKEQDPQWTKRVLTELKDVSPDELDERLTLYFMQNGKCLYSGKPIDIARLSNAGLYEVDHIIPRSYIKDDSYENKALVLREENQRKTDAMLLDPAIRQRMSGYWRALHDAGLIGDKKFKSLMRSSVNENAMRGFIARQLVETSQMVKAAQSLLSAKYPDTKIVPVKASMSHNLRDAAGFVKCREANDFHHAHDAYLACRVGLFISKWHPGIYEQPIVYAHAMRKYVRDQAELFNARHEAPGSSGFVIGSFMGKHVDEDTGELWDGAAEVEGIRKALNYRQCYITRMPVEDSGAFWDATIYSPRDPKMGPKLSLRLKADLDTKLYGGYSRSQFAYFFIYEARDKKGRAVFRFGQVPVWLAPRIRKNEGALEEYARHLAEDEGLAYVRVQRAKILKKQLVEIDGDRLIITGMKEVRNASEIAFNLNEMALLSSYVRSKQGKPCQGVDSGQSADDVWNTIDQHFSFAKRVLTQIGFNELQDAFKSLAPTEKEEAIVRILALVNATQNMVDLSLLGGPKYAGCMRLTYSKLLSDPNVDFYIIDQSVTGMFERRMRVGL

SEQ ID NO: 4313 - protein, 1352 aa, unidentified
  REGION 1..1352: note = Description of Unknown: Cas Enzyme sequence
VKENYYLGLDVGTNSVGYAVTDGRFNLLKYKGEPMWGSHVFEEGKQCSDRRMHRTARRRLDRRQQRVHLTQEIFAKAISEVDERFFIRLKESALFREDTSGRDTYIFFQDENYTDKEYHRDYPTIHHLIKELMEDTTPHDVRLVYLAVAWLMAHRGHFLSEVNKDNITELLDFDSIYGNLMGLFTTSPWIVSDKEEFKNILLLHQTVKNKERKFWELLYDGKKPKTNEEDYINKEGIIRLLSGGTVEAGKLFNQKEFQEKISISLKKSEEDFQLLLDEMDEEESEYLIRIRALYDWALLVDSLHGCSSISEAKVQDYTQHESDLKMLKNFVRKYCPNEYAAIFKNAEKENYASYVYNISKEKRTKEYKKKITQEEFCDYLKKKLKDMQIEKEDQEIYQDMMLRVETYTFMPKQVTGDNRVIPYQLYYDELKKILENAENYLPFLKEEDEQGISNKTKLLSIFEFRIPYYVGPLCSASKYAWLKRKSEGKIYPWNFEEKVDLDQSEEAFINRMTNNCSYLPGETVLPQNSLLYCKFTVLNEINNLKINGIPISVECKQEIYRLFEENKKVTVDKIKKYLICNNYMKKEDVLGGIDVTIKSSLKPHHDFKRLLHLGILNEREVERIIECLTYSEEKSRVLRRLEREFPKLSDEDRKYLSKLKYSDFGRLSREFFTGIRGANKETGESFNIIQALWNTNDNLMQLLSDRYTFKDSIKEEQHKYYEEHPMTVESLLEEMYVSNAVKRPIYRTLDIVKDIQSVCKTAPKKIYIEMARGQEEGSNRKKSRKDQILELYKNMDKGEVRELSKQLEDCSERELRSEVLFLYFMQLGRSMYSGKPIDIEKLKTNAYDVDHIYPQCRVKDDSLSNKVLVLSEENRAKGDKYPISTKIRQNMGEMWRVYHEKELISDEKYRRLTRESAFSNTEKMEFINRQLVETRQSTKALTRILQYIFPETEIVFVKAELVSDFRNEVLKCAKSRIVNDLHHAKDAYLNIVTGEVYHARFTSKFFKIDQDEYSVKTKAIFGNKVWNGKELVWGGGKDITRVKKTLTKNSVHYTRYAFERKGGLFDQQPLRAASGLIERKVGLDTEKYGGYNRSTASYFLLVKYMEAGKKPKQDVMFVPIDLMESERIIKNESYAKDYVRNAIAQIIGKSREVVQEVSFPLGMRKIKVNTLLIFDGFEAILASKSNGGKTLVFGSMMPLFVDSKKESYIKRLESFSKKKKQNNSLFVDEVYDKITKEENRELFLFLTNKIEEAPYCLIFGSQLQVLHDKENEFENLNLEQQVETLLNILSIFKTGRTTGCDLKSLGGVGQAGIFTESSKLSNWKKSYEDVRIVDISAAGLHRKISQNLLELL

SEQ ID NO: 4314 - protein, 1352 aa, unidentified
  REGION 1..1352: note = Description of Unknown: Cas Enzyme sequence
VKENYYLGLDIGTNSVGYAVTDGGFNLLKYKGEPMWGSHVFEEGKQCSDRRMHRTARRRLDRRQQRVHLTQEIFAKAISEVDERFFVRLKESALFREDTSGRDTYIFFQDENYTDKEYHRDYPTIHHLIKELMEDTTPHDVRLVYLAVAWLMAHRGHFLSEVNKDNITELLDFDSIYGNLMELFTTPPWICSDKEEFKNILLLHQTIKNKERKFWGLLYEGKKPKTDEEDYINKEGMIRLLSGGTVEAGKLFNQKEFQEKISISLKKSEEDFQLLLDEMDEEDSEYLIRLRALYDWALLVDSLHGCSSISEAKVQDYIQHEADLKMLKSFVRKYCPNEYATIFKNAEKENYASYVYNIPKGKRTKEYKKKITQEEFCDYLKKKLKDVQIDEEDEEIYQDMMFRLETYTFMPKQVTGDNRVIPYQLYYDELKKILKNAENYLPFLKKEDEQGISNKTKLLSIFEFRIPYYVGPLCSTSKYAWLKRKSEGKIYPWNFEEKVDLDQSEEAFINRMTNNCSYLPGKTVLPQNSLLYCKFTVLNEINNLKINGIPISVECKQEIYKLFQENKKVTVDKIKKYLISNNYMTKEDVLGGIDVTIKSSLKPHHDFKRLLHLGILNEREVEKIIQCITYSEEKSRVLRRLEREFPKISDEDRRYLSKLKYSGFGRLSREFFTEICGVNKETGESFNIIQALWNTNDNLMQLLSDRYTFKESIEEEQHKYYEEHPMTVESLLEEMYVSNAVKRPIYRTLDIIKDIQSVCKTAPKKIYIEMARGQEEGSNRKRSRKDQILELYKNMDKGEVRELSKQLEDCSDRELRSEVLFLYFMQLGRSMYSGKPIDIEKLKTDVYNVDHIYPQCRVKDDSLSNKVLVLSEENGAKGDRYPISAEIRQKMGEMWRVYHEKGLISDEKYRRLTRVSAFSNTEKMEFINRQLVETRQSTKALTRIFQYIFPETEIVFVKAGLVSDFRNEVLECAKSRIVNDLHHAKDAYLNIVAGEVYHARFTAKFFKIDQDEYSVKTKVIFGNKVWCGKDLVWDGGKDIARVKKTLTKNSVHYTRYAFERKGGLFDQQPLRAASGLIERKAGLDTEKYGGYNKSTASYFLLVKYIEAGKKPKQDVMFVPIDLMESERIMDNKAYAKEYVRNTIAQIIGKPRDVVQEVSFPLGMRKIKVNTLLTFDGFEATLASKSSKGQKIVFGSMMPLFVAGKKEQYIKRLESFYKKKKQNNSLLVDEVYDKITKEENRELFLFLTNKVKEMPYCLIFGSQLQVLHDKENEFKNLKLEQQVETLLNVLSIFKTGRTTGCDLKALGGAGQAGIFTESSKLSNWKKSYKDVRIVDISAAGLHRKISQNLLELL

SEQ ID NO: 4315 - protein, 1353 aa, unidentified
  REGION 1..1353: note = Description of Unknown: Cas Enzyme sequence
MRKVSKKYSIGLDIGVSSVGWACLTPDFRIPKYNGRYAIGVREFESANTAEERRIQRGTRRRYNRRIKRIQLLQQTLAPLFNHDPNFFMKLEANEEHFWRNNNQFENKSLSEVLTSIGKNPKKYPTIFHLRNALLHEDKEFDPRLVYIALHNLVKYRGHFLNEHMDWVSSSSENESTFDLIKRYLDTLINVGYTVNNALESEYNETLNNIVQILESNEHTSSDKRNKIKRLIGKEFHEPISLIVGLKSDMHKLFPNSGNTQVYQDDKLKISFTAEDITEVYEKLLEEEKLIIDQANRIFQHLLLNDLLAGSNSVAEAKVNAYNEFREDLTLLKKIYNEHLGKKAYRDMFITTRSNQTKYRETKNNKLLCTFDRFLKIHASEDAFYKELKKNFENIIKQPNTKKKDVTAVQSALERLNKSQFLQKQKSYLNAAIPHQNNVFEAQTILRNQQKYYPEITNEIIDKITKIISFRIPYYIGPLIKNAPEHDFGWAVRNDMNQHVLPWTIDEVIDRSTSAENFIQRMTSYCAYLTNEKVLPKHSLTYQLFEVLNELNGIQIRAEYDLPNKKYRLSYEEKEWIITNVFKKYKNVTHTILLRELKNSPFKDIVLDNQTNSLNKIFGTQKEDRFGSSLSSHIDLEKIFNHVDSHDKKMLEQIIYWITVFEDKDIIKLKIKETYKDISDKQINNLTHLQFVGWGRLSHKLINELQADIENNLTILDILKKEPIVFMEVLGTEKYQLNERITKLNLKDNTAYTKIKYKDIADLQGSPALKKGIWQSILVIEDLVEIFGEPEHIMIELSREEGIKKRTVDRKRHITNLQKAISKDEADLKAFLKEHSRYDLKDYNNPRLYLYITQGGKCLYTGKVLNISRLQDYEVDHILPRNFVKDDSIDNLALVTSEANQAKAGSKMPLEILNENEKFYQRKHWKKLLDNKLISQSKYFKLMKESFSDQDKESFFARQLVETRQITKHVKDLLNDRFEHTEIHPVNANIVTNLRKHSNVVKLRDLNNKHHAIDAVLAALVVQFIINKYGKNFLNFNFKYREAQKKWREMLTKYKKNFFLFADIDQYDKFTHFATGELLSGREFLAVLNNKIPWQTTKKIGSSESAFYKETLFSPKVKKPKYTSDKTDKGVYDEMKTDCTYLISYKELNKKGKGVSKSGFVDLYVIEKYQLQQKSQKELALFLASKVAKGTVVDATIHTKIEKYQRVSYNGHDFYYVSSNEMHNARQLILNDGILQTLYNLKNNSNKEISVNQLKETFVDLAEIVISSYNEFLPNSSKNVLNDYYNKIIDQESFIYAVTELFKTTSASATRSTLFGTRYQRKTSPSQLLFMHQSITGLHYRKPKSYKHELWST

SEQ ID NO: 4316 - protein, 1354 aa, unidentified
  REGION 1..1354: note = Description of Unknown: Cas Enzyme sequence
MRKVSNKYSIGLDIGVSSVGWACLTPEFRIPKYNGRYAIGVREFESANTAEERRIQRGTRRRYNRRIKRIQLLQQTLSPLFNHDPNFFMKIEANEKHFWRNNNQFENKSLSEVLTSIGENPKKYPTIFHLRNALLNEDKPFDPRLIYIALHNLVKYRGHFLNEHMEWASSSSENESTFDLIQQYLNMLSNVGYPVNNSLEYMHDETLNNIVQVLESNEHTNSDKRNAIKKLIGKEFHEPISLIVGLKSDMYKLFPNSGNAQIYQDEKLKISFTEEDITEVYEKLLEEEKLIIDQANKIFQHLLLSDLLSGFNCVAEAKVHAYNEFRDDLNLLKEIYNEHLGEKAYRDMFITTRSNQTKYKETKDNKLLCTFDRFLKIHASENSFYKELKKNFENIIKQSNTKKKDISGIQSALEKLNKNQFLQKQKSYLNAAIPHQNNVFEAQTILRNQQKFYPEISDEIIDKVTKIISFRIPYYIGPLIKDAPEHDFGWAIRKDMKQPVLPWSIDEVIDRSKSAEQFIQQMTSYCAYLVNEKVLPKHSLTYQLFEVLNELNGIQIRAEYELPNKRFRLSHEEKEWIISNVFKKYKNVTHTILLRELKNSPFKDIVLDNQSDSLKKIFGTQKEDRFGSSLSSHIELSKVFNNVDFQDTKMLEHIIYWITVFEDKDIIRMKIKETYKHISDKQINKLIHLQFVGWGRLSHKLINELQADVENNLTILDIMKKEPVVFMEVLGTEKYQLNERITRLNLKDNTSYTKIKYKDIAELQGSPAIKKGIWQSILVIEDLVEIFGEPEHIMIEFAREEGVKKRTVDRKKQLANLQKAVSKDEAELKAFLKEHSRYETKEYNNPRLYLYITQEGKCLYTGEALNVSRLHDYEVDHILPRNFVKDDSIDNLALVTSTANQAKGGTKMPLELLNESEKIQRKRHWKKLFDNKLISQSKYFKLMKESFSDQDKESFFARQLVETRQIIKHVKDLLNDRFEHTEVHPVNANIVTNLREHSNVVKIRGLNNKHHAIDAALAALVVQFIINKYGHNFLNFNFKYQEAQKKWREMLTKYKKNFFLFSDIDQYDKFTHFSTGELLSGREFLKTLNNEIPWQTTKKIGSAESAFYKETLLSPKSTEGRNPKYKSSKLAKGVHTNVNKIYSFLISFKYINKQNKEIVGSQIVDFNLIEKYQTNNFTKSDLAIYLANKVAKGSVIKARIHKKIHKHQLIISEDHPLYFVSAEEMNIAKQFKVPEDLINKIKQLEKEKKPNIEELRSTFNQVASLAIEEYNFYLSKNKIKALNEYCIKINKKQDFEKGLEELFKMTGANASRSTIFGGRYERKLDLGKALFIHQSITGLRYRKPKSYKHELWST

SEQ ID NO: 4317 - protein, 1355 aa, unidentified
  REGION 1..1355: note = Description of Unknown: Cas Enzyme sequence
VKENYYLGLDIGTNSVGYAVTDGRFNLLKYKGESMWGSHVFEEGKQCSDRRMHRTARRRLDRRQQRVHLTQEIFAKAISEVDERFFVRLKESALFREDTSGRDTYLFFQDENYTDKEYHKDYPTIHHLIKELMENTKPHDVRLVYLAIAWLMAHRGHFLSEVNKDNITELLDFDSIYGNLMELFTTPPWICSDKEEFKNILLLHQTIKNKERKFWGLLYDGKKPKTDEEDYINKEGLIRLLSGGTVEAGKLFNQKEFQEKISISLKKSEEDFQLLLDEMDEVDSEYSEYLIRLRALYDWALLVDSLHGCSSISEAKVQDYIQHEADLKILKSFVRKYCPNEYATIFKNAEKENYASYVYNIPKGKRTKEYKKKITQEEFCDYLKKKLKDVQIDEEDEEIYQDMMFRLETYTFMPKQVTGDNRVIPYQLYYDELKKILENAENYLPFLKKEDEQGISNKTKLLSIFEFRIPYYVGPLCSTSKYAWLKRKSEGKIYPWNFEEKVDLDQSEEAFINRMTNNCSYLPGETVLPQNSLLYCKFTVLNEINNIKINGTSISVECKQEIYRLFEENKKVTVDKIKKYLISNNYMKKEDVLGGIDVTIKSSLKPQHDFKRLLNSGVLNEREAERIIECITYSEEKNRVLRRLEREFPKLLDEDRRYLSKLKYSGFGRLSREFFTGIRAANKETGESFSIIQALWDTNDNLMQLLSDRYTFKDSIEEEQRKYYEEHPMTVESLLEEMYVSNAVKRPIYRTLDVIKDIQSVCKTAPKKIYVEMARGQEEGSSRKKSRKDQILELYKGMDKGEVRELSKQLEDCSERELRSEVLFLYFMQLGRSMYSGKSIDIEKLKTDAYNVDHIYPQCRVKDDSLSNKVLVLSEENGVKGDKYPISAEIRQKMGEMWRVYHEKRLISDEKYHRLTRGSGFSNTEKMEFINRQLVETRQSTKALTRIFQYIFPETEIVFVKAGLVSDFRNEILKCAKSRIVNDLHHAKDAYLNIVAGEVYHARFTAKFFKVDQDEYSVKTKVIFENKVWRGKELVWEGGKDIARVKKILTKNSVHYTRYAFERKGGLFDQQPLRAASGLIERKVGLDTEKYGGYNKSTASYFLLVKYIEAGKKPKQDVMFVPIDLMESERIMDNETYAKDYARNTIAKILGKPRDVVQEVSFLLGMRKMKVNTLLTFDGFEATLASKSNGGKILVFGSMMPLFVDNKKESYIKRLESFAKKKKQNNSLLVDEVYDKITKEENGELFLFLTSKVKEKPYCLIFGSQLQVLHDKEKEFENLNLEQQVDTLLNVLSIFKTGRTTGCDLKALGGAGQAGIFTENSKLSNWKKSYKDVRIVDISAAGLHRKISQNLLELL

SEQ ID NO: 4318 - protein, 1477 aa, unidentified
  REGION 1..1477: note = Description of Unknown: Cas Enzyme sequence
MSHLNRTFVHPISLDLGAKTTGVYAAFYPEQTVLEAETSITKKAFIAEALDPKNKGYQLLQNGRTQKRHALRNNTRKRQAKRLIALIMQKSFGFDSKKHDLALRSLINRRGYSYLDSSLKGDSINEMDESAFYAWLEEVSVIDQHGLLSSLTLENLYEEIRQEIANNVDVLDVFLKAYANVAEKDKKSTRKLKALKDYLEFYKKDLSSGAKSRRVYIENIHHDLLKFSSSPDKHLRKLYHALKAAPTIDGTPFFDVFHSVLCHVNNFDLKLLNRILSKVNESSPADVVESVLAQEISQWIIKKWALSKSNGAKRIEEIKALQSKLKAFCNANPNKIIKFLIDTSAVETIPPYEANTNKRPPECQTLILNHEYLNQQYPCWRSWLKQLANEPTLSKTIEEYSLSLRNVKSGKNNTLIHDNEVESRTLQLIMDLSQESCPFGLNKIWSQIKKANQLARQDEPTTLTTEKLDALLSESSLRNELKAEINHADKKGSFWHFVNKYYQTRRKARAGRLFFRYDRSISSRYKWQRDGQLFIICSHRPKQLKHQSITDIATTLGFKLDELNAALNDKSIDDHFGAFRGLKTLCKKAYDAQKKYGAELKEVARTDKELIKLIEKLDAMTVEMANSFCANDERKARYITRNNSIFTYAQLYNFVWGDRSGFGKTCPICSNDNSFRMTSFKDGSLSSRLNTLSMRLIDGALKRLLTHQAHHIANRLWPDMKTLLETSKSVSVPIIVEKNAFDFTENLDILKGKSRSKDKNNFGLGFESKKERIRNAGNSICPYTGALIENSDGGDVDHIIPRTSSYGVLNDEANLIFSTEIGNRKVKGNRELLLDDLAKNYLEKLFGTSDTLKIKDWIHKEIYDATTGNFNFGQYKQFPLLSASQQKAFRHALFLKKDDKLRQLVISSISHRSKAKVNGTQRYFAQLLSDALCQKAETIGAAHKLSFDYFEVSSNPQDELSTTALRRYLQPLTEGKPYDFSKFEKLKGQSQASYSHIIDASVAFMLALYQHHNEGSVRITLPENTSLWGSVDENGEITLPLIDQLFVHPDNIEDTVEVKPKSLLSKIESLASNDKVTLDSLFSRTLFKENAIGLHFNVIHVDGDVAYKGYTVKNAETGEIEFSPSTGKAIKNTGPLKLANEQGLYRERKLSDNKSIFIPNKDAILTFLFNVSSSVKLDVSLDKKIASIFNWFFKSDGRLYDYTASHDLKAAPKVIKNPRIASFNPLWIQHYNEWLKLHPDTKVDNEQWVIKPEQMKDWDSHCKRVLGIPSSGFKHKKVKNFTMKALTTLSGTPVLAKRKNHDGSDIFQLLVIDTTVLAKDKLGLFVKKSKRLALFSEDVLKNGYSYTLDERPKMSGMKLSISDFFNENVLCEAGLLNNDINITILSGTEVAITGFNSSAFAEHFIMPGLSETSKKWSEMSNLELSDSAKDVATIDKSKLYAALVKKPRSDMPIGVLCGENDSLSLKLRYKKTDVFKV

SEQ ID NO: 4319 - protein, 1062 aa, unidentified
  REGION 1..1062: note = Description of Unknown: Cas Enzyme sequence
VNKVLGLDIGISSVGWGIIDQDTGKIIAAGVRLFEEATRNANEERRGFRGSRRLKRRRTHRLERAKQLFEEFQLPLTGIGKVDPYDARYRAIYENVTREELVAALYHLVKKRGTVLDSPEEESTSGNELSTKKQLAANKKLLEQKYICEIQLERLANRHEKMRNHENRFRTEDYVKEARAILFKQRQTYKEITEEFIGKYISLIEKRREYFEGPGSEKSPTPYGSYYLDKNGKLTYTSMIDKMRGKCTYFPDKPRIAKMSFTADLFNLLSGDLNKLQINGEYLTFDDKKHLVEQFVKKGKNITLAQILKYKGASADADVSGYRKDLKTDKPTFTEFKGFKELLNIIEKNNLPKAILDDVDLLDQIVEVLTAEKSYQRREEQLQSLFSNYDNPVRNRIVDSLKESTKFTGYHALSKKVIELAMDDLWHTNKNQMQIFAEMGLEQKRLSALKKNKNIAFDDEAILSTVAKRAHREAIKIVNAVREQYGELSAIVVETAREKNSDEKRKQYTDFQKQIGKHEKEMAKLLGVKQLSDLRLSSKQHLALKLWESQDGKCIYSGKSISINEIVTNPFLFEIDHILPVSLSFDDSQANKVLCYRSENQNKGQKTPFQYFSSGKASRTFEQFKVEVLNLYKSKRITSKKKDYLLELRDIEHNEELQKEFINRNLVDTQYAMRSFSMNLRSFFKNHEIDTKVLSIRGSFTAALRRRAKLNKDRDEGYVHHAIDALIVAAIGRMPVFEFFKEFNMNEEGVVFNKETGEIIGEDQFFDHQFITFLRDLMNYESKIKFSHKVDRKVNRTMSNQTIYGTREKDGEKYYLGKTSNIYQLDKNGVAPVLKRISKNPESFLIAQHNPELFELILKIIREYSQADNPFKAYYNDHGYIMKDGKVPVKTLRYYDRKLGVHMKITDKYPGANSDVVLLSIKGLRVDIYRNQEGKYKYLGVPYHWFKQEGKNKYVLDMEKYNEEKAKDYKKIDESYEFQLSLYKNDLFSYEKQGETNFRVFRGDAMPRQNKIEVDFVHKRKEEQKEGFLAPSTLSNIVKYNVDVLGNTYKIEKENFKDTLQF

SEQ ID NO: 4320 - protein, 1061 aa, unidentified
  REGION 1..1061: note = Description of Unknown: Cas Enzyme sequence
MKDPRPTVWSFDIGKASLGEAVRVGGNFLHTASWLIPADFARRGPATSPGSPANRYRAWRTRAAHLAREARLRELLSSAGLEVLDTRDPRLTREFPTPLDETCYTSCLLRIQLLRGEPLAGWQMFKALHSAIQRRGYDPTPAWLKRHSERAASTKEDTETAQRLDAYRRCLEQMAPGRPEFHLPCYLDAWRLGLWHPEQPDAYRLRIDHRTEPARNRDGVEAVVAPRDLVEAEVYALLDAASKRFPALDGQAATIMHGPGGQRYASFDPSLRRNLRLREGGIDDWKGVLGQKVPRFDNRIIAKCALIPRMNVCKSSMRLDAEGRPYPDSLLPSEVTFLLKLKNSRVQRADKSITGLTVEELRAIFEDPRRDPTKLSLTEKQWTNRITTFGAVPVPGHEEIKPPREGGRSRFCRPALQILKRLLLSGEAPAIAHARELAALHGNLDPRKGLVPDDLRFIGRMGSTWEALYIPDQQHDALIRIREDRSRDEAIRSLLGSVNDPVVRHRLEAFWQRIQKLEATYGEPAEVVLEFVRDDFLGAVAKRELQKFQNDREKERKESREKARELNATSRAAGLKYELLKQQGFRCLYTGEQLGETQLDQLQIEHIVPRAQGGPDAIVNYVVTTFDTNKTKDNRTPYQWFEASGFAGWDAYVARVNARATQLRNKKIRLLTSPDAPDLVRRYTALAETAWIARLAQTLLALYFGWPIRSEEGDRSITIISGGLTARVRRLYRLNSLLHGPAPADVDPLEWEEQCDKKNRDDDRHHALDALVLSFIPGWMRDPAKESFFRLPEGVTRDNFIREIAKVIPRNLVFAQPALEATIYGRRTVDGHQYAVSRVPLASIAVNVTQAGKRSLKPVDKIDTSTVIDPVIRAQVDEFLFQHPDLTLETWDAWCADLRRGGPHGPRVKKAFRTITLPDVLDEYADLSKDGSGQLRKGKQHRGYFVVEVSKPTKKLPGKRVYQVRPVYAHQSLYRLKQSLRSDASVRIVGYFESGCLIQIDRPVDHAKTPLKPGIYRLNSIWAQGNAVVTDSTSKPSAPLGLGKLIASGFRRIDEPQLPSS

SEQ ID NO: 4321 - protein, 1074 aa, unidentified
  REGION 1..1074: note = Description of Unknown: Cas Enzyme sequence
MGYVLGLDIGTASVGWAVLSSEGGSASGVKHMGVRIFPEALHPKTRTPLNQERRAARLRRRLLRRRRDRLQKLADLLADAGLLPTAKVATDKDSDWARSMNTKNKKNPDPYELRARAAKGEKLTPHELGRALYHLAQRRQFKMRDSAEPDEKDKDSADKDVEKKNKTVKEKQAEAEDKQANAESIATSENLKTQNITFGQYLHNQVPEKDRRRTTRALRRNVEYEFETIWQQQGKHHASVLTDELKQQIHGAIFFQRPVFWRKSTLGECPFFSKEPVCRRGSWLSQQKRMLEKVNNLRLVGGNQRELDKGERRKLADHLQTRTHMSWLQVRKLLDLETTDKFNLEEGGEKSLLGHKLENKLAKCLGDDWANHPHKQAIRDGVPHAIWEADYGEKGQRVVIRNEKERAAVREKLRQEFVDKYGITAEQAEALSKLKFEQKWEPYSEKALKAFLPKLEAGERFGDLMAGADWEKWRRETFEGYEQPTGEVWDRLPSPANKEEQERLKKIRNPAVVRAQNELRKVVNNLIAVHGKPERIRVEMTRDVGKSKDARIEIQKAISEQTKKRAAARADLVAHGFAEPSRDDIEKWLLWDECAHRCPYTGAHIGFDALFRRHEFEVEHIWPRSRSLDDSYANKTLCETAENKKKGNRMPYEYLKDTPQWEEVKARLRKLQDEKRMRRGKVKRFQAKEMPENFANRQLTDTGYAAREIKEWLKRLWPDLGSTAPVNVEVVSGQMTARLRGLWGLNGLLSEGEQKARDNHKHHALDALVVACIDKSLEQKLSRHYKLKEEGGAEKFPPPWRGIREDAAKALANIVVSHKVRKKVSGALHKDTLYGDTKHAEGKYHFYVRRKPIADMTPKEVKDIRDGVVQAEVTQWKADAKSVAAANQGKPKDERQEPPSFPRVGKTDASREIRKARYTIKKQGKFMRPVSARGKTLGYVEQGANHHVAIFRKPDGTPDGKIVYDVVSLFEAAQRLRNGKKIVEDTHSEHKDAEFVMSLSLGDALQFPPESERPGIKIVKSIKENGQIGLRDHDDAIQEKKEGSLWQPTVSSIIKAGVKKIAIDPIGRIRKAGG

SEQ ID NO: 4322 - protein, 1397 aa, unidentified
  REGION 1..1397: note = Description of Unknown: Cas Enzyme sequence
MEKRRYFLGLDIGTNSVGWAVVDPTYKLCKFRGKSLWGIRLFDAAQTAADRRLARSARRRLERRKMRIDWLQELFAEEISKKDPTFFIKLNNSRLHLEDKAEEIANIKYPLFADKDYTDIDYYKEFPTIFHLRKELIKNSKSSYDVRLVYLAIHNLIKHRGHFLFDGEISTENINESISDKIRNILKKIKSNFEIDNINEESSTVGDEIPEIYLIEDTHIENTLKTILKSSKSATEKSEELRKCFIDRQNKRDNAIVAELCKLMVGLKGDFSKIFNKDSVEVKENIKNPKISFNAEYDEEIKDLIQTYYPEELDVLNEIQAIYILRGEQFISDAKIKEYNEHHDRVRTLKQLFKKYIGVKECNKFFNSDEEGINYSHYVGKLNTCGNKTALKKTVKAEDLDKEIKKKLKGILENTEHIDEIDELIINNLIKETSDLLPIQRTTKMGGVPRQINEVELRAILENAEQYLPFLSECDENGISVKDKIISIFEYRIPYYVGPLGGHSKKQKEFAWMIRKEEGRIYPWNIEEKVDYIKTGEEFIKRMINKCTYLYGKDVIPKHSLLYQEFMVLNLINNIRLYDSRERISVEEKKTLFEEIFMNKTRVTFKDIYSYFQLKDKDLNQTDIHGIDSGDGHIVMFPTLSTYLDFKKQVFGDDIKKESIRNIIEEIVTDITIFGADKKRLKAVVGYKYKNKLTSEQYEKLKNNITKFNYKDWGTLSREFLNGVTGCKKGGDSETTIITALRENNLNLQELLSDSYTFSEHIEKANKGAGKDLSETFFEDYPISPANKRAVRQAALIYKEILKVMGNPPEKIFLEMARGGEANKTRTSSRKKKVEDIFEKWGNDEDIKKLKEDLENICSKDPRRLDSEKIYLYFKQKGRCMYSGEPIDLEKLSNTEYYDIDHIYPQSKTKDDSLDNKVLVKAELNRSKEDKPISRNIQNKMIEFWKELEKRGAITKEKLARLTKKEFSNEDLQGFLNRQLVDTRQVTKAVSKYFEFISNSKVIYVKASLVSDFRHEEIQCYKSRRINDFHHGKDAYLNVVVGNVYNAKYTDNPRNWYSQKRAEGVVAEKVHSLKNLFKRDVKRYVDGELVWEGYNADEKLKNTGSIVTVKRIMNQDDLFYTEYTYCSKGQLFDMNPLSKEETTKIRIKKDLDNKKYGGYGAPGTAFFVLVEYGDNARKYITGIPIYVKNLLKTDPNAIVKYLEEVRDLKNIKKICTIKKNSLIMVDNFPMRIRGENDLKLLLNPSKQLKIKDQEEFEILRKVEKFIEKLTKNKSATINEKYDCLNDTKLDSTYMFLTNKLQEEYIKRPTIEKIVEILKYGEAKFKQESIEDKAKILNEILKLFDRKTNFANLLKIGGSGQSGVCTLNKNTVGKKLLEDKIVIVNQSVTGIFEDRIKL

SEQ ID NO: 4323 - protein, 1397 aa, unidentified
  REGION 1..1397: note = Description of Unknown: Cas Enzyme sequence
MENTRYFLGLDIGTNSVGWAVVDPKYNLCKFRGKSLWGIRLFDSAQTAADRRVARSARRRLERRKIRIDWLQELFAEEISKKDPTFFIKLNNSRLHLEDKDERISNIKYPLFAEKDYTDIDYYKEYPTIFHLRKELIENNKSPYDVRLLYLAIHNLIKHRGHFLFDGEISTENINESISDKIRNILKKIKLNFEVENINEGSIVLGDEIPEIYLIEDANIENILKIILKSSKSATEKSEELRKCFAECKNKRDTAIVSELCKLMVGLKGDFSKIFNKDNEEVKGNINNPKISFNSEYDETVKDAIQTYYPEELDVLNEIQAIYILRGEQYISDAKIKEYNEHHDRVRIIKQLFKKYLGVKECNKFFNSTEEKINYSNYVGNLNTCGTKTALRKTVKAEDIDREIKKKLKGILEDTELIDEVDEAKIKSLMEETSELLPMQRTTKMGGVPRQINEVELRAILENAKQYLPFLSERDEKGISVKDKIISIFEYRIPYYVGPLGGHSKKQKEFAWMIRKEEGRIYPWNIEEKVDYTKTGEEFIKRMINKCTYLYGKDVIPKHSLLYQEFMVLNLINNIRLYDSRERISVEEKKALFEEIFMNKTRVTFKDIYSYFKLKDKDLNPTDIHGIDSGDGHIVMFPTLSTYLDFKKQVFGDDIKKESIRNIIEEIVTDITIFGADKKRLKTVVEYKYKNKLTSEQYEKLKNNITKFNYKDWGTLSREFLNGVTGCKKGGDSETTIITALRENNLNLQELLSDSYTFSEQIEKVNKGAGKDLSETFFEDYPISPANKRAVRQAALIYKEILKVMGNPPEKIFLEMARSGEINKTRTSSRKKKIEDLLDKWGNDEDIKKLRDELENIDNKDSRRLDSEKIYLYFIQKGRCMYSGEPIDLEKLSNTEYYDVDHIYPQSKIKDDSLDNKVLVKAELNRSKEDKTISRNIQNKMFGFWKELEQRGAITKEKLARLTKKEFSNEDLQGFLNRQLVDTRQVTKAVSKYFESISNSKVIYVKASLVSDFRHEEIQCYKSRRINDFHHGKDAYLNVVVGNVYNAKYTDNPRNWYSQKRAEGVVSEKGHSLNNLFKRDVKRYVDGELVWERYNADEKLKNTGSIVTVKRIMNQDDLFYTEYAYCSKGQLFDMNPMNKDETTKIRIKKDLDNKKYGGYGAPGTAFFVFVEYGDDARKYITGIPIYVKNLLKTDPNAVLKYLEEVRKLKEIKKIRIIKKNSLIMVDNFPMRIRGENDSQLMVNPSKQLKIKDQEVFEILRKVEKFIEKLTKNKSATIDEKYDCLNNNKLDSAYIFLTNKLQEEYIKRPTIEKLVKILKDGEAKFKQERIEDKAKILSEILKLFDRKTNFADLLRIGGSGKSGVCILNKNTVGKKLQKGQIVLVNQSVTGIFEDRIKL

SEQ ID NO: 4324 - protein, 1302 aa, unidentified
  REGION 1..1302: note = Description of Unknown: Cas Enzyme sequence
MTKILGLDLGTNSIGWAIVETENNKNFELLDKGVHIFQEGVKIDKGIEGSKAEERTKYRSARRLKFRRRLRKINTLRILIDNDFCPKLTEKELHDWRFKKKYPENEDFRKWLLSKEEANKNPYYYRNLAVTEKLDLSVLENRHILGRAFYHLAQRRGFLSNRLEGTKESDGAVKKSIVELTEKKGNRTLGQYFYEKYTEGEKIRNHYTHREDHYLEEFNKICDIQEIENTIRNAIQKAIFHQRPLKSQKGLIGKCPFEKNKQRCSTSHPLFEEYRMLCFINNIKIKTPNDNQLRPLSDQEKEKIIPLFFRKSRNKEHFDFEDIAKKLAPKNQYKFYKSSQKYPEDYLFNYSMKTTISACPVSARFASIFGENWKELKIKHTRKSDGKESFLDIYDVWHVLFTFDNDDKLTLFAGNKLGLEDEKQKEFADIKLKHEYGSLSLKAIKKVLPYLREGLIYSHAIFLANMEEVISKEIWADNDNKNLIQSEVFKIIQTQNQEKRVVDAINGLIKKCRENNWHWSEKAKPQFKQDIEKNIIHEFGKDRWDKIDEEKQKQIINDACHHFEIQIQKNNGKGEFSRVATIEERVKGFLRDNFDIIDGRLGKLYHPSAIEVFKTPRRSEDGRKYLGSPMVSSVRNPMAMRALHQLRKLINELIKQDLVDENTKINVEMARDLNNANERKALQNWQRNREKLHQEYAARIQEHFDSAGIKRKPSEDDILKYQLWEEQEHRCIYTGDNIGIADFLGNSPSFDIEHTIPRSLSFDNSQQNKTLCQNKFNRHIKRNKIPTELANHNEILARIEKWKEKYNEVDKLIQIQVRKSSTATTKETKDSAIQRRHQLSLERNYWKNKYECFAMKGVPAGFKNSQIVDTGIITKYSRLYLKTLFDKVYTVKGNTVADFRKIWGLQEEYVKKERNNHIHHCIDAITIACMTKDNYEALAGFYHDWEENYVPGKENKPKVDKPWTTFTEDVKEIEKEVLVSHYTPDNLPKQSKKKLRKRGVIQKNKEGKIIYQKGDTVRGSLHKETFYGAIKKKVINKDGEKEEKVLYVVRKPIDSLSAGDIKNIVDNTVRDKVQSAIDQKGLKQALNEPIWMNEEKKIPIQKVRCYTPTVTNPIHLKDHRDLSKHEYKQSYHVTNDGNYLMAIYEGLDNKGKIKRDFEIVNNLCAGKFFKQSTRNRLEAHGINNLDGLIPDSKEAKNTLLPRKYIIKTGTMVLLWEEIPDEIWDLDISQRNVRLYKIVKFDKSGRIYFRPHNEARPASELKEVYNLNADIHCEQLRLSVNNFNALVEGFDFKINILGQIEKI

SEQ ID NO: 4325 - protein, 1123 aa, unidentified
  REGION 1..1123: note = Description of Unknown: Cas Enzyme sequence
MRQEYKLSLDLGTNSIGWCVFDLKKDPDDSTKNLIPCAIRKMGVRLFSEPRNPKNKTTLAAARRAKRLARRNLQRFKQRKNKLINLLVKHRLMPDNETDRLKLKEKNPYLLRHKAIREQLSLFEIGRAIYNLNIRRGFKSNRKELLKEDSEKSKLKQHIKHLESLLKENNYDTIGDFLYARQDAGLKIKCWSPNDEKKASTSDKEALKDEFFISRELVKKELELIWETQRKYHPEILTDNAFSEISDCILSQRPLKSCKELIGTCSYERNLESAQLKRAPRALVSHELLSLFQRLGNLKYLDKNDSSLSQKALTIDQIFKVYNYAWSNPSSKLEFSKIREICNFDSSISFNYEKAELKKQNNSKKTKTKTEASSLEFVANLAAIKELGIFSNLIKVKDFKTLDEIIYKLVSEADDEEVFNHIESKVDKELSEKEKESLMDEGLAKCAEKLKSDYASMCEIAINKFLGEYLSLLIVGCFDSLPKFNDLENKLYPDRAKQDGFRDELPFYGDLPLNCLTPMPSFKNNVRKLEIEKRITNPTVHVALNQLRLIVNSLIKKYGKPAQISLELARDLKNSKKEKERIATSQEHNKDIKDEFKEFASQYRGNINSHDDLVKFKLWKEMKVTGDRLCVYSDKKISCTNLFSNEIQIEHIKPFSKSLDDSLSNKVLAHWSANQDKKNKTPYQAFSNSEKYSWEEIKDRSYDLFYAVNRKKYFNLISEEEPKVEDFLARQLTDTQYISRVARKYLSCLIEEKNIFVNNGRVTKIIRDDALGLSSLLNPDSNTKDRRDHRHHALDAFVVGIIDSAMVNRIHRASARNENIKSLVSSLKAIEGDNSRLLEDLETHLMKIQISVKPDHSIDGEIHKESIYGLKPLIDFEKKYKTNPFKEPLDSESYFFGVERVKLDDLKDFTHVVNPYLREQLKKCFEEKANASEAINYFKESVSSKTKKIKVFTELNPAKYIVRKNESGEVFQGFKSGNNAFAIIYKNLKNKYEISIVSTFDAYQARKIARVYKSCKEHLPKYIDVLVNNNRPSLDSELQYVLFQGDIIQIDNPDKTSKFKKVNLLVKSFRADENNVIVANELLPVELQSNLEGFDKKKGERRANMRFFNDHQPIKLKLSPIGA

SEQ ID NO: 4326 - protein, 1360 aa, unidentified
  REGION 1..1360: note = Description of Unknown: Cas Enzyme sequence
  MOD_RES 652..660: note = Any amino acid
MKYYIGLDMGTSSLGWAVTDDKYRLLRKKGKDMWGVRLFDEADTAAARRTNRVAKRRRNREKARIGYLKELFATEIEKIDSGFYQRLDDSKFWKEDKTVQQKFALFADTGYTDVDYYKEYPTIFHLRKKLLESTEPQDVRLVYLAILNIYKHRGHFLNANLDENGNDDFADIYANFVKMAKDVVDIDFSQDISDNWLRETLSSSELSKTGKHSAIIEHYGIKKSAEKKKVEMLKLICGLKGVLSKIFEDTEWEDEDKKFSISYRDSNYDETSQKAEELLSESAYELFCTMKQMHDWSLLANIMKGKDGEYKYLSLARVAAYEKHQKDLKILKKLYKDNDLKKYNEMFRIMNQSNYSGYIGSVNSDKDKRRRGAQCSRDDLFKKIKEDIKDFAETAEKNYVLEEIGKENFLPKQLTASNGVIPNQIHKKELKKILENAENYLPFLKEKDESNLTVSERIVKMFEFQIPYYIGPISPIVNGDMKYSKNVWSVRKEAGKVYPWNFEQKIDTEESAQRFISRMVKHCTYIGGEEVLPKNSLLYEKFMVLNELNNLRINGERISVKLKQDIYEYLLKKEKKVTKSKLIEFLQTHGEVEPQDTPEISGIDDGFTNKRANYCKFCRLFGVDTLTYEQEKIAEQIIFWLTVYGDTKKFVXXXXXXXXXGDVLSDKQIAQAAGYKFKDWGRLSKELLQVEGIDKSTGEESTVIQKMWSDNYNLMELIESDNFTYKQNIEEKSKVIDKTLSEIVYEDLDELYISAPVRRMTWQTILVLKEITEVMGEAPARVFVEMARDPNAEKKRTESRKNKFLALYKNCKEEERELYNQINKRDEADFRSKKLYLYYTQKGRCMYSGERIDLDDLFNDNLYDIDHIYPRHFVKDDSIDNNLVLVKKEINAHKSDGYPLADGIQKKCRVFWNELKSGGFITAEKYERLTRTFEFTEDERVSFINRQLVETRQGTKAITDLFKKTFPQADIVYVKAPNVSAFRQKYKLLKCRNVNDFHHAQDAYLNIVVGNVYHVKFTKNPYNFIREYKKAPEKNPYHMDKIFNYPVVRNDEVAWQTKNDESITMVKSMMKKNTPLVTRRNFEVHGALADQTIYGAKVAEKASGVGYVGVKTSDERLSDTLKYGGFRKMTGAYFCLVEHTQKKKRIRTIEAVPLYLKHQLDTKEKLEQYFVESYGYENPNVRIEKIKMYSLIKVNGFYMYLTGRSGNRLSVCNAVQMVLLQEWMLYVKEITKAIGAEFTDEYIEKKGTISKTKNRQLYDLLCEKHLNCIYKLRPNPVGENLIKGKEKFDKLSILEQIYVLLQILQLSQLINQGANLELIGFSKNTGKTLTSKIISNCNEIKLINQSITGLYENEVDLLTI

SEQ ID NO: 4327 - protein, 1525 aa, unidentified
  REGION 1..1525: note = Description of Unknown: Cas Enzyme sequence
MTKILGLDLGTNSIGWAVVDKENNKIDNCGVRIFPEGVVNMNEGEEREKSKNALRRENRQTRRQVARRRMRKIKLLELLIEQGMCPLTNEQLMIWKHWDKNKKSEGRHFPHTKEFIEWLRLNPYELRYKGINGELTKMEFGRFLYHIIQRRGFLSTRKEKETGKIYAGKENMVGIDDTKTELNGNTLGEYLYTIYPEENESYKNIQNEEGEDVRIRGRYTLRDMYVEEFEKIWQNQASRLGLDKVSVIKQKVVFLNGSKDRNRNAKKIKYLKNNRDKIEVQEIIVEREKANKTLTRVTSYENIPLHDHLGGNIEISDDKIKFDNKDSVLFYQRPLRSQKSLLGKCRYEKNKTPVSVSHPDYELFRAWQYVNTIKFGNNIPLPIEQKSAIVEFLRTKKTSVKFADIVKLLNMSHENFNYNYDDKVEGCPSIAQLSKLFSNEGWENNYHNIWHDFYFFDDSEKLFKKLANTKEYKMKNVIKIDDIKKVSIKDDKYASLSLKAVRNILPFLQRGLMYNQAVFLGGVMNAFNYKALSDEIARWDRFADYHDTIIKDILSIIKERNKEGEAIQKVKEYLSDPANHYGFEKESPAFKKLYHHSQEIEEKEMSDKLSEIENLRNPIVQRAIQEMRRMINELIEKYGKFDRIAVEMGREMKLSKKGRQNVSRMIHQNFEANENVREILKDYQLAPSRQNIQKVLLFNEIQEKAGKVVCPYSGRTLNISDLLGSENKVQIEHIIPRSFSQDDSFTNKTICDAKFNQLKGNLTPYQFYQQNNNKTLWGAATWEEVEQRAYSVLPFNKAKRFTTRKTEWKTEEFISRQLNDDRYISKKTKEILSEVCNEILVMPGAVTADLRRLWGLNNILQPTIGLPDDEFNIDREKDINYWAVTDENRKIKKLYPMNNLRPDAAAEETVVAGYVTKNKFKAQRLNLEFDAPDISDGKYYVKFHVSKPVKTLRQYVDKPEYGENEIILRGVINRNKFNHDSLKRKIDAPKNIDDGSYWAKFKIVDKRFEEPEKNKRPENKNGICLFGKVKDNVFTSYIYQCETNLEDGHYWVLLDLDFEHVEFVATKNEKPDIENNQLLVLGDLNQEGTFTALHDIQLQFDWNDKPGRYWAVLNILPDIPEFTAVENEPPEIEDDEKLIEGKIWVDHKTGEIRFDPKKNRDDHRHHAVDAITIALTDYNNINQLNWYNAQKDKLEKGIPTERPSFDEPWENFFSDAREAAGKILVSHHKDNTVTKKVTMIIEKNGKKFRSEGQAVRGQLHKETVYGKRTPPRAEQAFHVRKPIESLNDKQLDKIVDDNVRSIVKYGREREKFIKEQIKALQKDRTKAGDEEEKKIDQQIKSLEEENRQLYTLPNKNGDRVPIKKVRIRENLGNTEMLKPSENINQYVNPRNNHHVMIYKDSDGQLKESIVTLWEAAERKNQGNSVYQLPPDGLEVVSTLAVNDMFLLGLETEQNKDIKKLDYQILSKHLYRVQKLSSMYYTFRHHLASTVTNSDEEFSIRSFGTWEKVNPIRVKVNQIGEVIRSL

SEQ ID NO: 4328 - protein, 1040 aa, unidentified
  REGION 1..1040: note = Description of Unknown: Cas Enzyme sequence
LSVTLGLDLGSASIGWSLVDKENQKIIDSGVRIYDSGFEGETPKSIHSERGKQIRARRNKTRQDRRVAKVANLLKSENLLPSDRKEREKIEVTGSQWFIHPIQARADAVSCPVDRYVFGRAVLHLAKHRGFRANTKFASEVKIDDESLVESNSDSEEEKEQKRLMKSINTTESVMDGRTPGEYLNDRRKSHQSVVAKPLISKSKIVGYDFMFSRSMILDEFNRMVDMNKSSLGLSDEFIDELRSAVFFQRPLKPANRGKCAVLFDQVDEDGNKFVRSSKWLPSTEMFNLLETINSLRVVDGAGSGQEDVLTMEQRNALVKLAINRKHKGKLTYENMLKVIQGDFSSPITFSVMKSSVKNISVPVVIPFLGGIPDEELSSPDALIGRLKYLDEAAEVINAAEDADDVVVGLSALGFDSDGIKDALKARLVTDVSHLSSRAIYDIMPYLVVDVVPFVTAKNLAYPELNKKRLSDGKYKRLPYYGEVLPEYVVPVARLNDNEVVENNSLLYGRIGNPNVHLGLNQLRIVVNEILDRYGNKYPIELSVVETGREYGISAKTQKARKKEREENTEKRGQLKEDLLKEGVKDTASNQEKLKLWREMTPDANGVRICVYCGGDITWNDVFGEHPAVNKDHIIPFSRCVDDSFKNKVLVHGKCNGEKNDFTPFEKWGGESAKWKAIRKNAAAMFGGESAKYHLIVSRKPAESDGFAPRQLNDVAYLSKVAIQYLSSVFPNVVGFPSMVTDKVRTVLDLDSILSREFVEFITEEEEKGKTKKQIHHIKYKKNRKDRRHHAVDAIAIAVGVGQERKYLKWDKKHLVDGDIPWKGFRNDVMRRMSKLHVSVKPEHSVSGKLMLETNQKLAGGIRKAFNALSPVDQARARAGETIKNQKYANGKNRGVVFIFDDSGNPIRAVEPHNNLYIEFYKSKNGKTRSNVVSLFRANQKDYKAFMNSNRFSTQTFEGYPLVNRFYKDDLVMFAPGVKNQNKKLNESDVYRVNKFSDGAIHVMPAKVEPEKGDAGIKCHGAKDYFRKVVVSPTGFLKRY

SEQ ID NO: 4329 - protein, 1376 aa, unidentified
  REGION 1..1376: note = Description of Unknown: Cas Enzyme sequence
MDNYYIGLDLGSDSVGWAATDENYNLLKLNRKSAFGARIFSAANGCVERRSFRSSRRRMARRKYRIHLLNELLCEEISKTDDTFFLRLSNSMYKLEDKKHLGKSLLFKSIDEEKQFNKLYPTIWHLRQKLIYDDEIAFSNIKNVYFALHHIIKYRGNFISENDISSKGFNYERLNDLNNVLKSSLENEDDEPIFDGDIIYGTSENWSKIESILSNKELNAKNKQKQLKELFNYKNKNDLIDLFIIIVTGGKKKFNDIDICFNDSFDDKEDEIQASLGEQYDVVLIAKEMFDYIYVKKLMGEHKYLSDSMVDLYDKHARDLKLLKSLIKKLDLKLQLTDKKSNYYAIFKKNKIDEDNKKQQNNEEDKNSNKNKKGLNNYPSYVGHNSCETKCNIEDFNDTIKKLIIDNKQALEEIDLDTTKYILEQVENKTFLKTIASYTTSAIPHQLHENELKVILKNAKSRYPTIFANDLNEKIIKLFLFRVPYYYGPLNSESPYSNLEKKDKYAKVYPWNVNEIIDDNKTRQKFMAKLTNKCQYLEECNVLPKSSLLYEEYMILDRLNTMIVNGERLNHELKDKLYKEIISKKKTTLANIQKLLSKVYNFNENEVIISGVNLDVAFEAVTHYTLSKEFDLPKDYKMLEELINYSTIFADDKKELERFIRSNYSFLSDAQIKCIKSLGTKKWASFSRELLDGITVADELGEVNTIIGFMRNQSKNFQEVLNGYGFNKVIDIKNREFRGDKTKSKIIKEKLDAVPAIFRRTINQTLLILDDIVSVAKKEPSKIFVEVTREDLKNKDKIESKKRRKELEEFLKSIKNDKEYYYKQAHELLEELNDERISDLRLKGKHLYLYFKQLGLDLYSGEKINIEDVLNSDKYDIDHIVPQKLIKDDSLDNMVLVNREANQKIKKDTYPLPLSIRNEKTKSIWKYLVEKKAITQKKYDNLVRDTEITDSELSQFINRQINNINASNKVVKDIINIKYPNTDVIFSKAQYPSFIRKEYRIVKVRELNDAHHAVDAYLNIVSGNILYTTFSNMSMIMVRKKINDISQDDNKEKTDNMESVIKYNFKKNNLLDRVKKTCFRKDALITYKCDFVNSGFYDMTIYKAENNLIPIHTKKDNPMNDVTKYGGYSSAKSSKLALIEYTKGKKVVRKINAVKPIYEKMYSNDEDKFLKIIANDDKAQNIKLLRYIPINQKIIYDGGYYLLLNNNETRNKLKLIYQNYIDNDLLYYFTKAKKLIDIEDNEAHPEQLEQKIITSRNGKPFVISKEKNLEVMKALYNNAFNKVYDSSRTILDLRNDVILDIFESQTLSKQLEIILDSMIFMSRNYNSSELYNTKKYKCFEKLIKTNTNLVSKNISNNKIYLIHDSPSGLYSYKEKI

SEQ ID NO: 4330 - protein, 1371 aa, unidentified
  REGION 1..1371: note = Description of Unknown: Cas Enzyme sequence
MKKDFYIGLDLGTDSLGWAATDTDYNFLRLKGKTAWGSRIFEGAKSKKERRVYRSSRRRKERQKYRIQLLNSLFAEEINKVDKTFFLRLENANLRMEDKDKSIDSKYLFKSIEEEKLFYDKYPTIWHLRRDLINGDPFALSDLRYVYLAIHHIIKYRGNFLKEGETNYNNVTEEVIERINNCLSLLAENIEDESSSLSKAKLTELKNILLDKNLNKTAKQKKIIELFDVVSCKEYITMFATIVTGGNYKLSKIDKALEESINFTENFEEMEDQIAHDLGDAFELVKCAKELYDFASLKELMGNEKYISFVMANIYEEHKEDLATLKKFIKAFDKSKSLSGKDSLYDLIFINEGNNNYDALKKVITEIDESNGLSGKDSLHDLLFKKEEKNNYVALVGVNSKNKKIKLEDFNKVIEKILENNKEIIEPSNYKKLDEKVKARQLLRTIAHNSTSLIPHQVHLIELKEILKNAEKKYHFIKNISEKIITLFKFRVPYYYGPLDSRSEFAWVERKSNEKITPWNISEIVDDNATKEKFIKRLTNNCTYLLGEKVLPKVSLIFEEFMIRDRLNTMILNGALLTNETKSLIYEYIISRNKTTVSQIKSFLKNKTATKENDITISGIKEDVPFEATSHATLEKLFDLKHDFDKVEHLIFLATIYADDKKSFKTLLTNSKDLSKEQIKAMLNLPTKKWAPLSKKLLCGISFVDDNGIAMSILDVMRETNQNFQMVYNNKDYGFKDLVDMHNNEITGNLSINQKIAMILEDTPTITKRSINQALLVLDDIVKASGNNPKKIFIETTRENDANSKGKEKDKRYVELKRLISKDIEIISKENKKELLNELELNQANVKGRHLYLYFKQMGLDMYTGEKINIEDVFDSTKYDLDHIVPQSLIKDDSLDNLVLVNRLANQRIKGSQYPLPRELKTDKVIKTWQYLHKIGAISDKKYNSLMRTSEITLEEIEVFVNRQINVVDYANITLRNVLKIKYPDTQLIFSKAQYPALLRQELNIAKNRDLNDAHHAVDAYLNVVAGNELTMKFSNVRRIYAERSNKEDKDSRSFNMDGCLKNFVKKLDKNCVTYAEKIKKNALRHDALVTFKVDYQNGALYNATIYRKANDSNLIPIHTNGPLADVSKYGGYSDLSQAYIVAIEYNLGSKHYKDLLRVPLLYIKLYGDNNETLWKKVIGNDVASDIKIIKRIHLNQKIKYKNCIYLLYTADGKRNKYKLAYQSYLNNDLLCYFNKCDSLLDSLSSFDGDIFETKVNKNGDSFVVSKSKNIEIFNSIREIYDNYVFDGCNFIVKARNMDDNLFSNLTLYEQIVTIENMILILNRKSERAKFDYRLGNAKANVFYVTHNIIDQDITLIFESPSGLYKHEEKI

SEQ ID NO: 4331 - protein, 1372 aa, unidentified
  REGION 1..1372: note = Description of Unknown: Cas Enzyme sequence
MNSDKREDYYVGLDMGTGSLGGAVTDTQYHLLKVKGKDFWFVREYESAKSQLDRRTHRIAKRRLQRHKARIGLIRSYFAEDVLKRDPLFYIRQDNSKYYQEDKDVRLTTKDSIFADPGYGDKEYHDDKEYPTIFHLRQALLRDQIKDEERYSRFLYLAIINMFEHRGHFLLNTESSDLNADMIKDVGELVMNAICGVSEYGSVTYKEIIEILEDKNISRTAKKDQIASKIDIKKSEKAQMERIKCLCGMEADARVMFEIEADEKIKIAFQQAAFEDEKEEIEVAIGEDHYLIIENMKQLYDYSQLQSVLNGFDYLSDARVQMYEKHKEDLHLLKKVYRKNLDREMYDRMFRSGEEGSYCAYSNSTNSVDSLAGAKKYRRNMKKRSQKDLYDRIKKDLKEVHDADADAIRKEMELECFLPKQITGANGIIPNQVHRKELKKILENAEHHLDFLKEKDESGYTVSERILMLFSSNIPYYVGPVGSGSKTGWAKIQESGQVLPWNMEQKIDIEQTSECFITNLIRECTYLSGEKVLPKQSLLYESYCVLNEINNLSIHGKRIVPELKQDIYREVFQGSRLGKKVTKKNICAYLINRGLITEESEVSGIDKEINAYLSSYGKMYGVFGERLREEAVQEIAEKTIYYGTIYGDAKSMFRKKLNQYVSDGWMTESQAKRISGYKFKNWARLSRSMLCLSGCDKSTGEKISLIRAMWEYNLNFMELIYSEDFTFQKELEERRKALGKTLQEFQFEDLNEYYYSAPVKRMIWQAVQVLKEITQIMGHNPKRIFIEMTRTEEEKGEQGRKNSREKRLLKLYESVRDERNWAAEIKNANASGELNSKKMYLYYLQMGRDVYTGEPIDIEDLFDDSRYDIDHIYPRSLTNDNNIENNLVLVSKTINQNEKKNDYPVPEKVRTNIKVRDLWYKLHKKGFMNDEKYNRLTSTERLSEDQLAGFIARQLVETAQGAKGIAELMKAMLPGTDIVYAKARNVSDFRKEYKMQKSRLVNDYHHAQDAYLNIIVGNVYFMKFTRNPMNFVKKEARRDGRNYDYNLYKMYSKDIIRNGEKAWIATSEQGPGTIRLVKETMERNTPIITRQAFEQRGELFNLQPVGKYSAKKDNYVPLKINDEKMQDVSKYGGYTSLNPSYFIFIEHGPEKKRKKCFEVIHSYYAAQIKTEKDLIDFLLQKGYKNPRVINARIKKNALIKYNGYFLYIIGMDARKNIEFSNATAMCLKNKYIQYVCKLEKMNKAILLSEKQKKILHWDERITCESNLELYRELTEKHLHSIYQRHPRSIGKCLADGEGAFKLLDIEEQVKLICDIVQYTSFQRGLFSLQVLGGPKEVGRIRISGDMTEAKECKLVNYSITGMYKTEMDLLKK

SEQ ID NO: 4332 - protein, 1346 aa, unidentified
  REGION 1..1346: note = Description of Unknown: Cas Enzyme sequence
MEKDYYLGLDLGTGSVGWAVTNANYEVLRAHGKALWGVRLFDTANTAEERRIFRTSRRRLDRRNRRIELLQELFSEEINQIDAGFYLRMKESKYMPEDKRDSNGECPQLPYALFIDKDFNDKDYHKQFPTIYHLRYWLMTTEETPDIRLVYLALHHMMKHRGHFLLSGDIESVREFKNTFSQFIQCLQDEELDFNLEISDDKYVMIENLLKNHTMTKSAKKTQLIKLLGAHTPCEKAVLNMISGGTVKLSDLFTDAEYDNLERSKLSFSESTYDDYSGTLESDLEEHFIVIEKAKMVYDWSVLVDILGDYQSISEAKIAIYEKHKKDLEYLKKLVKEKFDAKRYRDIFVITDEKTANYCAYIGMTKKNGKKIALEGKQCSKSDFYQYLRKNVLNELGDDADAQYLKNELDKETFLPKQVTKDNSVIPYQVHLYELNQILDNLSPRLPILQKTGEKIRQIFTFRIPYYVGPLNGITQNGQRTNWAVRKNTENGKAEKIYPWNFDEVIDIEASAEQFIRRMTNKCTYLIHEDVLPKYSLLYSKYVVLNELNNLRLDGEPIDVALKQEIYNNVFEKYRKVTQKKLKDYLVREGHLSREKAAKLDITGIDGDFKGSLTAYHDFKEKLTGCNLSQTDKENIILNITLFGEDKKLLKQRLSALYPQFTDKQKAALCSLQYSGWGRLSKTFLEGIAAPAPETGEAWTIIRTMWETNDNLMQVLSEKYQFAEAIEAENGKNEIQGISYELVEQLYVSPSVKRQIWQTLQIVKELCKVMEKPPKRIFVEMAREKAESKRTESRKKVLIDLYKKCKDEERTWIEELSNTQDTRFRSDKLYLYYTQKGRCMYSGEPIELENLWDNNQYDIDHIYPQSKVMDDSLDNRVLVKKTYNAEKTDVYPIRADIREKMKAFWKSLLAGGFISKEKYNRLIRSNEFEPSELAGFIQRQLVETRQSTKAVASILKQILPDTEIVYVKAKIVSNFRQDFQLPKVREMNDLHHAKDAYLNVVVGNAYYTKFTKDAVWFIRHNPGRTYNLKRMFTSCDIERNGETAWKAGENGTICIVKKTMNKNNILVTRRSYEVKGGLFDQQLMKKGKGQVPIKGNDERLKIEKYGGYNKATGTYFMLVESEDKKGNKIRTIEFVPLYLSSEIEANDSYAVRYLMQDRELRNPKILLPKIKIDSLFKVDGFYMWLSGRTGNQLIFKGANQLILSAKDAGVLKKVLKFVSRQKENKNLKLVAFDELDTADLIGLYDTFLDKIQNTVYGIRLKAQESTLIEKREEFCDLTDEDKCIVLSEILHMFQCQSGAADLKLIHGPGHAGVLVLNNNITKCKQISIINQSPTGIYEQEIDLMKL

SEQ ID NO: 4333 - protein, 1339 aa, unidentified
  REGION 1..1339: note = Description of Unknown: Cas Enzyme sequence
MKKFGDYYLGLDLGTSSIGWAVTDEKYNILRFNKKFMWGTHLFDTGNTAAERRIFRTSRRRLKRKKNRIELLQTLFSEEISKKDFGFFQRLKESQYDIEDKTVKNKNTLFMDENYTDQDYHTEYPTIYHLRKALIDNEENTFEIRKLYLAISHILSHRGHFLFEGELSDNFEFDDIFNEFIKYSNEELDINFKVKSDVSLEIIKEILTDKMLNRTKKKEKLSELLEEEKNKIYQEIWKLLVGNEAKMTTIFDNKEYEEAKISFSKGNYDEKEEEYESILGEKIVLVQKAKAIYDWMLLQNILKEDKYLSYSKVKLYNEHKNDLKILKNVLKNLDKKIYKEIFSENGLYEKYIKNNEKEEFYKKIKSYFNEENTDEIVKNILNKIELDSFLPKQKIKDNGVIPRQVHQKELEIILKNAEKHFSWLTGKDETGLSVSEKIMKIFKFKIPYYVGPLNSKSPFAWIERKEYGKILPWNFENMVNISETAEKFIKKMTNKCTYLPEKDVIPKNSLLYTKYMVLNELNNLKIRGEKIQVDLKQKIYTELFQKNKKIGMRTLVEFLKSQNIVVTKTEITGIDGTFNTSLGSYIDMMKIFGEENVVKDSYKKMIEDIILWITLYGEEKKLIKSKIEEKYSDKITSEQIKLILKLKYKDWSRLSKEFLTEIETMDEETGELINIIQMLWRKNENIMELLSYKYEYSDRIKEYNGINEKEKNITYEDIIKDLQVSPSVKKMIWRALVIVKEIKKITKKSPKKIFIEMARDTQTEKKRTEKRKDKLLELYKNIKNDDSVKELEKNLKDKTNDDLKSKKLYLYYLQLGRCMYSGEIIRLEDLMNDNLYDIDHIYPQSKIKDDSFDNTVLVKKQINADKTDVYPIDKSIQVKCKALWTSLKERGLMSNTKYERLTRTEEFSDDELAGFISRQLVETRQATKVLADLLKSIFGSDTRIVYVKAGLTSDFRQKFGIYKFRELNDYHHAHDGYLNIVTGNIYNTLFTDNPYNFIKDRNKENRTYNLNKVFERENDVWNPNTMISKIERYIYKIRPLFTRASYEQKGGFSDQNISSEKDKLRPLKSSGVLSNTRYGGYDKIKNSYFFIVEYTEKKRRVRSIETLPIYIKKLATGKKGLEKYCKENLKLQEPKVLISKLNYKSLVQSDGYKYCINGKTGNSLLIQNAIQTILRKENYETCRKIYKNLEHLKLIYKDEKAREEKFLEKLSKILKINKNNKDLSENEISEKIEKLYKEIIEKIEIGVFSRFKSTLPIYIEDCNKLRDFTVLDSYAKSRFIQEILKCLNSQQGEFDTKYTHNYSKKYNTKLNKSKILENDFCIINQSPTGLFEKKVFLDK

SEQ ID NO: 4334 - protein, 1337 aa, unidentified
  REGION 1..1337: note = Description of Unknown: Cas Enzyme sequence
MKKFGDYYLGLDLGTSSIGWAVTDEKYDILRFNKKFMWGTHLFDTGNTAAERRIFRTSRRRLKRKKNRIELLQTLFSEEISKKDFGFFQRLKESQYDIEDKTVKNKNTLFMDENYIDKDYHDEYPTIYHLRKALIDNEENAFEIRKLYLAISHILSHRGHFLFEGELSDNFEFDDIFDEFIKYLNEELDINFKVKSDISLEIIKEILTDKMLNRTKKKEKLSELLEEEKNKIYQEIWKLLVGNEAKMATIFDNKEYEEAKISFSKGNYDEKEEEYESILGEKIVLVQKAKAIYDWMLLQNILKEDKYLSYSKVKLYNEHKNDLKILKDVLKNLDKKIYKEIFSENGLYEKYIKNNEKEEFYKKIKSYFNEENTDEIVKNILNKIELDSFLPKQKIKDNGVIPRQVHQKELEIILKNAEKHFSWLTGKDETGLSVSEKIMKIFKFKIPYYVGPLNSKSPFAWIERKEYGKILPWNFENMVNISETAEKFIKKMTNKCTYLLEKDVIPKNSLLYTKYMVLNELNNLKIRGEKIQVDLKQKIYTELFQKNKKIGMRTLVEFLKSQNIVVTKTEITGIDGTFNTSLGSYIDMMKIFGEENVVKDSYKKMIEDIILWITLYGEEKKLIKSKIEEKYSDKITSEQIKLILKLKYKDWSRLSKEFLTEIETMDEETGELINIIQMLWRKNENIMELLSYKYEYSDRIKEYNGIKEKNMTYKDMVRDLQVSPSVKKMIWRALVIVKEIKKITKKSPKKIFIEMARDTQTEKKRTEKRKDKLLELYKNIKNDDSVKELEKNLKDKTNDDLKSKKLYLYYLQLGRCMYSGEIIRLEDLMNDNLYDIDHIYPQSKIKDDSFDNTVLVKKQINADKTDVYPIDKSIQVKCKALWTSLKERGLMSNTKYERLTRTEEFSDDELAGFISRQLVETRQATKVLADLLKSIFGSDTRIVYVKAGLTSDFRQKFGIYKFRELNDYHHAHDGYLNIVTGNIYNTLFTDNPYNFIKDRNKENRTYNLNKVFERENDVWNPNTMISKIERYIYKIRPLFTRASYEQKGGFSDQNISSEKDKLRPLKSSGVLSNTRYGGYDKIKNSYFFIVEYTEKKKRIRSIETLPIYIKKSIITKEDLEKYCKEDLKLKEPKILISKLNYKSLVYSDGHEYYINGKTGNALLVQNAIQVILTKENYEIYRKIHKNLEYFKLIYKDEKIREEKFLEKLPKILKKNKNDKELSENEISEKLEKLYKEIFTKIEIGIFSEFKSTLIDYMKECNEKIAFNLLNNYNKSCLIQEVVKCLKSQQGTFDLKYLYNYVKSYNIRLNKSKILENDFCIINQSPTGLFEKRVFLDK

SEQ ID NO: 4335 - protein, 1348 aa, unidentified
  REGION 1..1348: note = Description of Unknown: Cas Enzyme sequence
MKKFDDYYLGLDLGTSSIGWAVTDEKYDILRFNKKFMWGTHLFDTGNTAAERRIFRTSRRRLKRKKNRIELLQTLFSEEISKKDFGFFHRLKESQYDIEDKTVKNKNTLFMDENYTDQDYHTEYPTIYHLRKALIDNEENAFEIRKLYLAISHILSHRGHFLFEGELSDNFEFDDTFNEFIKYLNEELDINFKLKLDVSLEIIKEILTDKTLNRTKKKEKLSELLEEEKNKIYREIWKLLVGNEAKMTTIFANKEYEEAKVSFSKGNYDEKEEEYESILGEKIVLVQKAKAIYDLILLQNILKEDKYLSSSKVKLYNEHKNDLKVLKNILKNSDKKIYKEIFSENGLYEKYVKKNEKEEFYKKIKSYFNEENTDEIVKNILNKIELDNFLPKPKIKDNGVIPRQVHQKELEIILKNAEKHFSWLTEKDETGLSVSEKIMKIFKFKIPYYVGPLNSKSPFAWIERKEYGKILPWNFENMVDISKTAEKFIKKMTNKCTYLPEKDVIPKNSLLYTKYMVLNELNNLKIRGEKIQVDLKQKIYTELFQKNKKIGMKTLIEFLKSQNIIVAKTEITGIDGTFNTSLGSYIDMMKIFGEENIVKDSYKKMIEDIILWITLYGEEKKLIKSKIEKKYSDKITPEQVKQILKLKYKDWSRLSKEFLTEIEIMDKETGELINIIEMLWRKNENIMELLSYKYDFSDRIKEYNGINEEEKNITYEDLVKDLQVSPSVKKMIWRALVIVKEIKKVTKKSPKKIFIEMARDTQTEKKRTEKRKDKLLELYKNIKNDDSIKELEKNLKDKTNDDLKSKKLYLYYLQLGRCMYSGEIIRLEDLMNDNLYDIDHIYPQSKIKDDSFDNTVLVKKQINADKTDIYPIDKSIQVKCKALWTSLKERGLMSNTKYERLTRTEEFSDDELAGFISRQLVETRQATKILADLLKNVFGSETRIIYVKAGLTSDFRQKFGIYKFRELNDYHHAHDGYLNIVTGNIYNTLFTDNPYNFIKDRKKDNRTYNLNKVFERENDVWNPNTMISKIERYIYKIRPLFTRASYEQKGRFSDQNISSKKDKLRPLKLSGVLSNTKYGGYDKIKNSYFFIVEYTEKKKRVRSIETLPIYLKNLTTGKEGLEKYCKENLKLQEPKVLISKLNYKSLVKSDGYKYYINGKTGNSLLVQNAIQTILRKENYETCRKIYKNLEYLKLIYKDEEIVEEKFLEKLPKLFKKSKNSKDLSEREISEKIEKVYEEIFEKIEKGIFSKFKSTLIDYMKECDKKISFTLLNNYNKSCLIQEILKCLKSQQGKFDMKYSHNYLKSYNIRLSKSKILENDFCIINQSPTGLFEFEKKIFLDKQVKESLK

SEQ ID NO: 4336 - protein, 1339 aa, unidentified
  REGION 1..1339: note = Description of Unknown: Cas Enzyme sequence
MKKFDDYYLGLDLGTGSIGWAVTDEKYDILRFNKKFMWGTHLFDTGNTAAERRIFRTSRRRLKRKKNRIELLQTLFSEEISKKDFGFFHRLKESQYDIEDKTVKNKNTLFMDENYTDQDYHTEYPTIYHLRKALIDNEENAFEIRKLYLAISHILSHRGHFLFEGELSDNFEFDDTFNEFIKYLNEELDINFKLKPDVSLEIIKEILTDKTLNRTKKKEKLSELLEEGKNKIHQEIWKLIVGNEAKMTTIFANKEYEEAKISFSKGSYDEKEEEYESILGEKIILVQKAKAIYDWMLLQNILKEDKYLSYSKIKLYNEHKNDLKILKGVLKNLDKKIYKEIFSENGLYEKYVKKNEKKEFYKKIKSYFNEKNTDEIIKNILNKIELDNFLPKQKIKDNSVIPRQVHQKELEIILKNAEKHFSWLTEKDETGLSVSEKIMKIFKFKIPYYVGPLNSKSPFAWIERKEYGKILPWNFENMVDISKTAEKFIKKMTNKCTYLPEKDVIPKNSLLYTKYMVLNELNNLKIRGEKIQVDLKQKIYTELFQKNKKIGMKTLIEFLKSQNIIVAKTEITGIDGTFNTSLASYIDMIKIFGEENTVKDSYKKMIEDIILWITLYGEEKKLIKSKIEKKYSDKITPEQVKQILKLKYKDWSRLSKEFLTEIEIMDKETGELINIIEMLWRKNENIMELLSYKYDFSDRIKEYNGINEEEKNISYEDLVKDLQVSPSVKKMIWRALLIVKEIKKVTKKSPKKIFIEMARDTQTEKKRTEKRKDKLLELYKNIKNDDSIKELEKNLKDKTNDDLKSKKLYLYYLQLGRCMYSGEIIRLEDLMNDNLYDIDHIYPQSKIKDDSFDNTVLVKKQINADKTDVYPIDKSIQVKCQALWTSLKERGLMSNTKYERLTRTEGFSDDELAGFISRQLVETRQATKILADLLKSVFRSETKVIYVKAGLTSDFRQKFGIYKFRELNDYHHAHDGYLNIVTGNIYNSLFTDNPYNFIKDRKKDNRAYNLNKVFERENDVWNPNTMISKIERYIYKIRPLFTRASYEQKGGFSDQNISSKKDRLRPLKLSGVLSNTKYGGYDKIKNSYFFIVEYTEKKKRVRSIETLPIYIKNLTTGKESLEKYCKENLKLQDPKVLINKLNYKSLIYSGGHKYYINSKTSESITIQNGIQIILTKENYETYRKIYKNLEYLKLIYKDEKTREKKFLEKFPKILKINKNNKDLSENEISEKTEKLYKEIIEKIKTGIFSKFKCTLPIYIEDCNKLKDFTILNSYAKSRFIQEILKCLNSQQGEFDTKYTHNYSKKYNMKLSKSKILENDFCIINQSPTGLFEKKVFLAK

SEQ ID NO: 4337 - protein, 1369 aa, unidentified
  REGION 1..1369: note = Description of Unknown: Cas Enzyme sequence
MGKYDGNQEWFLGLDIGTNSVGWAVTDPQYNILKFKGNAMWGIYLFDEAKTAAERRVNRSARRRLARRKQRINFLQEFFAKEIAKQDERFYLRLRESGLWADDRTTDVNLFVGGELTDKEYNKKYPTIHHLIVDLMENKEYHDPRLVYMACSYILSHRGHFLFDVSDVDKVNDFHAIYQELSNWFDACDISLPWKCTEEEFSSILNQKVSLTKKIELFKNIVFDGKFPANSDDDDVLDRLSTKAFIEMLCGRKTKISDLFIRDDYKLLEKDSITVSSAEYEDDIEQASGTITDYEYDLLLIIKKMYDWSLLNDILSGETYISKAKTKVYEQHRKDLKTLKYFIKKYASNKYSDMFRKVGKEANYSSYSYNTKNLGKEVAVPSDFKMCGIEEFSKYAEGILKSVSDSIEEDDKQSYEEMMNRLALRSFCPKQVTGDNRVIPYQLYYQELKLILDNASEYLPFLNEGNESKTVKDKILTMMKFRIPYYVGPLNPHSKFSWIVKKNGKITPWNFDDMVDKDACEEIFIKRMTGKCTYIAGEDVLPKYSLLYSKYVVLNEINNLKINGTKISVDTKQSIFDDLFRKKRRVTKKDLEEYLLAKGVMQKEDSLQGIDVKINSELQSYHDFKSFIENGKLTERQVEEIIYRITTTTDRRRLYNWIKTNYELTDDEIKRISKLKYNDFGRLSRRLLTEVYDLDISTGEIRREENIIEMLWNTNNNLMMLLSDEYGYSNCIKSINDEYYGSNPQTLDDRLADMYIPNSVKRPILRVMDIVNELRGIMKCDPNKVFVEMARGASEEQKNKRTKSRRDQIKEMYSNYNNSDEYREDIGRLLSELESKTDGELRSEKLFLYFTQLGRCMYSGQPIEINDLGNSKLYDVDHIWPQSKIKDDSLDNKVLVLTRYNGIKGDNYPICEEWRIKQYGFWHSLRDRNLISDKKFDRLTRKTRFTDEELASFINRQLVETRQTTKAVATLLNEKLPSSKIVYVKAGLVSNFRQLYKDTHYTLKCREVNDLHHAKDAYLNIVMGNVYSVRFTDNPLNFIRSGEQYTLNLNKILERDVVRGKETAWLVKDDVWFNRVINTIHKNNIRFVRYSYCQKGALFDLMPLRKGLGQVPRKGYLNEIDKYGGYNKPTYTGFVLIKYTDKTKTETAFCPITLLDISKLQTLKDKEDYCNSLGYSNARVLLDGRIIKTNTLLDIDGYRVHIAGKSSGDLWFKGAQQLSLSHLQESYIKKIGNYYERTKGNKVLPEITTHDCFTKDDNLSLYDLLVSKMGNTSYITLMPTAYKTLIDGKALFENDLSIEEQVVALFHIIELFGCNSSQGKDLTLIGGAKSSGIQKMTLKLNKKRFATICIIDQSPTGLFEKKSPNLLEL

SEQ ID NO: 4338 - protein, 1365 aa, unidentified
  REGION 1..1365: note = Description of Unknown: Cas Enzyme sequence
MEQKGYYLGLDMGTSSVGWAVTDNEYHLLRKKGKDMWGIREFEPAETAAERRSHRIDRRRRQREKARIGLLREYFADAIMQVDKDFFIRLDNSKYFMEDKDQKLHSVNGIFDDSNYKDADYYRNYPTIFHLRKALLDIDNSKKVFDVRLVYLAVLNMFKHRGHFLLSTTDGGMSEVQIEEMYQSVIEGFNQDYGYALECQPFEHVLSIISDREIGRKRKYEKMAELFDVAKSNKKAHEFLKCMCGLKVNANIIFGVDAEGKIDVCFHDFSYADEISNLMEQLGDEKYAVIEQMKDIYDYAILAGIIKKGQEYLSPVRVDIYNKHHEDLKLLKELYRKYKTQKEYDEMFRSNGDGSYSAYVNSTNSSVESKKYRRNMKGRKSEDLYTAIKKAFKDYAEDEKVQYIFTQMENEQFLPKQLTGANGVIPNQVHRKELARILQNAQQYLPFLQEIDESGLTVTERILQLFSFQIPYYVGPLGKQSKTGWVKRKEEGTILPWNINEKIDMKATSEEFISRLIRSCTYLTDEKVMPKASLTYERYCALNEINNIRIDGERIDTQLKQSIYIACFCEGKKVTKKKLCNHLIAQGVITSEEQVTGIDSTINSSLSSYGKMYKIFGDKLKEDQYWNIAEDIIYWGTVFADSREMFKEHLQQYIEQGVLESEEVKRILGYKFKDWGRYSKALLELQGCDKTTGEMISINRAMWDYSMNFMELINSDEFTFKDELIQKKTKAVKLLADFEYEDLKDYYFSAPVKRMIWQTILVVREIEHVMGYAPAKIFVEMTRNDEEKGDKGRKASRGKQLLEAYKTIKNTEIHNWKKEIMEAEGNGKLRSKKLYLYYMQMGRDMYTGEEIDLARLFDDNLYDIDHIYPRHYVKDDSILNNLVLVNKAANEHLKKDLYPIPDKITSNTKVRELWNTLHHCKLINDEKYSRLISKTPFTEKQMGDFIARQLVQTSQGTKGIAELLQQLMPESRMVYAKASNVSEFRKRNGFVKSRLVNDFHHAQDAYLNIVVGNVYDTKFTQNPWNFIKKEYAKDKEANHYNLDKMFAWDVVRGDETAWIAEKKDCKGTIDTVRRMMKKNTPLMKRMSFEQHGTLYNVNPISHYETKCENYVGVKHGRLSDVTRYGGYSTLTPAYFIFIEVKKGKKKIKIFESVPLYYSQQIRSENDLKEYCSDILGYSEVRIIINKINKHSLLKLNGYFLYLVGFDNRKNVEMKNATPLLLDQNCIDYLKKVEKAKERLEMNKEKEYIGDEITKQKNHELYDVIKNQHMCSIFINCPKPIGVTLDKGKKKFVQLSIEEQIKLLTNIVSYTATDLKSRTFSLEMLGGAKEVGRIRISGNMTEAKELLLIDKSVTGLYEKSKDLLSL

SEQ ID NO: 4339 - protein, 1412 aa, unidentified
  REGION 1..1412: note = Description of Unknown: Cas Enzyme sequence
MSKKQFIGLDIGTDSVGWAVTNEKYEVVKAKGKLLYGTRIFSSANDASERRAFRANRRRMNRRKERTALLESLFSEPISAVDFEFFQRLKESAYYDGDKTVKGDFSLFNDPNYTDRDYYKQYPTIYHLRKEMIEKDKKFDVRLLYLAVHHLIKYRGNFLLEGQKISNEGQKDNKYLVDRFKEIIQYYENNEVPLDLFIDDNNAQDFVDTVIRERGITKTKTSLISLCQVNDKLSKAILNAIAGGKVKIASFLPMLEIEGVDPATVQFNKADFEDNILPSLKTQLGDDSLVIEKLYRIYSWLQYKKILNGYEYYSFAMVDRYDAYKQDLKDLKALYRKYLSRESYNQMFRIADNKIKNYAAYNKGTQYKGKKHYVKSANYDDFIKFLKKDLLANEKILTVKKVAEDGTVQYVPCEEYQHILDRISSNDFLKKIVNSDNGVLPYQLNELELRKILENQKKYHPFLNVREDGLSVAEKIVKLLTFRVPYYVGPLNNYHSKLENKGFSWVVRKKKGKVTPWNFDSLVDRDESENRFITTMTNKCTYLRSEDVLPKQSLLYQEYMVLNELNNIKLNNERLDVKLKQRIFNELFCKQKKVTIKKLKRWLKENNIVSSESGELTITGLADDFKSSLSSYVEFSKIIGDFDMNNCEMVEKIIRWIVISPDIGRIKRRISNDYKDHLTEDQIEQISHLSFSGWGRFSKKLLNSEEVSYLDPASNQKLSVVDLLYSTKLNFMEILFSDQFGISKAIANLNQSSSDVHRGITYEDVDNLPVSPIVKRPVNQSIKIVNEIKKITKKDPDKIFVEVIRQPSKNIKKEVPNSRKERLLEAYRNLGDDCQEYDKLIRELTEKEGARLRQDKLYLYFSQLGKDMYTGESITLEELSLEKYDIDHIFPQSIIKDDSLSNRVLVNKQSNARKGNAYPISSEIRMNMIGTWKMLRDKKLISKLKYERLTRSTKITDGELNSFVSRQIVATSQATNAVINLLKQAYPNSTIVWSKASHVSKFRVKYDLLKSREANDYHHAKDAYLNIVVGNVYDVNYRKALADKAWLRYINSENPNELFDYFKRNSLTSENLFQRNIAGAWSVDKESRSIDIVKKYMKYNSVLFTVMPTENRGAFYDQNPLPKGPSNALIPIKSHGPISNTKKYGGYNKPSTAYFFMVKSLDKKGKKIVSIESMPVMFAERYERDENFAYKLMTGYFKLVEPKILVKKILINSLIKIGKTPCRIAGKSGDALLIAHNIQWNVDQNTINYLHLLEKYRSRQVEKKQFDFKHPLDKNINKFELNGLPISTESKLKLQVLSKEKNLQIYQKIQHQLSKEIYSGLSSLKKLREIIGNGIEKFVELDIKSQVIVLFELMNILKSNRTESDLLIIGGSNRNGNLTLSKKVPKDKEIRIINQSVTGVYEKVEYITGKEN

SEQ ID NO: 4340 - protein, 1371 aa, unidentified
  REGION 1..1371: note = Description of Unknown: Cas Enzyme sequence
MNLRNVESYQVGLDIGTGSIGWAVLDDKGDLCRFKGKPTWGSRVFPTAETAAEARVHRGQRRRYDRRRQRIDLLQGFFADEVAKVDPEFFIRLNQARLHPENRDPAHADYRWPLFNGSDFTEKDYYRQFPTIYHLRAHLLKSDEPADIRLVYLALHNIVKHRGNFLHQDNPSLSARNANVGDAVEALCLAFDEWCGAHDVECACDEAALAEALGDASLRPGEKRERAEAALGVEKAHKKLAKAVSSAVVGYAAEFGHVFFAESEGSKFALSNDEKVEAYVCPDEGRDLFDAMRAVHSSYVLMGILSEAQGELLSVCKVGEYERYKRDLETLKSLVRAYGPERYDEFFCGPFYEGTRDYDPGKAQGYTKYNLGASKLSHEDFLKEVQKLLKDIGAQADERYADIERAIEAGTFLRRLKTSDNGTIPYQLHLEEMDAIIERQAAFYPFLVQEKDKLKSLVSFRIPYYVGPLTQKNAARDGKGEARFAWSSRKPGMEDARVYPWNWEDVIDKDQSAEDFIRRMTGTCTYLKGEPVLARCSLDYELFCVLNELAGARWTQDGDKSYRFDAADRLGIVEDLFKKRKRVTYEAAEKWLARTHGPEGGKSAGGAYHVSGGQGEDAFESQLSSHYDFCKILGVDELSDADEAMAEDIILWNTVFEDRSILKRKIKLAYGDRLGDAQVRKLCQKRYTGWGRLSGELLRGLRSATDNGPKTIMDILLEGDPNHARRMGAAMNLMEILHDDLLEFQAKIDEHNRERALAVGGMSVDEVTGSPALRRGINQALRVVDEIAGIAGKPPAHIYVEVTRDEDARNKGRRTTSRYRALEAALSSIKAQCADVYAELKERDPRALDDERLTLYFMQCGKCMYSGDALDINKLQTYQVDHILPQSYVKDDSFENKVLVRPDTNQRKGDTLLLDERLIARMRGFWRTLRDAELIGEKKFNNLTRTSVSGEQMKKFVSRQLVETGQMVKQVQQLLQARYPESEVQPVKAGVSHQLRVGCALAKSREINDFHHAHDAYLACQVGRFVQYRHSAVYSEPVKMAAVVKQFIKKQAEDYRRTRVPPGSAGFIVSSFMTPGFDVKTGEVFRDAWDAGAEIDRIRRCFDYKDCFISRMPEETHGAFWDATIYSPRAAGKTLSLPLKKGLDPRKYGSYSREQFAYFFVYEAVKPKKKQRVLEFAPVPVRVASALANDPDALEDYARELAEAEGLVFERIRRRKVYKYQQIIVGDSRLYVTGREEVRNARQLAFSQDETKLICRIEQGEECEEGELLDLFRSMQRKYLACAPRLARLMKVAEMEEGFIAATASGKREVLLSLTSIAAAHRNSIDLKPIGRKGSSGQMKITFSKELSTNGILFVDSSVTGMFERRCRLGL

SEQ ID NO: 4341 - protein, 1105 aa, unidentified
  REGION 1..1105: note = Description of Unknown: Cas Enzyme sequence
MKLRELDEYSIGFDLGTGSVGWAVITPDGELPRWKGRPVWGSRVFPTAATAAETRLKRSQRRRYVRRRWRLNLLQELFLEEVKKIDGSFFDRLNQSRLLPSDRGFHSPLFNDTDLSEKEYYKRFPTLSHLRAWLMTTDEKADIRLIYLAFHNIVKHRGNFLQQDNKRLSARTVNIDDAINKMAEELALRGEALECAVTVDAVAIAKAFKAGEQKRASIASEIQKRIRIEAPEFKATAKVLGRALVGYKVDFSKILMLEGVELGSASLGDDDKMEEILPAVPDECLPLFNAIYEVHSAYVLMGILRLSEGEIKTGAVAGMNGQTLSFCQVREYEKYGRDLATLKSLVRAYAPREYDAFFRGELYPGTKLYDKQAAKGYTRYNEVHKTDYEEFAKEIKKLFAGTPALEDERYLEMMQKFEERRFLRRQKTGDNGSIPYQLHLEEMNAIIDNQGRNYPFLLDERDKLTSLVTFRIPYYVGPLAKANAARDAKGARRFSWAECLPSKEHEPIRPWNWDQVIDKNRAANDFIMRMTNDCTYLLDEPVLPRCSLLYEEFCVLNELNGAWFTEDGDKRRRFDSFNDRLGIFEDLFKSKRKVKFADVANWLQRNGSAGPHVRVGGGQGEAGFESSLASYRFFCKDVFHVDELDEAWIPMIEEIILWNTLFEDRKILKEELERNYGDRLTPEQIKTICKKRFSGWGRLSKRFLRGLKAKTDNGPKSIMDVLREGEQGASGRTRAMVLMEVLHDENLDFKGLIEQENLAKLPATGELQVEDLPGSPAVRRTVNQAVRILDEIARIVGKPPVNVFVEVTRDERDKRRTTSRYNRVKDAVNVLGAEYRGLKQEFKEQDPKAFDDERVILYYLQGGKCLYSGRSLDINRLSEYQIDHIIPQAYIKDDSLENKALVLSEYNQDKTDHLLISPAIRRSQRDRWLELHRAGMMGEKKYNNLMRTTISDNKMKGFIARQLVETSQSIKLFQMMVQNHYPDCRYVPVRASLSSELREAKGYFKCREINDFHHAHDALLAAQIGRFLLYRHGEIFENRVGYEQKIKAYIREMGAEERNRGKMPGTRGFFIASFLKSGLDRETGEVFRENDLWDARFECERIRKY

SEQ ID NO: 4342 - protein, 1418 aa, unidentified
  REGION 1..1418: note = Description of Unknown: Cas Enzyme sequence
MNLRNVGEKGIEYNIGLDLGTGSVGWAVTDQQGNLLNFKGKTAWGSRIYPTADTAADTRLKRGQRRRYMRRRWRLDLLQELFENEVKKIDPEFFIRLRQSRLLKEDKSHSIILSPKGAARPIFPKGENEADYYKKYPTIYHLRKALMESEEQADIRLIYLAFHNIVKARGNFLHQDTPGLTAANANMGDAVEKLCVALEDWCTLRNLECNIRKNQKNIQNLLEGKTVEVSAENALKESFDSSRASRKDKATILSTWIAIQPGEYLDAKQAKDASKEIANVLFGLQGNMKKIFIEFEEDQKIRLDNDEQVEAFYSLCPDDGVALFESFQSIYSAYILMGILKNANGGSISSCKVAAYDQYKEDLKLLKDLVREFASEKYDEFFRGDIFDSSKGFRARNYNPATAKGYTKYNSVRGASYDDFKKEVEKIFKGTVAEEDIRYVDMMQRFAEGTFLRRLKTSDNGSIPYQLHLEEMDAIVENQKQFYPFLESEKEKLESLVTFRIPYYVGPLTQKNARLDNHNNARFAWSQRKEGKEHARVYPWNWEEVIDRKQSAAKFMERLTGTCTYILDEPVLPRCSLLYEEYCLLNELNGSKWRDMGGDWHRFDYETRMEIIENLFKKKKGSVKYAAVEDWLKCEKHKSCAEVKGGQGETGFESKLSSYVFFKEVLHVDEIDEADIPMIEELIWWNTLFEDRSILKESIEDKYGDRLTDDQIKAICKKRFTGWGRLSKELLCGIKTHTDNGPYSIMDVLREGNPNNNARSETMVFMEILRDDKFGFDKLIEEENMRRVSEVDNFDVNDLPGSPAVRRTVNQAKRIVDEIVGIAGCEPQNIFIEVTRDEDGRNKGRRTKRRYDNIKNAIAALKKEQKEYFNKDVSDSLNKTNPSDLDNERLALYFMQNGKCMYCGKDLDIKQLDKYQVDHILPQSYVKDDSFENKALVHMEDNQRKSASMLLDDSIIRKMKPYWEALRAAGLIGEKKFKNLTRVRVSDKELGGFIARQMVETSQSMKLTSLVLEKTYPNTNVRPVKAGFSSDLRKRLDLIKCREINDYHHAHDAYLACEIGQFITMRHNKLYENPISYSHAVKDFIAKRAKYANDHGTPMSTYGMPGSSSFVISSFLTSGFDEETGEIFKDAWSAEVAAVRIRESLNRKDCYISRMPEETSGAFWKETLISPRDPSLGKNLSLPIKKGLDPRKYGGYNEQKFAYFFVYEAVKIKKKGEVKEYVFAAVPVQVAAIVARDPNALTEFAKKDAEARKIKFLRIIREKVYKYQLIEVNGERLYITGLKSVRNARQIALSQDMTTVFLKAINDKDVAEDELKSLFEEIVQRYRLCANRLGNQLKIFSLSDSFNSANSESKKRALVSLVAIIDAKTNKIDLSGIGSGKAVGNMRLSFSKEMSNSKNHFAFIDQSVTGMFERKTYL

SEQ ID NO: 4343 - protein, 1341 aa, unidentified
  REGION 1..1341: note = Description of Unknown: Cas Enzyme sequence
MKKEEYYIGLDIGTDSVGWAATDQQYLPCKINGKQLLGIKLFDGSKTAAERRIFRTSRRRNDRKKQRIKLLQELFAEEISKVDKSFFHRLKESKYWAEDKEFVQPNTLFNDKKFSDKEYHKKYPSIYHLRKELIEKNEAHDVRLIYLALHHIIKKRGHFLFESLGTNNNASFTQVFNDLSTYIYDNLDIDLSCKDPEEFAEILSNRNIAKMDKERQLLEICYIDKKADKQKASIIKALSGQKTKVFDIFNDEELKEIEDGGFYLSDEYEKTREALEVHLQERFQLIDLLKAVYDWGILADILKNEPYISYGKVKTFDKHKSDLGLLKNFTRKNCNDKYDEIFNDTKGKTNYLAYVGVCKKNNKKLVVNEKVCTQEELCKYLKKTISKVEIDSSDYRYIMNELEMNTFLPKQISKDNGVIPYQVHLHELKKILENASRYLPFLNERDEGSLSVADKIISMFTFRIPYYVGPLNNKSEYSWIKRTNEKIYPWNFEQIVDIDASAEEFIRKLTNKCTYLPGEDVIPKNSLLYSEFMVLNEVNNLKINGEAIGVEVKQAIVRDLFKQIKKTTKKRITDYLVSNGYMERNDTLSGIDDQIKSSLVSYNDFRRIIEKHNDIEMVENIIKWIVIFGDDRKLLKKRIEKNYSNKLSKEDIEYVSKLKYTGWGRLSKEFLTEINHVDKQTGELINIITMLRDTNDNLMQLLSSKYNFIDSIKAHVDVDAGVQTIKEMVENLYVSPSVKRPIMQALNITKEIVKSKKHAPKKIFIEMARAKEETKGRTVSRKNKLLELYNKCKDEEKELYLQLQSENEDSFKRDRLYLYYTQMGRCMYSKEKIEISELFNENIYDVDHIYPQSKIKDDSIDNRVLVLKRINSQKSDIYPISSEIRKKMHSHWSILKSKGLISEKKYDRLTRNTEFTDDELEGFIARQIVETRQSTKAVAEILSKLYPTSEVVYVKANTVSDFRHANEFIKCRDVNDFHHARDAYLNIVVGNVYNTKYTHNKVIFIKNLKDRKVSLNRMFDYDTDGAWAAGEHGTIETVRKVMSRNSILFTRYCTEQKGGFFDQNIMKKGKGQIPLKGSDARLHDSNKYGKYNKATVTYYCLVEHTYKKNRIRTIEPVELYKALKFEEDPIAYCNEHLGLLNPKILIKKIKINTLFCLDGFYMHLSSKFNEYIRFKCAMQLCISSEMEKYIKNISKYLEKCKLARRELPITAFDKISYKQNVDLYEVLLNKLLDTVYNVKFDLSAQLLKSKRGYFQEMIVEKQCVVISEILNIIKCNAGLGDFSSMCDGKNKNYGTIYINKRIPTKNEVKEFKITYRSCTGLFEKEIDLLGDDFNPRRRKKR

SEQ ID NO: 4344 - protein, 1359 aa, unidentified
  REGION 1..1359: note = Description of Unknown: Cas Enzyme sequence
MGYYLGLDVGSASVGWAVSDENYNLCKFKGKDMWGIRLFETAQTAAERRSKRANRRRLERRKQRIDLLQEIFADEMSKVDDTFFIRLNESRLYLEDKTEKFKYPLFKNKDYTDVDYYNEYPTIFHLRKELIEKNKEHDIRLVYLALHHIIKYRGHFLIQGDLDSAKDFYNTFNTMTQGLFEELEADITISDENKSEFQRILKEKHLSKSEKAKELSSLFDTSDNGEDKLSAKEKKGIVEQICKFIVGNKGDLTKLFLMDKENFENSSFTFAEKNYEDTIRVNLDSELQEKAYLIDLIKSLYDWNILTDILHDEKFISFAKVRQYEKHSENLQELRKIILKYCDKNTYNDFFNSPKTEGNYSSFVGNLKKNGKKYNVGRCTGEEFYKALKGILSKIKPDEEDEEILNYFINGCEAGDLLPLQRSKENGVVPYQIHEVEINAILDNAENYLDFLNNKDSLGISNKDKIKSLFTFKIPYFVGPLSDRHKDKGANVWIVRKENQTGRIYPWNFDTIVDLEKSNQKFIERMTNKCTYLIGEDVLPKNSLLYTKYMVLNELNNLKVRGNKVSGETKKAIYNDLFKQSAKVTGKKLLDYLRKYMPELSKEDFSGFDIDFKSSLNSYLDFKKKVFGDRIKDKKVQSMVEDIIRWITIYGDDKKMLKNVISKAYPYDINAEELKNICKLNYSGWGNFSRKFLKDIEGTDKDTGECFNIIEALWETNNNLMQILSQRFTFKETIDEINNEKIGTIDKITYENTIEKLYASPAVKRAIWQSIQITEEIKKVMGEEPEKIFLEMARGEDEKKKKGRTVSRKEWLKSLYKNCEKDIRERFLKEIEDIEERDFNSRKLFLYYTQMGRCIYTDESIDLDSLMHKNSKWDKDHIYPKSKIKDDSIDNLVLVNKKVNSKKDNDVLKIEIQNKMHPFWKSLLEKGFISKKKYNRLMKKGDFTEEELTGFISRQLVETRQSTKILADTFKLIYENSELVYVKANLVSDFRHDTIKMLKSRRLNDYHHAKDAYLNIVVGNVYNARFTSNPIKWLRDNKNKDYSLNTVFKFDVIKGTKKVWDADKKNGSIQTVKKVMQSDRILYTELSYCAKGELFNASIKRKGEDSNIALKSYLDISKYGGYYSPTSAYFALIEFDEKKGKKVNRNRNIIAVPLYIANMLEHDTNAFIDYCTKVKALENVKIVSPKIKKNALIVVDGFPMRIRGEDEKNIILKNNLQVKLDTNNAEIIRSIEKFLNKEADYEPDTKIDKIDHEKLNKIYDVLTDKLKTVYMKRPANQYNTLETRREEFIKSKDLYGKMKFINNVLTLLRCDATSATDLSLIGAGKTVGGIKVNKNTLCKSKLLLVNQSITGLFENRIEL

SEQ ID NO: 4345 - protein, 1185 aa, unidentified
  REGION 1..1185: note = Description of Unknown: Cas Enzyme sequence
MTQGLFEELEADITISDENKSEFQRILKEKHLSKSEKAKELSSLFDTSDNGEDKLSAKEKKGIVEQICKFIVGNKGDLTKLFLMDKENFENSSFTFAEKNYEETIRGNLDSELQEKAYLIDLIKSLYDWNILTDILHDEKFISFAKVRQYEKHGENLQELRKIILKYCDKNTYNDFFNSPKTEGNYSSFVGNLKKNGKKYNVGRCTGEDFYKALKSILSKIKPDKDDEEILNSLIKGCEAGDLLPLQKSKENGVVPYQVNEVEINAILDNAEKYLNFLNKKDSSGISNKDKIKSVFTFRIPYFVGPLSDRHKDKGANVWIVRKEGQTGRIYPWNFDTIVDLEKSNQKFIERMTNKCTYLIGEDVLPKNSLLYTKYMVLNELNNLKVRGNKVSEELKKAIYNDLFKQSAKVTGKKLLDYLRKDMPELSKEDLSGFDIDFKSSLNSYLDFKKKVFGDRIKDKKVQSMVEDIIRWITIYGDDKKMLKNVISKAYPDDISDEEIKNICKLNYSGWGNFSEKFLKGVEGSDKDTGECFNIIDALWETNNNLMQILSQRFTFREEIDEINNDKIGTIDKITYDNTVEKLYASPAVKRAIWQSIQIVEEIKKVMGEEPEKIFLEMARGEEEKKKKVRTVSRKEWLKSLYKNCEKDIRERFLKEIEDIEERDFNSRKLFLYYTQMGICMYTGESIDFDSLLHKNSKWDKDHIYPKSKIKDDSIDNLVLVNKEVNSKKDNDVLKIEIQNKMHPFWKSLLEKGFISKKKYDRLMKKGDFTEEELTGFISRQLVETRQSTKILADTFKLIYENSELVYVKANLVSDFRHDTIKMLKSRRLNDYHHAKDAYLNIVVGNVYNAKFTSNPIKWLRDNKNKDYSLNTVFKFDVIKGSKKVWDADKVKGSIQTVKKVMESDRILYTELSYCAKGELFNASIKRKGDDSNIALKANLDISKYGGYYSPTSAYFALIEFDEKKGKKINRNRNIIAVPLYVANMLEHDTNAFIDYCIKVKGLENVKIVSPKIKKNALIVVDGFPMRIRGENAKDILLKNNLQLRLDSKDAEIIRSIEKFMNKEPDYEPDAKIDKIDHEKLDHIYDVLTEKLKTVYVNRPANQYKVLESGREEFIKSEDIYGKMRLVNNVLTLLRCDATSTTDLSLIGAGKTVGGIKVNKNTLCKSKLLLVNQSITGLFENRIEL

SEQ ID NO: 4346 - protein, 165 aa, unidentified
  REGION 1..165: note = Description of Unknown: Cas Enzyme sequence
MGYYLGLDVGSASVGWAVSDENYNLCKFKGKDMWGIRLFETAQTAAERRSKRANRRRLERRKQRIDLLQEIFADEMSKVDDTFFIRLNESRLYLEDKTEKFKYPLFKNKDYTDPDYYKEYPTIFHLRKELIEKNKEHDIRLVYLALHHIIKYRGHFLIQGDLDSA

SEQ ID NO: 4347 - protein, 1359 aa, unidentified
  REGION 1..1359: note = Description of Unknown: Cas Enzyme sequence
MGYYLGLDVGSASVGWAVSDENYKLCKFKGKDMWGIRLFETAQTAAERRSKRANRRRLERRKQRIDLLQEIFADEMSKVDDTFFIRLNESRLYLEDKTEKFKYPLFKNKDYTDPDYYKEYPTIFHLRKELIENNSKHDIRLVYLVLHHIIKYRGHFLIQGDLDSAKDFYNTFNTMIQGLFEELEADITISDENKSEFQRILKEKNLSKSEKAKELSLLFDTSDNGEDKLSAKEKKGIVEQICKFIVGNKGDLTKLFLMDKENFENSSFTFAEKNYEDTIRGNLDSELQEKAYLIDLIKSLYDWNILTDILHDEKFISFAKVRQYEKHSENLKKLRKIILKYCDKNTYNDFFNSPKEEGNYSSFVGNLKKNGKKYNVRRCTGEEFYKALKGILSKIKADEDDEEVLNSLIKGCEAGDLLPLQRSKENGVVPYQVNEVEINAILDNAEKYLDFLNKKDSVGISNKDKIKSLFTFRVPYFVGPLSDRHKDKGANVWIVRKEGQTGKIYPWNFETVVDLEKSNQEFIERMTNKCTYLVGEDVLPKNSLLYTKYMVLNELNNLKVRGNKVSEELKKAIYNDLFKQSAKVTGKKILDYLRKDMPELSKEDLSGFDIDFKSSLNSYLDFKKKVFGDRIEDKKVQSMVEDIIRWITIYGDDKKMLKNVISKAYPDDINAEELKSICKLNYSGWGNFSGKFLKDIGGTDKDTGECFNIIDALWETNNNLMQILSQRFTFREIIDEINNEKIGTIDKITYENTVEKLYASPAVKRAIWQSIQITEEIKKVMGEEPEKIFLEMARGEDEKKKKGRTVSRKEWLKSLYKNCEKDIREKFLKEIEDIEERDFNSRKLFLYYTQMGRCMYTGEIIDLDLLTNKNSKWDKDHIYPQSKIKDDSIDNLVLVNKEVNSKKSNDVLNSDTQNKMQSFWKILLEKGFISKKKYDRLMKKGDFTEEELSGFISRQLVETRQSTKILADTFKLIYENSELVYVKANLVSDFRHDTLKMLKSRRVNDYHHAKDAYLNIVVGNVYNAKFTSNPVKWLRDNKNKEYSLNKIFDFDIVKGTSKVWNADKVDGSIRTVRKTMESDRILYTELSYCAKGELFNASIKRKGEDSNIPLKLNLDIKKYGGYYSPTSSYFALIEFDEKKGKKITRNRNIIAVPLYVANMLEHKPNAFMDYCTKVKGLENVEIIYPKIKNNALIIVDGFPMRIRGESGINLVLKNNLQLRLDSDNEEIIRLIEKFLNKESDYEPNAKIDKIDHEKLNKIYDVLTDKLKTVYLKRPTNQYNTLESKREEFIKSEDVPGKMKFINNVLNLLRCDATTTADLSFIGGSKNAGSMVKNKNTVCNNKLVLVNQSITGLFENRIEL

SEQ ID NO: 4348 - protein, 1370 aa, unidentified
  REGION 1..1370: note = Description of Unknown: Cas Enzyme sequence
MKNANKVTGKYYLGFDIGTNSVGWAVTDENYNLCKFKKKSMWGIRLFEDAKTAEERRGQRASRRRLQRRKQRIDLLQEIFAEEINKVDETFFIRLNESRLHLDDKTVSEKHPLFIGSEYSEKEYYREYPTIFHLRKELMESSEPHDIRLVYLAIHHILKNRGHFLIDGELSKANSFDAAFYQMKEVLCNELDLEIDGENTTEVERTLRDRNISKSDKVKLLAALLAMNQNETESKETKKKIENICKLLAGNKGDISKIFGQTPEGVEKTSFSFGEADYDESIRPNLEESIPDQCFVIDSIKALYDWNVLADILNGQTYLSCAKVNQYETHKNNLKELKLLVNRYCSREEYKRFFKSAVEKANYSNYIGSAKQGNKIIDVKRCAEEDFYKELKILLSKIEPEEADRELYERIKREAEEGSLLPLQRNKDNSVVPNQVHKAELALILENAGSYLGFLNEKDEDGLSPAEKIIELFSFRIPYYVGPLSDRHKDRGSNAWIVRKAEGRILPWNFDEKVDREKSNEAFIERMTNKCTYLLGKDVVAKNSLIYSRFMVLNELNNLSVCGNKISVQVKQDIYRELFQRHTKVSKKMLLQYCREKMMNKDLEEEDLSGFDGDFKAKLSSYLDFEKKVFGAKMEEDRIRKITEDIIRWKTIYGDDGKMLQAVVEKEYPGELDSDQLKAVKQFRYSGWGNFSEEFLNGIVGTEKPTGQMFTIIEALWQTNCNLMQLLSKNFTFMEEIEKHNRELAGQITDISYDKLVKDLYISPANKRAVWQTVRIAEEVKKIMGCEPAKIFVEMARGGEKEKKRTISRKKKLLELYAACKKDARDWNREIEDRDEREFNSDKLYLYYTQMGRCMYSGERIDLHELMSANSKWDIDHIYPQSKVKDDSLDNRVLSLKKINNEKGNKPLSRDIQQSQQKWWTELLQLEFITKKKYDRLMHRGELSEEELSGFINRQLVETRQSTKAAAELLGRMYNNSKVVYVKAPLVSQFRKDDLNILKSRLANDYHHAKDAYLNIAVGNVYNEKFTDNPLRWIEKHAGENYSINRVFDYDIVAGDGAPVWAAPLRDEKNKLRKNEVGEKYGGTIDVIRKTVKRNDVLYTEHTYCGKGELFNATIAKKDGGAEIPLKAGLQTGKYGGYKSPNTSYFAAIEFDGKKGERVKNIMEVPVYIANILLHDIDAYIRYCETVKGLKNVKILRPCIKKNALISVDGYPMRIRGANEKNILLKNNLQPIFGRHEETVRRIEKYVEKNQEFEVDEKFDGLNEANLTDLYDDITEKLCGPYVERPSNQGEYLMENREKFLNISLKEKAKLLAQMIKLVRCDTETKADLRSIGASKNAGVISVNKNTLGGKRLILINQSVTGLFENRIEL

SEQ ID NO: 4349 - protein, 1372 aa, unidentified
  REGION 1..1372: note = Description of Unknown: Cas Enzyme sequence
MLKEEYILTKEYYLGLDVGTNSVGWAVTDSQYNLCKFKKKDMWGIRLFESANTAKDRRLQRGNRRRLERKKQRIDLLQEIFSPEICKIDPTFFIRLNESRLHLEDKSNDFKYPLFIEKDYSDIEYYKEFPTIFHLRKHLIESEEKQDIRLIYLALHNIIKTRGHFLIDGDLQSAKQLRPILDTFLLSLQEEQNLSVSLSENQKDEYEEILKNRSIAKSEKVKKLKNLFEISDELEKEEKKAQSAVIENFCKFIVGNKGDVCKFLRVSKEELEIDSFSFSEGKYEDDIVKNLEEKVPEKVYLFEQMKAMYDWNILVDILETEEYISFAKVKQYEKHKTNLRLLRDIILKYCTKDEYNRMFNDEKEAGSYTAYVGKLKKNNKKYWIEKKRNPEEFYKSLGKLLDKIEPLKEDLEVLTMMIEECKNHTLLPIQKNKDNGVIPHQVHEVELKKILENAKKYYSFLTETDKDGYSVVQKIESIFRFRIPYYVGPLSTRHQEKGSNVWMVRKPGREDRIYPWNMEEIIDFEKSNENFITRMTNKCTYLIGEDVLPKHSLLYSKYMVLNELNNVKVRGKKLPTSLKQKVFEDLFENKSKVTGKNLLEYLQIQDKDIQIDDLSGFDKDFKTSLKSYLDFKKQIFGEEIEKESIQNMIEDIIKWITIYGNDKEMLKRVIRANYSNQLTEEQMKKITGFQYSGWGNFSKMFLKGISGSDVSTGETFDIITAMWETDNNLMQILSKKFTFMDNVEDFNSGKVGKIDKITYDSTVKEMFLSPENKRAVWQTIQVAEEIKKVMGCEPKKIFIEMARGGEKVKKRTKSRKAQLLELYAACEEDCRELIKEIEDRDERDFNSMKLFLYYTQFGKCMYSGDDIDINELIRGNSKWDRDHIYPQSKIKDDSIDNLVLVNKTYNAKKSNELLSEDIQKKMHSFWLSLLNKKLITKSKYDRLTRKGDFTDEELSGFIARQLVETRQSTKAIADIFKQIYFSEVVYVKSSLVSDFRKKPLNYLKSRRVNDYHHAKDAYLNIVVGNVYNKKFTSNPIQWIKKNRDTNYSLNKVFEHDVVINGEVIWEKCTYHEDTNTYDGGTLDRIRKIVERDNILYTEYSYCEKGELFNATIQSKDGNSTVSLKKGLDVKKYGGYFSANTSYFSLIEFEDKKGDRARHIIGVPIYIANMLEHSPSAFLEYCEQKGYQNVRILVEKIKKNSLLIINGYPLRIRGEDEKNNTFKRVIQLKLDQENYELVRNIEKFLEKYVEKKGNYPIDENRDHITHEKVNQLYEVLISKMKKFNKKGMADLSDKIESSKNLFIESDKLICKVKLLNEILNLLRCDINTKADLSSIKLSVNAGSFSVNKNTIGKSKIVLVNQSVTGLYENRREL

SEQ ID NO: 4350 - protein, 1433 aa, unidentified
  REGION 1..1433: note = Description of Unknown: Cas Enzyme sequence
MNDNTTPTQNTLRTEQQTQKPYYLGLDMGTSSLGFAVTDRYYNVIRKRGRHLWGIRLFEEAKTSAATRQFRTARRRRKREKERVRFLQEVFCAALDEKDPGFLQRLDDSFFYPEDKRTEQKYSLFNDPDFNDVDFHKRFPSIYHLRNHLIKNDSEQDVRFVYLALLHIMKNRGHFLYPGGEYNPDQQYNACYASFAEACNTLFGDACFPEVETELKEVLTKTDIPRSTKQKQILGIFESSGYDLPNKQMSELTKLLAGLKCNFQKLFDDEELEDADTKDCELTKDYDAARPNVEESIGAERIELIDSAYALFNWMRLSAILGEHDLLSEAKVAVYEKHKRDLRRLKNVVKSLIALDQEAIRASAKSENDFNKPHIYARIFNISQDNLTNYVAYAGHYGKRGRKKKLAYRNRNQADFLKLLKNELKPYNEIPQVKELINEIEKGDFMPLIVGTDNGTIPRQIVGAELKIILQNASTYLDFLDKETCNKIQQIFEFRIPYYVGPLNPAHRFDKDNGRYAWVVRKEHGKVYPWNIQEKVDLEKSAEVFIERMTRNCSELTGEKALPKQSLLYAEFMMLNIVNAINIKGVRLDNKTRQGLIEDLFRNSNAPKRVTRKRVQEWLKSEGYEFKDADLGGFDLDIPVHLTALHDYRKLTTTNTDIDMNDMENIVRIITLFPDDSAMIRRRLKADYGDSMTEEDLKFLSSRRYKDWGRLSEKLLAGIKGVSDKDYNKTIIEMMREEPLLLMELLSNNYSFSDQIKEINRATSPKSLDISHSILDDYMASPAVKRMIWQTLLVYKDIEKIMGGPPEKIFVEVTRGDLNPKQRTQSRKRQLEELYKSCKEDADDWNIELRKLLENEEETVLDSKHLFLYYLQQGRCAYSDETIDIKDLRTNRYDIDHIYPRSLTKDDSIHNNLVLVKAELNRAKGDRPSVPREYQEKAGKLWTRLLHQGFMSREKYNRLSRVTPLTDSELAGFINRQLVETSQTIKIVTDILERVLGDQTRLVYVKSNHVRDFRYRDFRCSDNEPDKEDLEFVKCREINDIHHAKDAYLNIVVGNVLDEKFTKDPKQFLANAQVDKYGNRYNLARLYDFDLSYRKKDLGLAWKAGKDGTIATVKKVMARNDVLYTEQSVIRTGELFDQQIIKASKVSSSEGKMPIKGSAPGREPKDDNPYLNITRYGAYNKVSVAHYALVEVEIGGRIERIIEPVPLALRMQIRNQLDQGETILTDYFKSALSTKHVRIIIQELPFNSVLEIDGYRCRIRGKTGNAYRYESHIQAYFSPKTEKQIAQVINCTRLTTIDKYNNKSMSEEDKSKIDELCRNRLAGIDLARLSKEVLNRLRTGPWNKATQLHRLAEKLEDRLSLFDAQITYENCYAFSQLLSTMSCHAQLFDLRCFGLSKSEGIRQFNKKLNNTGTYFLITQSPSGFYENAIDLWG

SEQ ID NO: 4351 - protein, 1390 aa, unidentified
  REGION 1..1390: note = Description of Unknown: Cas Enzyme sequence
MEGVFTMDKYYIGLDIGTDSVGWAVTDENYNLVRKNSKALWGIRLFDEAQKAEERRTFRTGRRRLERRKQRMQWLKEAFADEIAKVDPAFFQRLRESSFEEADKRSDDGSMLGKYILFNDKNYTDKDLKDKFPTIYHLRKALVESDEPFDIRMVYLAIHHIMKYRGHFLYDMSIDDMDPDSGESNGGASAFEECMVKLNDAVRACREEYDISDDDSDSSADVSEYSDFCPADRTVYDKIKEALTDKKYKGKKQKQAAIEEALKPDKSDKLSTEVIKLICGMNTSIKKLYGDGVEVEKDETICLEGNFESTEQKISEAIGSDKMALILAAKGIYDWALMETMISGEKYISDAMVKKYDKHCSDLAKLKSAVKATGDHKLYYEIFRSKDPKCNNYGAYVGSGTEHRCAYEDFMKFLKNRLSPYQDDPNVGEQIRSILSEVEEKTFLPKQTSKDNGVIPHQLNGVELKKILEHASKYLPFLNEKDSSGLTKAEQIMQMFEFRVPYYVGPLNPKSSHAWVSRSDEKIYPWNFDRVVNLEESNERFIERMTAKCSYTGDDVLPKSSLLYTKYMVLNELNNLTVNGHAISVADKQKIYNEVCMSGKKTTQRKIRTCLGLSEDDMIGGIDQDLKADLAPWAYYRHILERDGGYDMVENIIRHITIFGDDKKLLKRWISKDYGNVLSDKDMAYALNFKCNSWGRLSKSLLDDAEKVYHEDPQTGECLSIIDMLWRTNDNLMELLSNKYSFSTHLNEYLAKKADGHAVTLQDYLTESYASPALKRAINQTMRIVSEIVKIMRHEPAKVFVEMARGGGVKNERTVSRKAALMKLYDNCKNDCGKLYEQLEGCDDGSLRRDKLYLYFTQLGKCMYSGEPIDLSRLDSDYDIDHIYPQSKIKDDSLSNRVLVKRELNAHKADEYPLKWEVRERMRGFWAMLRAKELISKEKYERLTRSTPLGSDELAAFVARQLVETRQSTKIIANWLEQIYSDTDVIYVKAGNVSSFRQEQRITDDGTQIQACYCKNIETKQDPLFVKCRDINDFHHARDAYLNIVVGNVYDTQFTKDPRNFFRSDRDSFNLNNLYKHNVSRGDTTAWIADGNKSIETVRNTMRKNNILVTRMSFEVGGGLFDQQLLKRKNGQAMVKSSDERMTIDKRGGYNKIAGAYFALIEHMDGKKKVRSIEPVYIMHKELYETDQKRYFKEALDIDLLRVLIPKIRKDALIELDGYKLNISSRSGDKLVTKNANRLIIDPKWNQYVKDITKYLGKCKPGLADPEITTFDGITAEQNIELYDLLVAKLASKPYCAKLNDIANKIRAGKDKYIELTIPNQCRVIQQILKRFSNSASGIDLTLIGCARQAAILSLGTNINSLRGHSLYLINQSPTGFYEEKIDLLSEDLK

SEQ ID NO: 4352 - protein, 1395 aa, unidentified
  REGION 1..1395: note = Description of Unknown: Cas Enzyme sequence
MKAMQEDYFIGLDVGTDSVGWAASDTNYNLLKCNQKALWGVRLFDEAHSAAERRSFRTSRRRLERSRQRLDWLQEIFSEEIAKKDPAFFQRLQASKYDAEDKETFSGRPLGKHILFADTEYTDKDFFSDYPTIYHLRHALMSRKGPFDVRLVYLALHHILKHRGHFLFENLGEEQSNDGQEHTHDEKPAFISPEALREGLERVNGYLEAHAFSMDLPDDKEYRDDVPEQLFEIKQDTLEIFEGVLTDKTLSVSQKHKKLLEGLNISKTQTKLNNILKLMTGGTVKLKDLYDEETEGELKSICLKKDWEQNQAKLAETLGERLELILGIKQIYDYSLLSEILGKEASLSAAKIKLFEKHREDLKRLKKLIRGANEPALYKEIFRTARKDLNNYPAYSGHGSANYQCSYDDFRSYLKKSLSGLPESEELSMISAELDSGEFLPKQVTKDNGVIPHQVHEYELRRILENASSYLPFLNETDSSGLTRREQIERMFRFRIPYYVGPLNNNSPFGWAVRKEDKIYPWNFQEVVDLEKCAENFITRMTAKCSYTGKDVLPKASLLYSRFTALNELNNLRINGEKPPVEIKQKIYNECLLQGKGRNISSYLLSEGLIKKEDKLSGIDGNIKTTLASWRALGWLLERPKGKEAAEDIIRQITLFNEDKKLLERYLTKNYAGLLSKEELNKVMHMKFDGWGRLSKEFLTQIYHVDKNTGECMNIMDALWNTNDNLMELLSGSYSFKEGLEEFRLNEWEEIGYTLKDYLDQSYASPSIRRAIRQSINIIGEIEQITKRPPKRIFIETTREEREKKRTDSRRDALLELYKNCQEEAGPLFQSLEARSDGELRRDKLYLYYTQLGKCMYSGESINLSELDANYDIDHIYPQSLTKDDSLNNRVLVKRVLNANKKDVFPLSSEIRNKMQSFWAMLNSKGLISEKKYARLTRHTPLSEEELSGFINRQLVETSQSAKLIAELLKKRYEAAQTEIVYVKAGNVSSFRQDQRIDSYGNQKQAGQCTRNEETKQDPIFTKCREVNDFHHAKDAYLNIVVGNVYHIKFTSNPLNFIRQAKKNAGKDQADSSKGRYGYSLNHTFDFDVERNGEKAWTAGNNGSIAAVRRTMTKNNILFTRFAHEEKGGFFDQTLMPKKKGQFPIKSNMSIEKYGGYNKLKGACFCLVEHTNKKKRVRSIETIYIVNRQLYESSPVKYCEEILGLEQPRIILPKIRIDSLFSIDGSRVHISGRSEDKIIYKNANQLILAPHWNAYIKGIAKYLERCRAARKTLAITPFDGINSQDNIALYQLLLEKLHVKQYAVVYRAPLEALEKGFEKFTSLAVNEQCEVLVQILNLFTCKAVKMNLKLLGGKENMGIITRAKNLNTGSNLKLIHQSVTGIFEREVDLMAVDAE

SEQ ID NO: 4353 - protein, 1336 aa, unidentified
  REGION 1..1336: note = Description of Unknown: Cas Enzyme sequence
MKANWNYSVQGNYYIGLDVGTNSVGWAVTDEQYHMKKFKGNAMWGVRLFEDAKSAEQRRVSRVARRRLERKKQRLMLLELLFAEEIAKIDPQFYLRMRESDRWADEKQSGSKYSLFHDTDYTDKEYHQSYPTVYHLRSELLGSSQPHDIRLVYLAVHHIMKNRGHFLYEMSDHSNEIMTVPIALEELQQYIQDHYGRDFEPENREQFVTELQRNDIGVTEKKKMLKKAYGRIDECEELGISALLELLAGASVKLAVLFADPDLKNGEVSSVSLKDIDENADTYVDALGDRIGLLESAKTLFDAARLAQVRGDHTYISQAKVAQYEQNRSDLRQLKRYVRRTIPDKYNLIFSERQEKLNNYAAYSQYGLQHGDYHCGQEAFCKFLLGKEVGLPKPEESDTEMSTIYAKVKDGIFLPRLRGSENGVIPYQLNRQELVQILKNASTYLPFLNRVDEDGLSLQKKIIQIFEFRVPYYVGPVSNRAGHHWAVRFSGKEQEKIFPWNFEQIVDTESSAAAFMKNLVGRCTYTGEPVLPKDSLLYSEFALLNEINPIQVNRKPLPLDVKKQLVQDLFYRPEKGTQKRTVTKKDISNYLISRGLIGEGDEISGVDDKVKSKLRSWYDFEDILSRTGDRDMVEDIIRSILVFGKDKKMLRRWLKKNTHGLTEDDVKHICCLKYQDWGRLSKTLLTEIYSPDKYGEAKTIMDYLRDTNLNLMQLLSDDFQFASNAKAHFDALYGNGQTLSQRLDNLYIAPAVRRSIRQTLRIVDEIVDIEKGVPKKIFIEMARDDARAIKKKRTESRKDKLISLYKACKEGSGELFERLANEDENRLRSDKLYLYYTQFGRCMYSEEPIVLDALLRGEKYDIDHIFPQSKIKDNSLDNRVLVKNTLNREKTDEYPIKTDIRQKMQPFWYSLKQKNLISQKKYDRLTRGTKLTNEELSSFVARQLVETRQSTKALATLLKETYGNMTRIVYSKAGNVSDFRQKFGFVKCRDINDLHHAKDAYLNIVVGNVYDTKFTKQFFANIQMENYSLKKVFDFNTPEAWNTVESIQTVKKYMTKNNVLVTRMPHEAKGALYDLQIMPAGKGQLPKKNGMSTERYGGYNKLTGAYFCIVEHTDKKKRVRTIEPVFLYQKEAYERDPVIYCQSILGLKEPVIIASKVRIDTTMELNGNRLLITSRTGNTIIFKHTYQMIVGSEFEQYIKNLSKYNDRCKAKREELPVTSFDGISREKNMELYQLLTRKCGESVYRVCSSAFTIMGNEMAAYEDKFAGMSLWTQVKLLLEALNAFCCNTTYANFKELSGKGTRDRVEFNKNLSVFSSAFLINQSVTGLYEHKIDLLK

SEQ ID NO: 4354 - protein, 1347 aa, unidentified
  REGION 1..1347: note = Description of Unknown: Cas Enzyme sequence
MRENYYVGLDIGTDSVGWAVTDRQYNLLRAKGKDMWGAYLFDPAKTAAERRGYRTARRRTARVRQRIKLLQELFAPEVYAVDPAFFIRMEQSKFVETDKTIDGKDAIFHDEAFGDKEFYKKFPTIYHLRAAFLDPQQARGITDVRLLYLAIHHIIKNRGHFLFEGQNITAGDTDLLKTSLSAINAYFSDDELSEDNKHTLPLAKYAEIADVLKNRKTGKNAREAQLKKICDVDKADKTALAVIRCIVGKKVDLKDLFGENHSVAKEKLCFDDVNFDKNYETLQLQLNDEEAAFVDAMKAVYDWAMLAEVLNGNTYLSLAMIERYRIHAEHLKMLKSYIKSECPERYAQTFRRNSNNNYAAYVGSDRGRDFKHCTREDFYKYLRSFVKDEQILQLIERGEFLPKLRTSVNGVIPYQVHRAELVTILKNAEDNFPFLKEEQDGFTVAQKIIKLLEFRIPYYVGPLSSAHESKNPKKGFYWAVKNPGFERTKITPWNFDKIIDRDASEDKFISRMTNKCTYLLGEDVLPKSSLLYSEFTFRNELNNLCFKDNRLSEKEREEIFKYATEHKRVTLSGIGKLLEEKNLIECGEGKPENFSGTDGDFHSSLSSLIIMKRVLGENFDRDMAEQIILWATLTPDKDRLVRRVKNHYSLPDDVLKKIKGLSFSGWGRLSEKFLTDIWAADDDGVRTNIIEAMKSTGANLMELLSAKYGFSDAIKEFNADLNPSPNVEYSDVDELYCSPSVKRAIWRTICLVREIEKINGCPPKRIFVEMARGATKEQKGKRTTSRKEQIKALFKDIHDNERDWVAEIESQPDNLFSSDKMFMYYMQMGKCAYSGENIPLTDVFNTNLYDIDHIYPQSKIKDDSLDNRVLCKKKYNQDIKKDVYPVSKEIRDKMRDIWAVWLDKKLISKEKYKRLTRSTPLTEAELSDFIDRQLVETRQSTKAVATLLKRMYPDSEIVYSKAGNVADFKEKVNNDYKKHDKPELSIVKIRELNDLHHAKDAYLNIIVGNVYFTKFNRNAAIFFKKNNIDSYNLKNLFDYDLPGAWKVSEKERILQTARKNTCRVVRFVSEEHGKLFDATIKPKGANDKLIPLKANGSLADTDKYGGYDSASTAYFALVSSIGKKNEKTITLEAIPIYIDLLGENAVNDYIKRITGDKNATVLIEKIKLNSLLKICGSYCYLRGKTGSQIVLCNANQFIISDENAAYLKKISRFCEKNKKAEGRLTADEQHDGLTKEKNLEFYRMLVSRLCSAPYSALLGQQAPGLREKESVFAALAIEEQCSVIMEVMHFFQCNSVTSNLQAIGGVPQAGKIYNNKKLSEYEEILLISQSPTGFYQKTVSLTGFYKA

SEQ ID NO: 4355 - protein, 1352 aa, unidentified
  REGION 1..1352: note = Description of Unknown: Cas Enzyme sequence
  MOD_RES 121..124: note = Any amino acid
  MOD_RES 1314..1317: note = Any amino acid
MKKEFGDYFLGLDIGTDSVGWAVTDMDYNIQKLNGKAMWGVRLFESGKTAEERRLHRCARRRQQRRTQRIKLLQELFSEEICKVDQAFYLRLHESKLHLEDKSLEQPFALFSDKTFTDKDXXXXSKYPTIYHLRKALIDGEKITDIRLVYLAIHNIIKYRGHFLFEGQNFENIDSFELAFKGLCTYLRDEMDVDFYENNLQEIEEVIKNKKIKINDKKSRLNLLLGAETKKSKEIISLLSGGTARLSNIFEDEIYDQFEIKSITFVGDEYEKNIDRLRDTLNEKMFCLEKIKAIYDWAVLANIRQNEKYLSFSKVKTFEKHKKDLKILKRIVKELIPDRYNEIFSDINNPNNYCSYVGSTRKNNAKVQTAGNMATQESLCKYLKNCFKDISLDDNEFVYMIQEIDSNTFMPKQISKDNGVVPYQMHLEELELILQKASKEFSFLNDIDESGFTVSEKIEKIMTFRIPYYVGPINDYHKTIVDGKNRGNCWIVKRNSDPIRPWNFEKIVDIEASAEAFIRKMTNKCTYVIGADVLPKNSLLYSEFMVLNELNNLRIYGEKISLELKQSIFSRLFKKYKKVTRKRLIDYLKSEGYFLKDDDISGIDGDFNTSLASYLDFYAPSRFGVRVDENRSVIEKIILWVTLFGDDKKILKKRIVDNYSDVLTNAEIDSILTMKYSGWGRLSREFLEDFYHVFDDGIESSSNIIMSLKNTNENLMQLLSINYSYLEQIKEYNEKQTLVNKEVDYKQVEEMYISPSVKRSVWQTITIVNEIKKIMNKQPIKLFIEVTRAEGEKKATVSRRNDLIELYKKCKEEERDWVSELESKTEGDLRSDRLYLYYTQMGRCMYSGENIKLEDLFNKNIYDVDHIFPRSKTKDDSLENRVLVKRTINSEKSDVYPIPHKIQENNKAFWKVLLDKKLIGQKKYDRLTRSEDFSDDELAGFISRQLVETSQSAKAVADILGRVFDKAEIVYVKAGNVSDFRQRYNFIKVRDINDYHHAKDAFLNIVVGNVYNTKFTHSPINFIKDSNKLPYSLNRMYDFEVKRNKIIAWQPGNDGTIVRVRNTMSKNNILFTRYSTEVKGGLFDQMILRKGKGQHSIKEKMDIDKYGGYNKVTGAYYMLIEHLVKGKFVRTIEFVPVYLSKILSDIDEKMSYCLNELMLINPRILIPKIKINTLFNVDGFRMHLSSRTGNQLVFKNANQFCINEEKSIIIKNILKYKQRVVEARTKIPITSYDNISAENNNLIYEFFLDKLNNSLYNKKLSAQARIFYNGRENFLGLELIEQCEVITEALYLFQCNPILSDLSKIDGSKNAGRXXXXGRLYLSCDITKIAKISIINQSPTGLFFKEIDLKKI

SEQ ID NO: 4356 - protein, 1342 aa, unidentified
  REGION 1..1342: note = Description of Unknown: Cas Enzyme sequence
MDKKYYIGFDIGTESIGWATTDTEYNLLKTRGQDFWGVYLFDEAKTSETRRASRTSRRRTARRRQRIKLLQELFAQEIAKTDFCFFERLNNSKYNVKDKNDGVAYRDCLFHDEAFGDKEYFKNYPTIYHLRAAFLDAQRAKEIKDVRLLYLAVAHIIKNRGHFLFEGQQFSVGNKDVVLAAFSAINEILTSIDENAKTLSLANVDETLKTLCGGKLTKSDKERRLKLLLETENDKTCNAIIKAIVGLQVNVKNLFGDEEPQIKNFCFDDAGFETEKLKDAFDEDEYALICEAKAIYDWAVLSQILKNHKYLSEAMCEIYDAHAADLELLKTYVKENFGQEKYREVFRLCKNVNNYAAYVGKDRNRSFCHVSKDDFYKYLRSFVTDEEILKRMDEGSFLQKQRSNANGVIPYQVQLAELKRILDNASENFPFLNDVSDGLSVKEKIRSLFTFRIPYYVGPLNTAHIDKGFAWVKKYDGAENVKITPWNFDKVVDKQASEDEFIKRMTSKCTYLVGEDVLPKQSLLYSEFAFLNELNNVTFKGRRLDKQAREVIVEYAKNNNRKITVKVIADVLAKAGLIEQSEKAKENFAGIDGEIKSGFSTLRFFKRLFGDNFNREQCETIVRWFTVMGDKSDAAERAKRAFKFDEATTKQLKGLNCSGWGRLSKEFLDGSEITTVDENGEILTIIQAMRETGCNLMELMSSKFGFESSVNKFNDQYAGDKKVTYKTIEDLYCSPSVKRAIWRTVCLVREIEKVQRCAPSRIFIEMARGEDKSKKGARTKSRKEQLLELYKACKTDVLQWVTQEFIDALENVEDTKLLSDKLYLYYIQMGRCAYTGRPISIEEVFNTNVCDIDHIYPQSKIKDDSIINNKVLCYKTANAAKGDGYPVAYEIREKMLPIWTVWYNKKFISDEKFKRLTRSTPLGIDELADFINRQLVETQQSTKAVAQILKRMYPDADVVYSKARNVVDFKNRINKNRPVLVKVREINDLHHAKDAYLNVVVGNVYYTKFNRNAAIFFQNNNADSYNMNRLFEENVKNAWNPSYKQKVVSVANRNICKVVRFTSEGEGKLFDATVKTKGANDKLIPLKRNCPLENTADYGGYDNATTAYFSLVRSVGKKGKTQLSIEAIPVYVDLLGKDKVSDYLKNTVGLEQPQILIEKIKINSLLKLNGAYVWLRGKTNDSLTICNANQLVLDSEMTAYVKRIVSYNEKRKNNKDSKVDETYDKISKTGNLTLYNALLDKLTSHPYINFSALQKQAEFLKEKRDVFCELSVENQCAVLLEILHLMQCNSAMSNFSLLSGNPTVGKLTCNKKLSETGECLLITQSPTGYYKNIVNLTAYYRQ

SEQ ID NO: 4357 - protein, 1354 aa, unidentified
  REGION 1..1354: note = Description of Unknown: Cas Enzyme sequence
MKQDYYIGLDMGTESVGWAVTDVDYNLVKKRGQDYWGVYLFDEAKTAQGRRASRTNRRRLARVRHRLNLLQELFDSEISAKDFGFFYRLENSKYFDEDKPEIARGKFLLFNDKDFGDKEYYKNYPTIFHLRNALRTQEIKDVRLLYLAVHHILKNRGHFLFGEQDFKVNDASDVSGEFEKINRFLRENDGAELDREKIPEIFETLCNVDLAKRERKEKILKLSGNSKNKLLGEALNAVVGLEFSLSKMFGEDRDFQDIKKMSLANSSFEEDFAKAKMALDDDEADFLETLKKVQSIASLCNILHGKEFISQAKTETYETHRRDLSELKKYVRENCPEKYALVFRRQAKKVNKNTSGADENEKDDKKVNNYAAYIGMDKGKGFAKCKKEEFYAFLKKEIGIKDESILAKIDEGVFLPKQISAENCDIPYQVHLAELKAILANAENYFPFLKQKDENCEMTVSEKIISLMKFRVPYYVGPFTDKETGFSWMIKKEGLSTQKITPWNFDDVVDKDASEQKFIERMTNFCTYLTGEKVLPASSFLYSEYAFLNELNNLKVNGTKDLRVKNILLDYAKTSKKLTLKKCCEQLVKNGLLPEGSKARDVFSGTDGDFKNSLSSYIDFKKIIGDKADLYRDMCEEIILWITVISDKKRLEKLIKSNYGTVLSDEEIKGLKALNYTKWGRLSKKLLDGIFETDSEGEVGNVSTIEKMRTDTENFMELLSNRHNYKRAIDLANSESVEDKKVTYRAVEELYCSPAVKRSIWSALKIVSEIKKVQGYSPKKIFVETTREKPDGARKGQRTVSRKQRLLDVYRKNLRNEKELIKKIEETEDSKFNSDEDKLFFYFTQMGKDAYTGEKIELDDLSKTEIYDIDHIYPRSKIKDDSLDNRVLTRKKINQGVKQDIYPLPAEIRNKMEGLWRQLKDKKLISEEKFYRLTRSTPLTEEECGDFIKAQLVATSQSAKAAIQLLKRMLPESEIVYSKAVNVNEFKNRLKFVKIRELNDLHHAKDAYFNIVVGNVFNTKFNHNAAVFLRNNGTGNYDLKRLYDFDITNAWKAGDENRIRSVAEKNTCRVVRFSKTEKGQFYKVTICPAGKNDKLAPIKGKAPLNDTSKYGGYNKETTAYFMLVKSKDKKKKDKTSLSLECVTVLADKNFRTAEDKLKYCETRLKLEKPEILIEKIKLNTLFKINGSYAWIRGKTNDRLELCNANQLWLDDGSAKELKKISNHFRDVKKYKNKDLSVREEFSKEQNLALYDLFTEKLGGKIYAGLPVQEQIKNLEKGRDKFEALELKDQLFVLMEILKFMRCNSMTSNIKLIGGAKNAGKLTIDKKFIQDSDVKMISCSPTGYFCKVVDFKRFL

SEQ ID NO: 4358 - protein, 1364 aa, unidentified
  REGION 1..1364: note = Description of Unknown: Cas Enzyme sequence
MEQKGYYLGLDMGTSSVGWAVTDNEYHLLRKKGKDMWGIREFEPAETAAERRSHRIDRRRRQREKARIGLLREYFADAIMQVDKDFFIRLDNSKYFMEDKDPKLHSVNGIFDDSNYKDADYYRDYPTIFHLRKALLDIDNSKKVFDVRLVYLAVLNMFKHRGHFLLSTTDGGMSAVQIEEMYQSVIEGFNRDYGYALECQPFEQVLSIISDREIGRKRKYEKMVELFDVAKSNKKAHEFLKCMCGLKVNANIIFGVDAEQKIAVCFYDFSYANEISNLMEQLEDEKYAVIEQMKDIYDYAILAGILKKGQEYLSPVRVDIYNKHHEDLKLLKELYRKYKTQKEYDEMFRSNGDGSYSAYVNSTNSSVESKKYRRNMKGRKSEDLYTTIKKAFKDYAEDEKVQYIFTQMENEQFLPKQLTGANGVIPNQVHRKELARILQNAQQYLPFLQEIDESGLTVTERILQLFSFQIPYYVGPLGNQSKTGWVKRKEEGTILPWNINEKIDMKATSEEFISRLIRSCTYLADEKVMPKASLTYERYCVLNEINNIRIDGERIDTQLKQSIYIACFGEGKKVTKKKLCNHLIAQGVITSEEQVTGIDSTINSSLSSYGKMYKIFGDKLKEDQYWNIAEDIIYWGTVFADSREMFKEYLQQYIEQGVLESEEVKRILGYKFKDWGRYSKALLELQGCDKTTGEMISINRAMWDYSMNFMELINSDEFTFKNELAQKKTKAVKLLADFEYEDLQEYYFSTPVKRMIWQTILVVREIEHVMGCAPTKIFVEMTRNDEEKGDKGRKVSRGNQLLEAYKTIENTEIHNWKKEIMEAEGNGKLRSKKLYLYYMQMGRDMYTGEEIDLARLFDDNLYDIDHIYPRHYVKDDSILNNLVLVNKVANEHLKKDLYPVPDEITSNPKVRELWNTLHRNTRLQHCKLMNDEKYNRLISKTPFTEKQLGDFIARQLVQTSQGTKGIAELLQQLMPESRMVYAKASNVSEFRNRNGFVKSRLVNDFHHAQDAYLNIVVGNVYDTKFTQNPWNFIKKEYAKDKEANHYNLDKMFAWDVVRGDETAWIAEKKDCKGTIDTVRRMMKKNTPLMTRMSFEQHGEIANATLCSAKKAKPDNYFPLKTSDERMKDVTKYGGYTSATIAYYFIVKHKEGKKQSISIEGMPIYCKERVENSINGLENYCIEQLQYGDVQILYRKLKIQSLIEVNGYRMHLSGKTGNQLIMRNATNLCLEDKWIQYIKKIEKYIETAVLNEIINTQENELLYDKLVAKHVNTVFSKRPNAYGDKLKKKREEFCSLEIKKQCKVLHEILKLTQIGTVVADLTLIGGAARTGIMQINKNIKEIDKVFLVEQSITGLYEKKESILSL

SEQ ID NO: 4359 - protein, 1369 aa, unidentified
  REGION 1..1369: note = Description of Unknown: Cas Enzyme sequence
MKEKMEYYLGLDMGTNSVGWAVTDKEYRLMRAKGKDLWGVRLFERANTAEERRAYRINRRRRQREVARIGILKELFADEIAKVDANFFARLDDSKYYLDDRQENNKQKYAIFADKDYTDKEYFSQYQTIFHLRKELILSDQPHDVRLIYLALLNMFKHRGHFLNKTLGTSESLESFFDMYQRLAVCADGEGIKLPETVDLKKLEQILGARGCSRKATLEHISEIMGINKKNKPVYSLMQMICGLDTKMIDLFGQKIDEEHKKISLSFRTSNYEEMAEEVRNTIGDDAFELILTAKEMHDFGLLAEIMKGYSYLSEARVAVYEEHRKDLAKLKAVFKQYDHKAYDEMFRIMKNGTYSAYVGSVNSFGKIERRTVKTSREELLKNIKKILTGFPEDDATVQEFLGKIDSDTLLQKQLTASNGVIPNQVHAKEMKVILKNAEKYLPFLSERDETGLSVSEKIIALFTFTIPYYVGPLGQQHLGKECAHGWVERKEKGTVYPWNFEQKVDLKASAEHFIERMVKHCTYLSDEQALPKQSLLYEKFQVLNELNNLKIRGEKISVELKQQIYRDVFEHTGKKVSMKQLENYLKLNGLLEKDEKDAVTGIDGGFHSYLSSLGKFIGILGEEAHYGKNQNMMEKIVFWGTVYGQDKKFLRERLSEVYGDRLSKEQIRRITGMKFEGWGRLSKEFLLLEGASREEGEIRTLIRSLWETNENLMGLLSERYTYSEEVREKTLECEKSLSEWTIEDLEGMYLSAPVKRMVWQTLLIVKELEKVLGCAPRRIFVEMAREDAEKGRRTESRKQKLQNLYKAIKKEEIDWKKEIDEKTEQAFRSKKLYLYYLQKGRCMYTGESIRFEDLMNDNLYDIDHIYPRHFVKDDSLEQNLVLVKKEKNAHKSDVFPIEADIQKKMSPFWKELKERGFISEEKYMRLTRRYGFSEEEKAGFINRQLVETRQGTKSITEILGQAFPDVDIIFSKASNVSEFRHIYGLYKVRSINDFHHAHDAYLNIVVGNTYHVKFTKNPLNFIREAEKNPQNAENKYNMNRMFDWTVKRGNETAWIASSDKEAGSIKIVKAILAKNTPLVTKRCAEAHGGITRKATIWNKNKAAGSGYIPVKMNDARLLDVTKYGGLTSVSASGYTLLEYDVKGKKIRSLEAIPIYLGRVSELTNEAILKYFEKVLIEENKGKEITELRICKKFIPRESLVRYNGYYYYLGGKSVEQIVLKNATQMAYSEEETCYIKKIEKAIEKTYYEEVDKNKNVILTKTRNNAMYDKFIIKYQNSIYQNQSGAMKNSIIGKRNEFLTLSLEKQCRILKALVEYFRTGDIIDLRELGGSSQAGKVAMNKKIMGASELVLISQSPTGLFQQEIDLLKI

SEQ ID NO: 4360 - protein, 1345 aa, unidentified
  REGION 1..1345: note = Description of Unknown: Cas Enzyme sequence
MKNNQNDKRRGDYYLGLDVGTDSAGWAVTDKDYNLLKCNGKQMWGARLFSEANSAADRRTARTSRRRLERRKQRLNLLEMLLNNDIAKLDPSFFVRFHDSNLWAEDKHDTSCKYSLFNDSSYTDKDYLKEYPTIYHLRSELIHSSEPHDIRLVYLALHHILKSRGHFLYENSNNPEGKTLEEATMDLVQLLKDNDIEFSPNNRASFAEALISSEGITHKKEELANAYGESEKDEEAYVDLSSLIDLLSGASVKLDKLFNDPELKEADLKVVSLKEDLDSKFDQLSEELEDRIEVILTAKEVYDVARLGQVLGGNRYISDAKVALFNKNKKDLSILKRYVKKNCPEEYKDIFNEQKDVKNYAAYSRYKTDSRCTQEEFCTFISKKVGGMKVSDDPEEQRVYEEISNKVFLTKLKGTENGLIPFQLNLKELVKILDNASGYWNALNEKGSDGITIKDKIIALFTFKIPYYVGPLNKNAKHYWAVRTDERIYPWNFTDVVDEKKTAENFIKNLIGKCTYTGEDVLPMNSLLYSEYAVLNEINNIKVNGKEISVEVKKSIYNDLFLESSKKVTKKKIYNYLLANGYIEKMDEISGVDDEIKSNLKSWHDFRNIIEKTKDTQQVESIIERVLVFGNDKKMLKTWLKDNTHGLDNDDYKMIMRLNYKDWGRLSREFLEDIYHVDSDGEAFNIITMLRDTNQNLMMLLSSHYQFAEKADEYRHDHFSVGESLHERLEEMYIAPAVRRSIWQTMRVVDEIVDIEKSAPKKIFIEMARTSSKEMKKKRTISRKNVLMQLYASCKKQESDLYGKLQSETDQSLRRDKLYLYYTQMGRCMYSGDPIDLDKLLHDDTTYDIDHIFPRSRIKDDSLDNRVLVKSKLNRDKTNDYPLSDDVRKKMESFWKMLSEKKLISTEKYSRLIRNYPLTDEELSSFVARQLTVTQQSTKALAEILNQSYPSAKIVYSKAGNVSEFRQKYEIPKFRDVNDMHHAKDAYLNIVVGNVYNTKFTDRFFKNIHSENYSLNRVFEFSTPSAWTAPAKEKMEQYQIRLKNKDINAHDILDGTFKTVYKYVYKNTPIVTFAQFQTKGVLFDLTIKGKNKGQQPIKKNLDISKYGGYNNRYAAYYFIAEFNDTHILIRKILPVYIDSLKEYETNPLNYCANILNLNEPKIVIPKLRANSLLELNGVRYRFTGRSNESIICQHDYQLAIDDKHAKYLKLLNKNLISMKLSKGNITDYNNDISIEKNTLMFDWMVEKLLTNTYQCVFSGIVSKIVDKKPTFLTLDVTSQAVVLTEMLKLFKCNSLSSNLQKIGLGSNVGKMNRNSKISSYSTAYLINQSATGLFEVKQDLLESCK

SEQ ID NO: 4361 - protein, 1365 aa, unidentified
  REGION 1..1365: note = Description of Unknown: Cas Enzyme sequence
MKSKEKFAKIAGNYYVGLDIGTDSVGYAVTDKSYELLKYKGEPMWGSHLFDAANQCAERRGFRTARRRLDRVQFRVHLIDTIFAKEISKIDPDFYIRKQESRLYLEDKSTQDKYVYFNDENFNERDYYEKYPTIHHLILDLMTSDEKKDLRLINIAIDWLVAHRGHFLSEVSVDHVDELKEFNSIYEDFISCFDLLDIDRPWADTDIEEFGTILKKKRVTEKESALTKLLFGDGKPPKASEDSDIDVKTLIKFISGRKVKLSELFPKLELEEEKSVQISDEVDEYIALVDDYSELIIKIVAMYEWSVLSDILGTSTYISEAKVKIYDKHKKDLADLKCFVKRNRPKQYNKIFRDSDEKLTNYTAYSYNVSSVKPGQKLPNKKCSIDDFYAFLKKELNLNDIENTYEDELDKNYLKGILAEMDTKDFMPKQVITDNRVIPYQLYYVELRAILDKAQKYYPFLSEKDSDGISKVDKVFSVFKFRIPYYVGPLRKDNSKYAWIERKAGTIYPWNFDTMVDEDKSEQNFIDRMTNTCSYIPGNTVLPKYSLLYSKFMVLNEINNLKVNEIPISVEAKQFIFNELFCRYAKVSKKKIEEALVTNNFMQKGDILSGVDIIIKSSLKSRNDFRRLLSEGVLTEADIEKIVERSTYTEDKCRFKNWLKASYPDLSEDDLKYISKLKYKDFGRLSHFFLSGLEGCDKETGEAGTIMHFLWSTNDNLMQLLSEKYTFNEEVSNLRKDYYSKHKLNLEDQLEEMGISNAVKRPVIRTMSVLKDVTSTIGSAPKKVFVEMARGPEEKGKRTLSRKEQILELYKNVETDTVKLRKELEAMGEEANNTLQKDSLFLYYTQLGRCMYTDEPIDLVKLQKNSEMYDIDHIYPQSKVKDDSILNNKVLVLKEENGRKSDTYPLSSEIRAKQRNFWERLKKAGLITEEKFLRLIRNTPFSDDEKMGFINRQLVETRQSTKAVTQIINLYYPETEVVFVKARLASDFRNEFLWPKSRIINDLHHAKDAYLNVVVGNVYHEKFTKKWFNINDSYNLKTGKFFTRDVKHGDEYIWKADESLVKVKNTFKKNNIHLTRYAYCKKGGLFDQMPVKKAVGLTPLKSGLDTEKYGGYNKAAASFYVLARYNKGKNKEITFIPVELMHSDRFMNDDAFAIEYTEKFLMSIQTKKVDCIEFLLDKRPIKIKSELSFDGYRVWVNGKDSGGKMVLLSNATSLILSASEEEYVHRIEKLLDKIEKNPKFKIDSVFDKVSKDENLKLYETLLLKYKESIFKMMPANQEQALNLGKDKFETLNLIDQFKVLKTVVESLKTGRAAGFDLELIDGKKKVGTIRVNSNISNFKYKEVYILDQSPAGLHVKKSINLMDLL

SEQ ID NO: 4362 - protein, 1365 aa, unidentified
  REGION 1..1365: note = Description of Unknown: Cas Enzyme sequence
MKSKEKFAKIAGNYYVGLDIGTDSVGYAVTDKSYELLKYKGEPMWGSHLFDAANQCAERRGFRTSRRRLDRVQFRVHLIDTIFAKEISKIDPDFYIRKQESRLYLEDKSTQDKYVYFNDENFNERDYYQKYPTIHHLILDLMTSDEKKDLRLINIAIDWLVAHRGHFLSEVSVDHVDELKEFNSIYEDFISCFDLLDIDRPWADTDIEEFGTILKKKRVTEKESALTKLLFGDGKPPKASEDSDIDVKTLIKFISGRKVKLSELFPKLELEEEKSVQISDEVDEYIALVDDYSELIIKIAAMYEWSVLSDILGTSTYISEAKVKIYDKHKKDLAELKSFVKRNRPKQYNKIFRDSDEKLTNYTAYSYNVSSVKPGQKLPNKKCSIDDFYAFLKKELNLNDIENTYEDELDKNYLKGILAEMDTKDFMPKQVITDNRVIPYQLYYVELRAILDKAQKYYPFLSEKDSDGISKVDKVFSVFKFRIPYYVGPLRKDNSKYAWIERKAGTIYPWNFDTMVDEDKSEQNFIDRMTNTCSYIPGNTVLPKYSLLYSKFMVLNEINNLKVNEVPISVEAKQFIFNELFCRYAKVSKKKIEEALVTNNFMQKGDILSGVDITIKSSLKSRNDFRRLLSEGVLTEADIEKIVERSTYTEDKCRFKNWLKASYPDLSEDDLKYISKLKYKDFGRLSHFLLSELEGCDKETGEAGTIMHFLWTTNDNLMQLLSEKYTFNEEISNLRNDYYSKHKLNLEDQLEEMGISNAVKRPVIRTMAVLKDVTSTIGSAPKKVFVEMARGPEEKGKRTLSRKEQILELYKNVEADTVKLRKELEAMGEEANNKLQKDSLFLYYTQLGRCMYTDEPIDLVKLQKNSEMYDIDHIYPQSKVKDDSILNNKVLVLKEENGRKSDTYPLSSEIRAKQRNFWERLKKAGLITEEKFSRLIRNTPFSDDEKMGFINRQLVETRQSTKAVTQIINLYYPETEVVFVKARLASDFRNEFLWPKSRIINDLHHAKDAYLNVVVGNVYHEKFTKKWFNINDSYNLKTDKFFTRDVKHGDEYIWKADESLVKVKNTFKKNNIHLTRYAYCSKGGLFDQMPVKKAAGLTPLKSGLDTEKYGGYNKVAASFYVLARYNKGKKKEITFIPVELMYSDRFMNDNAFAVEYTEKFLMSIQTKKVDGIEFLLDKRPIKIKSELSFDGYRVWINGKSNHGRQILFSNATSLILTSEHELYVHKIERVLGKLQKNANYKIDKVFDEVSEEKNLTLYDILSDKYQNSIFCKMPANIGKILLDGREKFQSLSFIKQLELLEIIIGSLKTGRSAGVGLKELVDTKSNGAIVIGANFTTYKCKEMLIIDQSPAGLHVKKSVNLMDLL

SEQ ID NO: 4363 - protein, 1363 aa, unidentified
  REGION 1..1363: note = Description of Unknown: Cas Enzyme sequence
MIKGDYYLGLDLGTNSVGWAVTDLEYNLLRAKGKDLWGVRLFDEAQTAANRRSKRIARRRIERDKARKALLKEFFADEIEKIDPVFYMKMNESFFKLKDRSMENQQPYSLFNDFNFTDKEFHDKYKTIFHLRSDLIHSDKTFDVRLVFLAIYNMFSHRGHFLNATLDAEKNDTGFKNAYVEMIEVLEEHEFGIPSNIEVDAIEKILSDNKTSRTNHFEQLLALFNIIKKDKRNCAVIRLLAGLSINLKDIYDQELDKESDKKFGFRESNYEEVIEEVYNIVDEDYKNIIEKIKMVHDAGLLSKIMIGCEYLSDARIKIYDMHQKDLKQLKALLKKYNKEAYEKLFRTIESGTYSAYVGSVNSHGKIERRQGKERGKDVLYKSIEKAIKDIPDNDKDKIEIKAKIDAEIFLEKQLTNKNGVIPNQVHSRELRAILNNAEKYLPFLSEVDNKGYSIKEKIIQLFEFQIPYYVGPLGREFNGKKGYNCWAVRKESGRVFPWNFDEKIDKNASAEEFIKRMVRKCTYFNDENTLPKKSLIYEKFMVLNEINAIRINGCRLDTETKQAIYNDLFIKGKKVTSKKIKEYLVSINKMDNESEISGIDTEWSKTLTSIAKFKGVFNGKIENNKEIIEDIIFWSTIYSGDKKLIRSKIETVYPNILNENQLKKILGFRFTGWGNLSRHFLEGIMGKDKNGNAENSIIGFLWNEQVTLQELLSQNYTFRETIDEQFLGVEKPLSSWEIEDLDDFYLSPSVKRMTWQTMKIVEEIQRVLGKSPKRIFVEMTRSGGKKERTVSRKNKLISLYKSLGKEGKEFINEIDGKDENFFNRRKVYLYYLQMGKCMYSEEVIDFHKLLNDNLYDIEHIYPQHYIKDDSIENNLVLVKKELNAGKQDKPLTSEIQADRYTFWHMLKDKGFISSEKFTRLTRRNDSFTEDELTGFINRQIVETSQASKAITQILQQSMDENCKIVFSKAKLISEFRQKFDLPKSRIVNDLHHANDAYLNIVVGNAYYVKFTGNPYKFIKNAIKNQELNENKYHLSDFYKNDIYNKNEVAWRCGEKENPTIATVKKMINKLTPIITRKVEVEHGEYFKETLNSHLESKKGIYIGQKTHNSVLSNVEEYGGKTKIKIQGYALIEYKKGNDTIRMFKAIPWLIGNIKNIDEHKLIAYIIDDLQTEDVNTDIKDLRICKKFISKNSLIKMNGAYYYLGGKTGNRIEFKNAMQFKIPLDRIEYIHKLEKANAKNNYYEVDRLHNMVITNEKNIDLYKFIVEKLRIKPFCKSRKTSLVDIFNDLFDTFKTTDISNQCIIIERILRNIKNSDAINLGPIGGGSSQGKTFVMARIDKCTELKLIQQSVTGLFKSETDLLKI

SEQ ID NO: 4364 - protein, 1382 aa, unidentified
  REGION 1..1382: note = Description of Unknown: Cas Enzyme sequence
MENKQYYIGLDVGTNSVGWAVTDTSYNMLRAKGKDMWGARLFEKANTTAERRTKRTSRRRSEREKARKAILKELFADEINKIDSSFFIRLEESKFFLDDRSENNRQRYTLFNDATFTDKDYYEKYKTIFHLRSALINSDEKFDVRLVFLAILNLFSHRGHFLNASLKGDGEIQGMDVFYNDLYEACEEFEIDLPQISNIDNFEKILSQKGKSRTKILEELAEEMSISKKDKTKYAILKLICGMKIKVGDIYADEDIQDEDKKKDFGFRESNYEERALEVKEIIGDEYFDLVERVKAVHDMGLLSNIIGNSKYLCEARVEAYENHHKDLLKIKELLKKYDKKAYTDMFRKMTDKNYSAYVGSVNSNIAKERRSVDNRKVEDLYEYIKKIALKNIPDDNEDKIEILKKIETGEFLKKQLTASNGVIPNQLQSRELRAILKKAESYLPFLEEKGEKNLTVSEMIIQLFEFQIPYYVGPLDKNPKKDNKANSWAKIKQGGRILPWNFEDKVDVKGSRKEFIEKMVRKCTYLSEEHSLPKQSLLYEKFMVLNEINNIKIDGEKISVEAKQKIYNDLFMKGKKVSQKDIKKELISLNIMDKDSVLSGTDTVCNAYLSSIGKFTGVFKEEINKQSIVDMIEDIIFLKTVYGDEKRFVKEEIVEKYGDRLDDVRLKRILGFKFSNWGNLSKSFLELEGADVGTGEVRSIIQSLWETNFNLMELLSSRFTYMDELEKRVKKLEKALNQWTIEDLDDMYLSSPVKRMIWQSMKIVDEIQTVIGYAPKRIFVEMTRSEGEKVRTKSRKDRLKELYNNIKEDSKQWVKELDAKDESYFRSKKMYLYYLQKGRCMYSGEVIELDKLMDDNLYDIDHIYPRSFVKDDSLDNLVLVKKEINNRKQNDPITPQIQASCQGFWKILHEQGFISNEKYSRLTRKTQEFSDEEKLSFINRQIVETGQATKCMAQILQKSMGEDVDVVFSKARLVSEFRHKFDLFKSRLINDFHHANDAYLNIVVGNSYFVKFTRNPANFIKDVRKNPDNPAYKYHMDRFFERDVKSKNEVAWIGQSEGNAGTIAIVKKTMAKNSPLITKKVEEGHGSITNETIVGVKKIKFGRSKGEKTDKIPKKINVKAYQPIKTNDERLCNILRYGGRTSISTSGYCLVEYVKKKKTVRSLEAIPVYLGRKDSLTEEKLLNYFNYILNDGGKDSVSDIRICLPFIPMNSLIKINGYLYYLGGKTGEQIYIYNAQQLKMKKEEVEYIRKIEKAVSLSKFDEIDREKNPVLTEERNIDLYEKIQKKIEKTVYKHRLTSIENSLIYGKQKFVNLDFEKQCKILNSILYNLTKTFKADLRDIGGSENSGGCLCSKNINNYKEFKLIQQSITGLYSCEKDLMTI

SEQ ID NO: 4365 - protein, 1401 aa, unidentified
  REGION 1..1401: note = Description of Unknown: Cas Enzyme sequence
MKFIRKVKLMDNKKEYYIGLDMGTNSVGWAVTDTEYNLMRAKGKDLWGVRLFEKGETAANRRTKRVQRRRIEREKARKAMLRLFFSDAIDAVDPGFFQRLDESFLQYEDRSDSNKQMNALFNDGGYTDFDYYNEYPTIFHLRKALLHEDREFDVRLVYLAILNMFSHRGHFLNTNMSSDDDRDNNFDSAWRELIDAFETSQLSNNKEINNISAVLDTTMYPEIKQIIGDRGKTRSSKFDALRDLLGVPKSEKHICAVLKLVCGLMVTVKEILSNIENPAVDQEGLKVSISFTDSNLEEKLDKIQEVLEDEYFDVILKAKSAYEICLLSSILGNNKYLSDSRVEMYERHRQDLQDLKSLLAEYDKDAYEKIFRTMDKGSYSAYVGSVNSHGNKIRRLGTTNANSKTAKEELYKLVKNAINNSVPEDNVVKARILDKIKRECFLEKQLTSNNGVIPNQVHTIELKRILSNTERYLKFLQDIDEDGLSIKDKIIQLFEFQIPYYVGPLGREFNGVIGYNNWAVRTEEGLKPGVKVMPWNFDKYIDRTASAEEFIKRMLRKCSYMSDEYTLPKHSLAYEKFMVLNEINNIKIDNERISVDAKQGIYNDLFATGNKVSRDKIKKYLVKHNYARYDVEITGLSDETCTTKLASLGKFRAIFGDAVLKQSNKDIIEDIIYWSAIYSGDRKIIREKIEDKYPNKFDKKQLNKILGFKFEGWGNLSKKFLELQGTSKVTGEIDSVIGFMWNGQENLMELLSDNYTFTSQLNGMMNDTIKPLSCWKIEDLEDMYLSPSVKRMVWQTMKIVDELQSVIGYAPKRVFVEVIRGDGVKERTTSRKQKLIDLYKSIKGEAKDWIKEIENRDESAFKNRKLFLYYMQKGMCMYSGEKIDLDNLMNKNLYDLDHIYPKHFTKDDSIHNNLVLVKKQINNGKQDMPITREIQAKMHGEWKALLDDKFITSEKYARLTRKRYEFSDEEKVGFINRQLVETSQATKAITRIFSQAFEKDTKIVFSKARLVSDFRQKFELPKSRVLNCYHHANDAYLNIVVGNSYYVKFEGNPARFIKESKGKENENEYKYHLTNFFDNTVQNKKEIAWRVEEGNNTITTVKRTMAKYSPLVTYKTEEGKGEYFDGTIYPKSKSKNIGYIGLKTKNSPLSNVKKYGGKTSIAKSGYCFVKYIEKNKLIKTFEPIPIYLGESKNLTTDILNKYLENLYIKKEQYDAADTFEVVIGYIPPKTEIIIDGYRYVIGGSSGDQLYIDGSMQIKTPKEYVMYLHKLEKANNKKDYTEVDETGNLVITSERNVDLLSFLVKKFKAKPFCNKINSINSELKNGIERFSKLDVSDQTTILLDVIDNIYGRKREVNLLHIGGKAAVGKTFFNKKISQRKEAIIVMSSYTGIYTREVDLLNI

SEQ ID NO: 4366 - protein, 1393 aa, unidentified
  REGION 1..1393: note = Description of Unknown: Cas Enzyme sequence
MDNKKEYYIGLDMGTNSVGWAVTDTEYNLMRAKGKDLWGVRLFEKGDTAASRRTKRCQRRRLERENARKAMLRLFFADAIDAVDPGFFQRLDESFLQYEDRSDSNKQMNALFNDSGYTDLDYYNEYPTIFHLRKALLHEDREFDVRLVYLAILNMFSHRGHFLNTNMSSDDDRDNNFDSAWRELIDAFETSQLSNNKEISNISALLDASNYPDLKQILGDRGKTKSSKFDILRDLLDIPKNEKHTCAVLKLVCGLKITVKELLSNIKNPSVDPEGLKISIGFAESTLEDNLNKIQEVLEDEYFELILKAKIVYEICILSSILGNNKYLSDSRVEMYERHRQDLQDLKSLLDEYDKDAYEKIFRTMDKGSYSAYVGSMNSHGNKIRRLGPISKEDKKVKENLYNLIDKVLEDSVPEGNVIKARILDKIEKDCFLEKQLTGNNGVIPNQVHTKELKRILSNAEKYLKFLQDIDEDGLSIKDKIIQLFEFQIPYYVGPLGREFNGVKGYNNWAVRTEEGLKPGVKIMPWNFDKYIDRTASAEEFIKRMLRKCSYISGEYTLPKHSLTYEKFMVLNEINNIKIDNERISVEAKQGIYKDLFTAGNKVVKKKIKEYLVKHNFARNDVEITGLSDETCTTKLSSLGKFRAIFGDDIDKQSNKDIIENIIYWSTIYSGDRKIIKEKIEEKYPYLFDKKQLNKILGFKFEGWGNLSRKFLEQQGTSKVTGEINSILGFMWDGQENLMGLLSDNYTFTSQLNGMMDDAIKPLSSWKIEDLEDMYLSPSVKRMVWQTMKIVDELQSVISYAPKRVFVEVTRGDGEKERTTSRKQRLIDLYKSIEGEAKDWIKEIEARDESVFKSRKLFLYYMQQGMCMYSGEKIDLDNLMKDNLYDLDHIYPQHFTKDDSIHNNLVLVKKEINNNVKKDMPITREIQAKMNEKWKALREGDFINSEKYARLTRKRYEFSDEEKVGFINRQLVETSQSTKAITRIFSQAFDNNTKIVFSKARLVSDFRQKFELPKSRVLNCYHHANDAYLNIVVGNSYYVKFEGNPARFIKESKGKENDKKYKYHLSKFFENTVQNKNEIAWSVGEGNNTFTTVKRTMAKYSPLVTYKTEEGKGEYFKDTILPKSIAKPIVYTGLKTKNTPLNDVTKYGGRTSIGISGYCFVKYTEKNKEVRKFETLPIYLGGSKSLSIERIQEYLKESYTKKGMSQAAESVEVLIKFVPKKTELVLDGYKYVIAGSSDSRMCLNGMIQINMDPDIIEYMHKIEKAKETDDYTEVDKYGDKIITIQKNLYIFDKLIEKMENKPFKNKKNTSIEIMQSGREKFKKIEIPKQVTIILDIINNMYGIKQEVDLRAIGGPAKGGKCRASREIDKITEVRLITKSCTGLFERQIDLLKI

SEQ ID NO: 4367 - protein, 1391 aa, unidentified
  REGION 1..1391: note = Description of Unknown: Cas Enzyme sequence
MDNKKEYYIGLDMGTNSVGWAVTDTEYNLMRAKGKDLWGVRLFTEAQPAVNRRTKRVQRRRIEREKARKAMLRLFFSDAIDAVDSGFFQRLDESFLQYEDRSDSNKQMNALFNDGSYTDLDYYNEYPTIFHLRKALLHEDREFDVRLVYLAILNMFSHRGHFLNTNMSSDDDRDNNFDGAWRELIDAFETFQLSNDKEINNISALLDTSKYLEIKQIIGDRGKTRSSKFDALRDLLGVPKSEKHTCAVLKLVCGLKVTVKELLSNIENPSVDSEGLKVSISFTDSNLEENLDKIQEVLEDEYFDVILKAKSVYEICLLSSILGNNKYLSDSRVEMYERHRLDLQDLKSLLAEYDKDAYEKIFRTMDVGSYSAYVGSVNSHGNKIRRLGTTSASSGTAKEELYKLVKKVLNNSVPEDNVVKARILDKIEKDCFLEKQLTSNNGVIPNQVHAIELKRILSNAEKHLEFLNDVDEGGLSVKDKIIKLFEFQIPYYVGPLGREFNGKKGYNNWAVRTEEGLKPGVKIMPWNFDKYIDRTASAEEFIKRMLRKCSYISGEYTLPKHSLTYEKFMVLNEINNIKIDNERISVEAKQGIYNDLFTRGNKVSKKKIKEYLVKHNFARDDVEITGLSDETCTTKLASLGKFRSIFGDVDKQSNKDIIENIIYWSTIYSGDRKIIKEKIEEKYPNLFDKKQLNKILGFKFEGWGNLSRKFLEQQGTSKVTGEINSILGFMWDGQENLMELLSDNYTFTEQLGGMADNTIRPLSDWKIEDLEDMYLSPSVKRSVWQTMKIVDELQSVIGYAPKRVFVEVTRGDGEKERTTSRKQKLIDLYKSIKGEAKDWIKEIEDRDENAFKSRKLFLYYMQQGMCMYSGERIDLHNLMNDSIYDIDHIYPRHFTKDDSIHNNLVLVKRQLNADKSDMPITKEIQTKMHGRWKALLAGGFISSEKYARLTRNSYTFSDEEKAGFINRQLVETSQATKAITRIFSQAFDNDTKIVFSKARLVSDFRQKFELPKSRVLNCYHHANDAYLNIVVGNSYYVKFEGNPARFIKESKGKEDEKKYKYHLSKFFENTVQNKNEIAWSVEEGNNTITTVKRTMAKYSPLVTYKTEEGKGEYFKETIYPKSKAKPLVYTGLKTKNTPLNDVTKYGGKTAIGTSGYCFVKYTEKNKEVRKFETLPIYLGSSRTLTVERIQKYLKKSYLEKGMKQAAETVEVLIKFVPQKTELVLDGYTYTIGGGAGDMMYINGFVQINLPSLYIEYMHKLEKAKERKDYSEIDKDGNKVITAERNLEIFNYIIEKIGGDKFINRKNSMYEALKSGQAEFTILNTSNQVNIIIDTLNNMYGNKQSVDLKDIGGKSVSGVCKANRNISNANQAKLILKSSTGLYERTIDLLEI

SEQ ID NO: 4368 - protein, 1392 aa, unidentified
  REGION 1..1392: note = Description of Unknown: Cas Enzyme sequence
MDNKKEYYIGLDMGTNSVGWAVTDTEYNLMRAKGKDLWGVRLFTEAQPAVNRRTKRVQRRRIEREKARKAMLRLFFSDAIDAVDPGFFQRLEESFLQYEDRSDSNKQMNALFNDGGYTDLDYYNEYPTIFHLRKALLHEDREFDVRLVYLAILNMFSHRGHFLNTNMSSDDDRDNNFDSAWRELIDAFETSQLSNNKEINNISALLDTTKYPEIKQIIGDRGKTRSSKFDALRDLLDVPKSEKHICAVLKLVCGLKVTVKEILSNIENPSVEPEGLKVSISFTDSNLEENLDKIQEVLEDEYFDVILKAKSAYEICLLSSILGNNKYLSDSRVEMYERHRQDLQDLKALLAEYDKDAYEKIFRTMDVGSYSAYVGSVNSHGNKIRRLGTTSANSGTAKEDLYKLVKKVLNNSVPEDNEVKAKILDKIDKDCFLEKQLTSNNGVIPNQVHTIELKRILSNAERYLKFLQDIDEDGLSIKDKIIQLFEFQIPYYVGPLGREFNGVKGYNNWAVRTEEGLKPGVKVMPWNFDKYIDRTASAEEFIKRMLRRCSYMADEYTLPKHSLSYEKFMVLNEINNIKIDNERISIEAKQGIYNDLFTSGNKVSKKKIKEYLSKHNYAREDVEITGLSDETCTTKLASLGKFRAVFGDDVLKQSNKDIIEDIIYWSTIYSGDRKIIREKIEDKYPNTFDKKQLNKILGFKFEGWGNLSKKFLELQGTSKVTGEINSIIGFMWNGQENLMELLSDNYTFTSQLNGMMDDTIKPLSSWKIEDLEDMYLSPSVKRMVWQTMKIVDELQSVIGYAPKRVFVEVTRGDGEKERTTSRKQKLIDLYKSIKGEAKDWIKEIENRDESAFKSRKLFLYYMQQGMCMYSGEKIDLDNLMNDNLYDLDHIYPQHFTKDDSIHNNLVLVKKEFNARKSDMPITKEIQAKMHDKWKALLEGKFITSEKYARLTRHSYAFSDDEKAGFINRQLVETSQATKAITKIFSQAFDNNTKIVFSKARLVSDFRQKFELPKSRVLNCYHHANDAYLNIVVGNSYYVKFEGNPARFIKESKGKENDKKYKYHLSKFFENTVQNKNEIAWSVEEGNNTITTVKRTMAKYSPLVTYKTEEGKGEYFKETIYPKSKAKPIVYTGLKTKNTPLNDVAKYGGKTAIGTSGYCFVKYTEKNKEVRKFETLPIYLGSSRTLTVERIQEYLKESYVEKGMKQASETVEVLIKFVPQKTEIVLDNHLYTMGGSSQGNMYINSNVQLKLSFEYIKYMHKLEKAVVLRDYSEVDQNGCMVINEEKNSNLYKILLEKMSSNVYSSKKNPIISTIEKGIDSFKTLSIDRQVNMLLDVVNNLYGKKQTVDLEKIGGSKYSGMCLCNREISKYSEAKLVFSSTTGIYAKIVDLLKI

SEQ ID NO: 4369 - protein, 1405 aa, unidentified
  REGION 1..1405: note = Description of Unknown: Cas Enzyme sequence
MKEEKDYKAYYIGIDMGTNSVGWAATDTEYNLMRAKGKDLWGVRLFNEASSAADRRSKRVARRRLEREKARKAMLRTFFADAINDIDPGFFQRLDESFLYYEDRSDFNKQYNALFNDEDYKDADYFREFPTIFHLRQALLHENRAFDVRLVYLAVLNMFSHRGHFLNTNMSSDEDGSNNFNQAWGELADSISTALSGSAPDTDNICDLSYLASSENFDSIKKIIGDTNRTRTARYDALRELFGIGKNDNKLISSILKLICGLNIKVKDLTSDIKDLSIDEDALKESIGFTDSNLDEELDKFHEILGDEWFDILLKAKTVYEICLLSSILGDNTYLSDSRVDMYNRHREDLYELKEVLTRYNPEAYEKIFRTMDVGSYSAYVGSVNSHGKKIRRLGTTKAKSGTVKEELYKAIKKILKSVPDEATQKVIILNKIEKDCFLEKQLTGNNGVIPNQVHSRELKKILSNAAKYLEFLSDTDQSGLSVKDKIVQLFEFQIPYYIGPLGRELNGVKGYNNWAVRTDEGKKQGVTITPWNFDEMIDRKASAEEFIKRMLNKCTYLDGEYTLPKHSLAYQKFMVLNEINNIKIGNARIGVKAKQGIYTDLFSKGNKVSKKKIKEYLVNNNFANKDDEITGLADEMCTTKLSSLGKFASIFGISVNKQSNIDMIENIIYWSTIYSGDRKIIKEKIKSTYPNVFDKKTLNKILGFKFDGWGTLSRGFLELQGVSKATGVINSIVGFMWEGQSNLMELLSEEYTFAEELKNQSAQAIKPLSNWEIEDLEDMYLSPAVKRMVWQTMKIVDEVQSVIGHAPKRVFVEVTRGDNKKVRTKSRKQSLIELYKNIKSESRDWMSELESRDESEFKSRKLYLYYMQQCRCMYSGEAIALRDLMDDNLYDIDHIYPQHFTKDDSIHNNLVLVKKEYNARKSDMPITAEIQSKMHSSWKALKDGGFITGEKYSRLMRKNYAFTDEEKIGFINRQLVETSQATKAITRIFGQAFKNTKVVFSKARLVSDFRQKFDLPKSRVLNCYHHANDAYLNIVVGNSYYVKFEGNPARFIKESESKEDDLRYKYHMSRFFEYQISNRNEVAWRIDGANRTIDRVKRIMGKYSPLVSYKTEEGRGEYFKETIYSKFKAKPMTYTGVKTKNSPLCDVTKYGGKTSVRTSGYCFVKYTNKKKEVRKFETLPIYLGNSSSLTDKVIEDYLRESYLMKGMTDAANTVKVLIKFVPQKTVLLLDGHKYVIGGSTGDEMYINSIVPLKMPIDDVHYLHKLEKAKELNDYKEVKSVENKKGEKLLREVITKEKNNEFFDVIVEKLRTDAYSSRRNSVLNKLENGKEKFIDLDVEAQVNILLDVINNIYGIKQTVNLERIGASKYSGMCFCNRNIAENKEVQLIFNSITGLYERKIDLLTI

SEQ ID NO: 4370 - protein, 1387 aa, unidentified
  REGION 1..1387: note = Description of Unknown: Cas Enzyme sequence
MYSGDYYVGLDMGTNSIGFAVTDPSYHLLRAKGKDVWGARLFPEAQTAAERRSHRTARRRLQRRKLRIGILNEIFSDELNKVDPGFLQRLADSKFFEEDKTEHQPYALFADDHYTDREYYAQFPTVYHLRKYLIETKDVYDIRLLYLGLHSIYKYRGNFLNPNLNAESMQEFGPLYRDLWEDIEEAKDARQDDNPIDISIPEWKEDLSSNLMEILSSKSYSMMEKGEKLSELLDITKKQKPQQEFLKWMCGRKGKVSVAFPREYDEEEGKLSFSFQDGNLEESMQKAEEMLLPEEYEVLLAIKRIHDFGLLSNIMKGYRYISEARVDIYNKHQKDLKILKRIYKEYAPEKYNTMFRKMEDKLKNYSAYVGSVKYKTPKNGSAIRRRGKSSIGELYKTIQNDLNSVKDIPEVSLVFDEMEKGTFLPKIRTSDNGVIPYQVYEAELKAILKNAESKFPFLSVKDESGFSPAEKIMMTFSFRIPYYVGPVYNDGKNHAWSVRKEPGRVYPWNFDQKIDKKKSSEEFMNHLIGHCTYLRGEQVLPRQSLMYERFALLNEFNNIQIDGRKPDAKAKKIIFSELFAKGRRITKKGLQRFLVSHNLSNGKTKADDVVISGMADERFQNSLDTYHHFCEVLKTDKLTYSQEQMAEDIIRWSTVYADSKNFLREKIREYYSTEQLSEEALNRVLGMKFSEWGRLSAAFLHMEGANTHTGEVKSILRWMEEDSYNLMELLSSDFTFLKELESLDNDIQKDLMSIKPEDLDGRYLSAPVKRMVWQTILILREITKVMGHAPKRVFVEMTRGDGEKKRTTSRKKKFEDLYKKIRDENFEWSKELAKFSEADFRNKKLYLYFTQMGRSMYTGDPIDLHELLTNNTKYDLDHIYPRHFVKDDSLDNNLVLVEKTENAHKTDNYPIESSIRERQIANWKMLLDKGLITQTKFQRLTRSTDFTDAERAEFINRQIVETGQAVKTITHLLEELMPSDETKVIYSKAGNVSDFRNKFSLYKCREVNDFHHAGDAYLNIVVGNVYHTKFTSSPANFVKEWRQNAKKYSYNLGAGKIFEHTVERNGILAWDVGNNQSIATVKAVMEKQTPLVTYMNYCEKGSIAKQTIYSAETAKQSKIDGSYLPVKTSDQRLSDVDRYGGVTKIATSYFFLVEHEVRRKRIRTIEAMPVYIAPKIKDDKDLLTYVENSLGLVKPRICLNRIKVYSKLRINGFDCYLSGRTGNRLTVVNAEELKLGNRMIRYAKKMKKVADLNLTDEQIRLDANRIAKKTDGDEIGITRENNIRFYEFLKQKHTIGIFGKRPNPVGEILQKRQDVFEKLLLDQQVDVLQEIMKLSGRVNEADLTLIGESKHSGKSLINKKITGLKSCELISQSVTGLFEQKTDLLMV

SEQ ID NO: 4371 - protein, 1387 aa, unidentified
  REGION 1..1387: note = Description of Unknown: Cas Enzyme sequence
MYSGDYYVGLDMGTNSVGFAVTDPSYHLLRAKGKDLWGVRLFPEAQTAADRRSHRTARRRLQRRKLRIGILNEIFSDELNKVDPGFLQRLADSKFFEEDKTEHQPYALFADDHYTDREYYEHFPTVYHLRKYLIETKDVYDIRLLYLGLHSIYKYRGNFLNPNLNADSMQEFGPLYRDLWEAIEEAKDARQDDSQIDISIPEWKEDLSSNLMEILSSKSYSMMEKGEKLSELLDITKKQKPQQEFLKWMCGRKGKVSAAFPREYDEEEGKLSFSFQDGNLEESMQKAEEILFPEEYEVLLAIKKIHDFGLLSNIMKGYRYISEARVDIYNKHQEDLKTLKRIYKEYAPEKYNTMFRKMEDKLKNYSAYVGSVKYKTPKNGSAIRRKGKSSVGELYKTIQNDLDSVKDIPEVSLVFDDMEKGTFLPKIRTNDNGVIPYQVYEAELKAILKNAESKFPFLSVKDESGFSPEEKIMMTFSFRIPYYVGPVYNDGKNHAWSVRKEPGRVYPWNFDQKIDKKKSSEEFMNHLIGHCTYLRGEQVLPRKSLMYERFALLNEFNNIQIDGRKPDAKVKKIIFDELFAKGRRVTKKGLQRFLVSHNLSNGKTKADDVVISGMADEKFQNSLATYHHFCEVLKTDKLTYSQEQMAEDIIRWSTVYADSKNFLREKIREYYSTEKLSEEALNRVLGMKFSEWGRLSSAFLHMEGANTHTGEVKSILRWMEEDSYNLMELLSSDFTFLKELESLDNDIQKDLMSIEPEDLEGRYLSAPVKRMVWQTILILREITKVMGHAPSRVFVEMTRGDGEKKRTTSRKKKFSDLYKKIQDENFEWSEELEKFSEADFRNKKLYLYFTQMGRSMYTGKPIDLHELLTNNTKYDLDHIYPRHFVKDDSLDNNLVLVEKTENAHKTDHYPIENSIRERQISNWKMLLDKGLITQTKFQRLTRSTDFTDAERAEFINRQIVETSQAVKTITHLLKELMPSDETRVIYSKAGNVSDFRNKFSLYKCREVNDFHHAGDAYLNIVVGNVYHTKFTSSPASFVKEWRQNAKKYSYNLGAGKIFEHTVERNGILAWDVEKNQSIATVKAVMEKQTPLVTYMNYCAKGGIADQTVYSAEKAGKNKKDGVYLPMKTSDDRIADVSRYGGFTKLSVSYFFLVEHEVKGKRIRTIEAMPVYLVPKIVDDDALKKYVENDLGLINPRICLNRIKVYSKLRINGFDCYLSGKTGNQLLMVNAEELKLGNKLARYAKKMKKVVDMKLTDEQIRLDAARIAKKIEGDEIGITREDNIRFYEFLKQKHTTGIFGKRPNPVGKKLQKRQPAFENLSLEQQVSVLQEIMKLSGRVNGADLTLIGESSNTGNSKINKRISDLKNCKLISQSVTGLFEQKTDLLTL

SEQ ID NO: 4372 - protein, 1121 aa, unidentified
  REGION 1..1121: note = Description of Unknown: Cas Enzyme sequence
KEWRGTTFFITCLCLERSERNDKNYEEKEGEALELLGDEYFELLETIKEIHDIGMLAGIIKGHKYLSEARVDLYKQHKKDLDMLQHVLKKYDMKAYDEMFRVMKAGNYSAYVGSVNAHSKKIRRNGGDGRTREDFYKNVKAVLKKFPEDDEEIKTILSEIDSETFMPKQLTASNGVIPNQLHVSELKAILTNAEKYLPFLLDKDESGLTVSERIVELFRFHIPYYVGPIGAQGENVWAKRRPGEENGKVYPWNFEQKIDTQSAAKEFINRMVRHCTYLSGERTLPKQSFLYEKFMVLNELNNLRIDGKKPSVQVKQGIYEELFKTGKRVTLNQLIKYLYNKSIIASKEDVVIEGIDGGFNASLTSVGKFRGVLGDELFTDANQAMAEEIIFWGTVYGNDKKFLKDEIESKYGTVLSKDQIKRILGFKFNGWGNLSKTFLELQGSCECGDCSLIQALWETNHNLMELLSEQYGFKKELDALASNVEKPLTEWTIDDLDNKYLSAPVKRMVWQTIKMLREACELTNKEPDRVFVEMPREHGKENDRKASRKKKLLDLYSALKRENKTWAELKIREIEGKTEADFRIKKLYLYYMQQGKCMYSGEKIELNDLFNNNLYDIDHIYPRHFIKDDSLENNLVLVKKQINNHKSDNYPLENNIRKNMNEFWKTLREKNFISKEKYSRLIRTEEFTDEEKAAFISRQLVETRQGTKAITQVLKQAFPNTQIVFVKAGIVSDFRKKFDINKVRALNDTHHAKDAYLNIVVGNTYYTKFTNNPMNFIKDARKNPKNDFYRYNMDKIFDYNVIRNGEEAWIADNGKTKQHVLRIMKKNSVIITVKTEEANGKLSDINIVGKRYIKNADAYMPIKTSIAKMEDVTKYGGYGSISSAGYALVEYKVKGKKVRSLEALPVYLGRSNALTNEDIMQYISAAFQKEYAGKEISDLSVRVPFIPMESKVEIDGFEYYLGGKSTNQFYLKNAMPLYLPDNDEEYFRKIMKAIEIDDYKEVGKNGKAVITKENNMILFDTLSAKLKSEPYIHNRCNIYKILEGKEKIFKDLDIQKQCYVIVKIIDWIKSKTQGVDLTDIQGKKQSGTMKINKRISECRECILIHQSVTGMYERRIDLLSI

SEQ ID NO: 4373 - protein, 1389 aa, unidentified
  REGION 1..1389: note = Description of Unknown: Cas Enzyme sequence
MEINLENNAEEIIMGKKMYIGIDMGTSSVGMAVTDENYTLYRVKGKDFWTSRLFKEANTAAERRTNRVARRRRQRETARMGILRELFSEEINKVDEGFFARLDESKYHIEDRDVKQKYALFADKGYTDKEYYQDYPTIFHLRNELLHPQKDSYDVRLVYLAIANMFKHRGNFLNETLDIDKITASADDVYSQLIEELDLYCIQMPVNINIGELINIIGENGISRSKRLENASKYLGITKKDKQSYEILKLICGLKGILYNIYGENVIDEENKKFSLSFTDSNYEDEETQAKDILGDEYFDLIEIIKELHDIGVLLGIINGHKFLSEARVELYEEHKKDLDMLQQVLKKYDKNAYDEMFRVMKEGNYSAYVGSVNARGKNKKIRRNVGEGKKGKNGRSQEAFYKYVKTTLKNFPDDDENIKNILFKIENETFMPKQLTASNGIIPNQLHAAEMKAILTNAEKYLPFLLDKDESDLTVSQRILELFKFHIPYYVGPLGAAGKNVWAKRRKGEEKGRIYPWNFEKKIDTQEAAEEFIKRMVRHCSYIKGEHTLPKQSLLYEKFMVLNELNNLKINGTKPDVFVKQDIYENLFKTGKRVTLDKLKSYLYNNSFIDSKEVMITGIDGGFNSSLTSVGKFIGILGEDLFTDSNQAMVEQIIFWGTIYGSDKKFLKNRIEKEYKDRLTPKQIKRILGFKFNGWGKLSKRFLELKGSCECGECSIIQALWQTNHNLMELMSDQYDFKTNLMELSEETIKPLSEWTIDNLEDYYMSAPVKRMVWQTVKMLNETCELTGRVPDKIFVEMPREHESGNERKASRKKKLLDLYKAIKSEQKQWAEHKITEIDKRDEADFRIKKLYLYYIQQGKCMYSGDTIDLDLLLKNNNIYDIDHIYPRHFIKDDSIDNNLVLVKKEINNHKSDKYPLESDIREDMSGFWKYLCEKKFITKEKYNRLMRTDKFSAEEKAAFVNRQLVETGQGTKVITQILKQAFPDTQVVFVKARMVSDFRHEFGINKVRELNDTHHAKDAYLNIVVGNTYYTKFTNNPINFMKNAEKNPEDVQYKYNMDKIFRYNVIRNGETAWIADNGVTKQHVIKTINRNTVTITRKTEEVHGALSNKITVWSSKSAEKNPDAYMPVKTTDEKAGDVTKYGGITAIANSGYTLIEYNINGKMIRSIEALPVYLGRKNMLTDDKIKEYLHEKIRKEYKNKTVTDLKVCILFIPQKSKVCVDGFNYYLGGVTGNSIYLSNAEPLYLSKEDEEYLRKIIKAVSKGYYEETDKNGQIIITDERNMKFFNTLGSKLNARPYCNNRWNIYKIMENKEEIFAGLSIEKQCYVINQIISWINSKTQNVDLSDIKGSSHSGTMTLNKKISECSQFELIYQSVTGMYEKRTDLLKL

SEQ ID NO: 4374 - protein, 1374 aa, unidentified
  REGION 1..1374: note = Description of Unknown: Cas Enzyme sequence
MGTEKTYYLGLDMGTNSLGWAVTDQNYHILRAKGKDLWGVRLFDEASTSVERRNFRVSRRRRQREVARIGVLRELFSDEIEKIDPGFFLRLDESKFFVEDRSENNKQKYGLFADKLFSDVEYYEKYPTIFHLRKELIESSEPHDVRLVYLALVNMFKHRGHFLNSSLGIEGKNGSIGEAYQTFVQTAKEMEVEFPEGLSDKCLEEILSSSDSRKKKSERLFAELGLTKKQKREGQLVNLMCGLKGRLSDLFPYKEYDEEHKKLAFSFQDSDYEEKEIMLQEILDEDEVELIQAVKEIHDSGMLAGIMKGYSYLSMARVASYEKHKTDLKVLKFVLKKYNAKEYFEMFRNENAKTGSYSAYIGSVNYHGTYRRGLDGGKQEDLYKRIKKTVEKFPQNDAEVRYILSEIEKENFLPKQLTASNGVIPNQVHAREMKAVLWQAQQYLPFLQEKDERGLSVSDKILQLFMFQIPYYVGPLGQQYKDEKGYNVWAERKEAGKVYPWNFTEKIDTKKSAEKFIQRMVRHCTYLSGETALPKQSLVYEKYQVLNELNNLRIRGERISVSLKQELYHELFETGKKVSMNRLTNYLIQNGIIEKEEKEIAISGIDSGFQNSLSSLGKFKGVFGEAVYSDEYKKMMEDIIFWGTVYGDGRKLLKEKVEETYGTQLSDAQKKRIYGFKFSGWGRLSKEFLTMSGASKEDGEIKGLLQAMWDTNCNLMELLSDRFTYRDTLNEMVETAEKPLSEWTIEDLDEMYLSAPVKRMVWQTIRVVEELQRVLGCPPKRIFIEMTRSGGEKGKRTISRQKKLLELYKALGKEGKSWSEELNGTSDNRLRIKKLYLYYLQMGKCMYTGENIELDQLMNDNLYDIDHIYPRHFIKDDNIGNNLVLVKKEKNAHKSDSFPIENEIRTKMMPYWKMLREKGFLTEEKYNRLTRKTAFSDEEKATFISRQLVETSQGTKAITQIFRQAFSDSEIVFSKASVVSDFRKKFNCYKVRCVNNYHHAHDAYLNIVVGNTYRVKFTVNPLNFVKEAKKNPNSDENRYNMDRIFDWNVRRNGEVAWIAQTKENPGSIQTVKKYLGKNSPLMTRMAHEKHGGLTQKATIWSARKAVSGNTDAYIPVKMKDARLADVTKYGGATSIAVAGYTLVEYEVAGKMVRSLEALPIYLGGSDKLTEEQMVEYFTKILQMENKKKQVTNVRICKKMIPSGSLIKYNGFYYYLAGKTGNQIVILSAVQLCLSAEQIIYAKKIEKACVSGDFEEKDKHGKMIISKEKNQKMYDLFIQKYKDSIFSKKNGSIGSTIMNGRTVFIEISVENQCKVLQQVFLNFQSGIGVDLTTIGGSNRSGITYLNKKVSNVEELKLIDQSVTGIFSSEMNLLTI

SEQ ID NO: 4375 - protein, 1374 aa, unidentified
  REGION 1..1374: note = Description of Unknown: Cas Enzyme sequence
MGTEKTYYLGLDMGTNSLGWAVTDQNYHILRAKGKDLWGVRLFDEASTSVERRNFRVSRRRRQREMARIGVLRELFSDEIEKVDPGFFQRLDESKFFVEDRSEDNKQKYGLFADELFSDVEYYKKYPTIFHLRKELIESSESHDVRLVYLALVNMFKHRGHFLNNSLGIEGKNDSIGEAYHTFVETAKEMEVEFPENLSDTCLEEILSSSDSRKKKSERLFAEIGLSKKQKREVQLVNLMCGLKGKLSDLFPYKEYDEEHKKLAFSFQDSDYEEKEITLQEILDDDEMGLIQAVKEIHDSGMLAGIMKGYSYLSMARVASYEKHKTDLKILKSVLKKYNAKEYFEMFRNETAKAGSYSAYVGSVNYHGTYRRGLEGGKQEDLYKRIKKAVEKFPQDDAEVSYILSEMEKENFLPKQLTASNGVIPNQVHAREMKAILQQAEQYLPFLKEKDERGLSVSEKILQLFMFQIPYYVGPLGQQYKDKKGYNVWAERKESGKVYPWNFTEKIDTKQSAEKFIQRMVRHCTYLLGETALPKQSLLYEKYQVLNELNNLRIRGERISVSLKQELYHELFETGKKVSMNRLTNYLIQNGIITKEEKEIAISGIDGGFQNSLSSLGKFKGVFGDAVYSDEYKKMMENIIFWGTVYGDGRKLLKEKVEETYGTQLSDAQKKRIYGFKFSGWGRLSKEFLTMSGASKEDGEIKGLIQAMWDTNCNLMELLSDRFTYKDALNEMVETVEKPLSEWTIEDLDEMYLSAPVKRMVWQTIRVVEEVQQVLGCSPKRIFVEMTRSDGEKGKRTVSRQKKLLELYKALGKEGESWSEELNGTSDSQLRIKKLYLYYLQMGKCMYTGENIELDQLMNDNLYDIDHIYPRHFIKDDNIGNNLVLVKKEKNAHKSDSFPIENEIRTKMMPYWKMLREKGFMTEEKYNRLTRKTAFSDEEKAAFISRQLVETSRGTKAITKIFKQAFSDSEIVFSKASVVSDFRKKFNCYKVRCVNNYHHAHDAYLNIVVGNTYRVKFTVNPLNFVKEAKINPNSDENRYNMDRIFDWNVRRNGEEAWIAQTKENPGTIQIVKKYLSKNSPLMTKMAHEKHGGLTQKATIWSAKKAASGNTDAYIPVKMNDARLADVTKYGGVTSIAVAGYTLVEYDVAGKMVRSLEALPIYLGGSDNLTEEQMVEYFTKTLQLENRKKQVTNVRICKKMIPSGSLIKYNGFYYYLAGKTGDRIILISAVQLCMSEEYMFYAKKIEKACSSGYFEEKDKNGKVIISEEKNLKMYDLFVRKYQKSVFGKKIGAIGETIVNGKEKFTELGIEDQCKILQQIFLNFQSGIGVDLTAIGGSNKSRITLFSKKISTANELKLVDQSITGIFSSETDLLTI

SEQ ID NO: 4376 - protein, 1375 aa, unidentified
  REGION 1..1375: note = Description of Unknown: Cas Enzyme sequence
METKFTYYLGLDMGTDSLGWAVTDSSYHILRAKGKDLWGVRLFPAAETSVDRRTYRVNRRRRQREVARIGTLKELFADEIEKVDPGFFVRLDESKFHMEDRSENNKQKYGLFADKLFSDAEYYKKYPTIFHLRKELLESEEPHDVRLVYLALLNMFKHRGHFLNSSLQIEGENSNIAESYQMFVDTLKDEELDFPEQVSGERLQEIFRSSDSRKKKVENLLAEMNLSKKQKREIQFVNLICGLKGKLSELFPDKEYDEEQKKIAFSFQDSDYEDKENTIQELLDESEMNMIYAVKAVHDSGVLSGIMNGERYLSVARVASYEKHKKDLQILKDILKKYDTKEYFEMFRNESAKSENYSAYVGSVKYHGTFRRGLSGGKQEDLYKHIKKVLGKFPQDDEGVTYVLEEIETESFLPKQLTASNGVIPNQVHAREMLAILKHAELYLPFLQEKDDTGLSVSEKILKLFMFQIPYYVGPLGQEYKDKKGYNVWAERKEPGKIYPWNFEEKIDVKKSAEKFIGRMVRRCTYLSGEQALPKQSLLYEKFQVLNELNNLRIRGEKIPVSLKQEIYHDLFGDGKKVSMTRLTNYLLQNGVISSEEKDSCISGIDGGFHNSLSSVGKFKGVFGDTVHTDEHRKMIEDIIFWGTVFGDGKKLLKEKVEEVYGNQLTEAQKKRIFGFKFSGWGRLSKAFLTMEGASKDNGEIKGLIQAMWDTNCNLMELLSERFTYKDKLNEMVTTAEKPLCEWKIEDLDEMYLSAPVKRMVWQTIRVVDEVQQIMGCPPKRIFVEMTRSDGEKGKRTVSRQKKLVDLYKALGKEGKIWSEELNNTPEGQFRIKKLYLYYLQMGKCMYTGESIELEPLMNDNHLYDIDHIYPRHFIKDDNISNNLVLVKKERNAHKSDSFPIEPEIRNKMMPFWKSLRKKGFLTEEKYNRLTRMSAFTDEEKAAFISRQLVETSQGTKAITQIFKQAFADSEIVFSKASVVSAFRQKFDCYKVRCVNDYHHAHDAYLNIVAGNTYRVKITSNPLNFIKEAKKNPNSRENRYNMDKTFEWDVTRNGETAWVAQSNENPGTIQLVKKYLNKNSPLITKMVYEKHGGITQKATIWSAKKAESGNTDAYIPVKMNDPRLADVTKYGGVTTIAVAGYTLLEYKAGGKTVRSLEALPIYLGGSKNLTEEQMVEYFSNILQQENKEKVVSDVIIRKKMIPSGSLIKYNGFYYYLAGKTGNRIVLISAVQLCLPMDTMLYIKKIEKACSTGNFEEKDKNGKQVLSKQQNEFVYELIIEKYQQSIFKKKVGAIGDTIIEKREKFAEISLEEQCKVLMQIFLNFQSGIGVDLTSVDGSNKSGVTYLNKKIMNAQELKLIDQSVTGVFSREIDLLTI

SEQ ID NO: 4377 - protein, 1351 aa, unidentified
  REGION 1..1351: note = Description of Unknown: Cas Enzyme sequence
MEQNYYLGLDMGTSSLGWAVTDEKYQLLRRKGKDLWGVRLFSEAETAADRRSHRVSRRRREREKARIAYLKEVFAEEINKKDPGFFQRLEDSKYYEEDKREHQPFALFADSGYTDKEYHKEFPTIFHLRKALLEADTDGKEYDVRLVYLAILNMFKHRGHFLNATLDEKSGGNLDEYIDKLYNDLYENFDIAIKKVDISEIKNILSSKDLSNTGRLEKLLDIFELSKSKNKRETEIFKLVCGLKGKLSKIFGEDSFSEELVNFSMSFRDANYDEEIITLEDNLSEEYFEMVMNLKQIHDWSVLENIMNGQAYISQARVLAYEKHEKDLKILKSFFKKNSMTEYNKMFRQMNDNNYSSYVGSVNYKNESIRRGSKCNSEEFFKSILKAIKEWDDCEEKIYIEDEIEKGTFLPKQITTSNGVIPNQVHKKELKKILTNAEIYLPFLSSKDESGLTVSERIVEMFSFQIPYYVGPISYSLDEKATTHRNNVWSVRKESGRVYPWNFEKKIDIKKSSENFISNLINHCTYLNGERVLPKNSLLYEKFMVLNELNNLKVNEQKISVETKQDIYKKIFKKGKKVTAKAIVKYLKENGLVDNSDEPALTGIDGDFTNRLANYKKFLEIFETDTLTYEQEQIAENIIYYSTIYGDSKKFLEERIRELYGEVLNEKQIKRILGLKFKDWGRFSRELLELVGVEISTGEQCSIISKMWNDNYNFMELMTKDKFSYAFEIEERVNKIEKTLSTIEYEDLDELYISAPVKRMVWQTILVLKELVETIGYPPERIFVEMARDVDAKKERKESRKNKLLALYANCKKEERNWKKEIEGRDEAEYRSKKLYLYYVQKGRCMYSGKPIELKDLFNDNLYDIDHIYPRHFVKDDSIENNLVLVEKNFNAHKSDTFPIESGIRKNMEFMWRSLREGGFITQEKYNRLTRRDEFTDDERANFISRQIVETRQGTKAITNLFEQTFPSTEIIYVKAGNVSDFRHKFNFVKCRNVNDFHHAQDAYLNVVVGNVYYTKFTRNPLNFIKDYKRDPEKHQYHMDHMFQYPVARNGKTAWATKGGESIKNVRSVMAKNTPLVTRMNYEKHSGQNGGITDQNIYSAKKAKANSYLPIKTTEERLKNVERYGGYGSITIKYFFLVEHMKGKKKIRTIEGYPAYLNDSIENLEEYCVKVLGYEMPEIKMAKIKIKSVFKINGFYYYLNAKSDNRIVWGNAVQLKMNQEDVEYIRKLSKANDEYISEKINSKKNIELYEKLRKKYSEGIYSKRVVVAIEAFEKGMEKFETLSIKEQIEILLEMVNYSKDSVSKINLSKLGLSANSAYCRTSKEISKLKECKLINQSVTGLYENEIDLLTV

SEQ ID NO: 4378 - protein, 1344 aa, unidentified
  REGION 1..1344: note = Description of Unknown: Cas Enzyme sequence
MKKFGDYYLGLDLGTSSIGWAVTDEKYDILRFNKKFMWGTHLFDTGNTAAERRIFRTSRRRLKRKKNRIELLQTLFSEEISKKDFGFFQRLKESQYDIEDKTVKNKNTLFMDENYTDKDYHDEYPTIYHLRKALIDNEENAFEIRKLYLAISHILSHRGHFLFEGEPSNNPELDNLEFDDIFDEFIKYLNEELNINFKVKSDVSLEIIKEILTDKMLNRTKKKEKLSELLEEEKNKIYQEIWKLLVGNEAKMATIFDNKEYEEAKISFSKGNYDEKEEEYESVLGEKIVLAQKAKAIYDRILLQNILKEDKYLSYSKVKLYNEHKNDLKILKDVLKNLDKEIYREVFSENGLYEEYIKKNKKEEFYKKIKSYFNGENIDEVVKNILNKIELDNFLPKQKIKDNGVIPRQVHQKELEIILKNAEKHFSWLTEKDETGLSVSEKIMKIFEFKIPYYVGPLNSKSPFAWIERKEYGKILPWNFESMVDTSKTAEKFIKKMTNKCTYLLGKDVIPKNSLLYTKYMVLNELNNLKIRGEKIQVDLKQKIYTELFQKNKKIGMRTLVEFLKSQNIVVTKTEITGIDGTFNTSLGSYIDMMKIFGEENIVKDSYKKMIEDIILWITLYGEEKELIKSKIEKKYSDKITSEQIKLILKLKYKDWSRLSKEFLTEVETMDEETGELINIIQMLWRKNENIMELLSYKYEYSDRIKEYNGINEKEKNITYEDMVRDLQVSPSVKKMIWRALVIVKEIKKITKKSPKKIFIEMARDTQTEKKRTEKRKDKLLKLYKNIENDDSVKELEKNLKDKTNDDLKSKKLYLYYLQLGRCMYSGEIIRLEDLMNDNLYNIDHIYPQSKTKDDSFDNTVLVKTGINQDKLNIYPINKDIQDKCKALWTFLKEKELISNTKYERLTRTEEFSDNELAGFISRQLVETRQATKILADLLKNVFGSETRVIYVKAGLTSDFRQKFGIYKFRELNDYHHAHDGYLNIVAGNIYNTLFTDNPYNFIKDRKKDNRAYNLNKVFERENNVWNPNTMISKIERYIYKIRPLFTRASYEQKGGFSDQNISSKKDKLRPLKLSGVLSNTKYGGYDKIKNSYFFIVEYTEKKKRVRSIETLPIYIKNLTKGKNGLEKYCKENLKLQEPKVLISKLNYKSLVQNDGYKYCINGKTGNSLLVQNAIQTILRKENYETCRKIYKNLEYLKLIYKDEEIVEEKFLEKLPKLFKKSKNSKDLSEREISEKIEKVYEEIFEKIEKGIFSKFKSTLIDYMKECDKKRAFTLLNNYNKSCLIQEILKCLKSQQGKFDMKYSHNYLKSYNIRLSKSKILENDFCIINQSPTGLFEKKIFLDK

SEQ ID NO: 4379 - protein, 1332 aa, unidentified
  REGION 1..1332: note = Description of Unknown: Cas Enzyme sequence
MEQGTKRGDYYLGLDMGTDSVGWAVTDMNYRIPKFKGNAMWGVRLFDESNTAEERRLLRISRRRTQRRRERLDLLEMLFDGPVSTKDPAFFQRLRESDLYAEDKTTNTPFAVFADPDYTDTDYHRQFPTIYHLRNALLHENGPYDVRLVFLAVHHIIKNRGHFLFDSLGEAQNFGSIYGAFRDYLQEEYECAVECTDEKAFGAVLKDKSLSKSRKTAAAAELFGVTKKSAPQLYACLALACGATVKLKDLFNDDTLAEAEKPSIAFTGSYEDNEPEYQSLLEERFDLVVRIKALYDWAILDEILAGHQYLCEAKVATYEQHKTDLQRLKTYVKTYRSELYKKIFKLSSKDDNYVAYSGHIKENGHTGVLEKTCNQEAFCAYLKKTLGDNEDPAYADMFAAIENGTFMPKQVSKDNGVIPMQLQKKELEGILDRAQRYLPFLTEKDETGLTVREKIISLCEHRIPYYVGPLNKHSKKAWIVRKEGKIYPWNFDQVVDLDRSAEAFIENLTSKCTYLPQYDVIPKYSLLYTKFMVLNELNNLTLDGQRIKVKLKQEIYRDLFEKRGKVTGKGLKNYLQSRGIAYEVMGGFDENFKASLKPWQDLAPYDLTYDEKEEVVRLITIFGDDKKLLKKRLRDLFGDRLTETERGKLARLKYTGWSRLSREFLTQVACTDKNTGEVTNIISALWDTNLNLMQLLYSADYMPTFWEQVAACNQFDKDVSLRQMVEDLYVSPKVKRPIYQSLLIAREIEKIQKCPPKKIFIEVARGEEKKERKKSRKAQLLELYQSCKKEYADLYAQLEGTEEDRLRSDKLYLYYTQMGRCMYTGEHIDLNSLLSGNVYDIDHIFPRSKVKDDSLNNRVLVKKVDNAKKTDVYPLDRETQAKMHGFWQLLLSKNLISKVKYQRLIRTTPLTDEELGAFISRQLVETRQSTKAVAQIMEQLYDKEQTEIVYVKAALASDFRHTYDMLKCREVNDFHHAKDAYLNVVVGNVYNVRCTHNLHNFIRGLQENGPRGYSMNAMFKWDIPGAWVAENGELQETQTKSLEIVKQMMAKNNIRYTRYAFCQHGGLFDQMPVKKGKGQIPLKQDGPKSDMAKYGAYNNAKSKYFTLVSYSDKKGKEVRQLVPIDAVTEKAYLTDPDGYVSSYVGVPAKVLIPCIKYNACLSFDGFRMHLSSKSGGGSTLVYKPAMQLVLSYEQEKYVRNVTKYLSQNKDRPLNKYDGISAEENIELFDVLVDKMNHSILSLRFGSIGEKISGKAERFIVLSAEDQCVVLSEMLKILHANVMSGDLTKIGLAGKAGIVTTNSKISDIKGVDSIKLIHQSITGLFEQQIELLP

SEQ ID NO: 4380 - protein, 1335 aa, unidentified
  REGION 1..1335: note = Description of Unknown: Cas Enzyme sequence
MKNFNNDYYAGFDIGTDSVGYVVADTDYNLCKFKGNAMWGVDLFEESNSAAERRTLRSARRRGLRKRNRIEWLQMLFDQEISKVDNAFFQRLKESCLYIDDKSSNVPYAVFADGNYTDKEFHTDYPTIYHLRKELIKSSQPHDIRLVYLALHHIIKHRGHFLFDNMGSDFESESSFEALFDDLKFYLKEEYEIEFECNDSLRFSEILKDKTLKKTAKSSESYKLFGYSKRNNPYETALIDLMCGRKVKFSDMFGDKSFDSEEVNGITFESGYDDNENTYRDLLQEKFELIEKAKAVYDWAILADILNGEKYISFAKVKIYEEHNSDLKMLKDFVKERCKSLYGEIFRITKDKLDNYTAYCGKYKENGRNGVIQYRTNQADFCKYLKKKCEKLDKTGYEEMFDKIENGTFMPKIVVKDNGVIPMQVNRSELKAILKNASTYLEFLNKKDENGISVSDKIVKIFEFRIPYYVGPLNNHSLKSWLVRSDEKIYPWNFDSVVDIEQSAENFINNLTSKCTYLPTKDVIPKNSILYSAFTVLNELNNLRLDGKKPDVSLKQAIFNDLFMTHKKVRRKDLLNYLKSEKGITPDITGIDGDFKSSMRSAIEMSQFNLTDSEKEDAIKAITVFGDDKKLLRKRLKRQLGSKLSDEDIMRISKLKYKDWGRLSKEFLIEVYNVDKNTGELQFNIIHALWQTNDNLMELLGSKYGFEQSRQNYLDGIQTGQSLEKMVENLYISPAVKRPVYQSLKIMHEINKIQGHAPKKIFVEMTRKDGVKGDKGRKESRKTKLVDLYKKCGEDSGELWESLEKTPDDEFKRDRLYFYYTQFGKCMYTGEPINLSELYNQNIYDVDHIFPRSKVKDDSLDNRVLVKKQVNAHKDNTYPLDSSIREKMKGSWHFLMDKGLISKKKYERLTRVTELTDSELSDFIARQIVETSQSTKAVASLFKELYPDTEIVYVKASTVSEFRHEYDFLKCREVNDFHHAKDAYLNIVVGNVYNERCTHNKSIFIKGLQTKKYSLNKMFSFNTPNAWSIDDNKSIKIVRKTMNKNNIRFTRYALTRNGGLFKMNPLKKGSGQVSLKQNSPLSDISKYGGYDKPASSYFSFVKYEGKKGKEMRQLVAIDSYIKARYEANPEKYLSENLGLKNPVVLIPVVKYNACIEIDGFRMHISSKSNGGKKIVYKPAMQLTVSYDTEKYIRNVVKLNSMPENYNITEHDKVSADENIELFDILTSKMTDTILKVKFGDMGVKIASHRDAFEKLDVRKQCFVLAEILKIIHSNVVTGDLTLIDEAKKAGVVSTNSVLSEIKGVKSIYLVHQSVTGLFEKKIDLLNMQVIRKEDI

SEQ ID NO: 4381 - protein, 1339 aa, unidentified
  REGION 1..1339: note = Description of Unknown: Cas Enzyme sequence
MKNFNDDYYAGFDIGTDSVGYAVADTDYNLCKFKGNAMWGVDLFEESNSAAERRTLRSARRRGLRKRNRIEWLQMLFDEEISKVDNAFYQRLKESCLYLDDKSSNVPYAVFADGNYTDKEFHTDYPTIYHLRKELIKSSQPHDIRLVYLALHHIIKHRGHFLFDNMGSDFESESSFEALFDDLKLYLKEEYEIEFECNDSLRFSEILKDKTLKKTAKSSESYKLFGYSKRNNPYETALIDLICGRKVKFSDMFGDKSFDSEEVNGITFESGYDDNENTYRDLLQEKFELIEKAKAVYDWAILADILNGEKYNGKNYISFAKVKTYEEHSSDLKILKKFVKERCKPLYDEIFRITKDKLDNYTAYCGKYKENGKNGVIIYRPDVDPQDKFCKYLKKKFEKLDKTGYEEMFDKIENGTFMPKIVVKDNGVIPMQVNRSELKAILKNASTYLEFLNKKDENGISVSDKIVKIFEFRIPYYVGPLNNHSLKSWLVRSNEKIYPWNFDSVVDIEQSAENFINNLTSKCTYLPTKDVIPKNSILYSAFTVLNELNNLRLDGKKPDVSLKQAIFNDLFMTHKKVRRKDLLNYLKSEKGITPDITGIDGDFKSSMRSAIEMSQFNLTDSEKEDAIKAITVFGDDKKLLRKRLKRQLGSKLSDEDIMRISKLKYKDWGRLSKEFLTEIYNVDKNTGELQFNIIHALWQTNDNLMELLGSKYGFEQSRQNYLDGIQTGQSLEKMVENLYISPAVKRPVYQSLKIMHEINKIQGHAPKKIFVEMTRKDGVKGDKGRKESRKTKLVDLYKKCGEDSGELWESLEKTPDDEFKRDRLYFYYTQFGKCMYTGEPITLSELYNKNIYEVDHIFPRSKVKDDSLDNRVLVKKQVNAHKDNTYPLDSSIREKMKGSWHFLMDKGLISKKKYERLTRVTPLSDSELSDFIARQIVETSQSTKAVASLFKELYPDTEIVYVKASTVSEFRHEYDFLKCREVNDFHHAKDAYLNIVVGNVYNERCTHNKSIFIEGLKTKAYSLNKMFSFNTPNAWSIDDNKSIKIVRKTMNKNNIRFTRYAFTQNGGDQNNGGFFKRNLLKKGNGQVPVKQNSALSDIEKYGGYNKAYASYFSFIKYEDKNGKEMRRIVAINAYTHLLYEANPEKYLSETFGLKKPVVLIPVVKRDACIEIDGFRMHISGKTGSRITFKPAMQLTVSYDTEKYIRNVVKLNSKPENYNITELDKVSTDENIELFDILTYKMTDTVLKVKFGDMGVKIASHRDAFEKLDIRKQCFVLTEILKIIHCNAVLGNLTYIGEGSSSGRVGLNSVLSEVKGVKSIYLVHQSVTGLFEKKIDLLNM

SEQ ID NO: 4382 - protein, 1346 aa, unidentified
  REGION 1..1346: note = Description of Unknown: Cas Enzyme sequence
MKSDYYIGLDIGTNSVGWAVTDTEYNLCRANRKAMWGIRLFETAQTSEGRRTARSSRRRTDRNKQRIEWLQEFFSQEIYKIDPEFFIRMKESRYVYEDKRDSDGNIPDMPYSIFASEDYTDIEYHKDYPTIYHLRSELIHNSEKKFDIRLIYLALHHMMKHRGHFLFEGTDSENIDFETVFSAFQSAIYENLCSDDESEDSNDVVGIALNHENIKGAEEILRNRNIKRLDKEKELTRLFNVSSKQGKAVCGLIAGRKEDISIIFNDESLNDGDKLKISLSDSNYEESAAILSDLLMEKFYVIELAKSIYDWAVLADVKGGFSYISDAKKSTYEKHREDLKLLKKVIKENCPENYKNMFGTAKNNNYSMYVGHYTANGKKKYAEKSCKKDEFYKYVKKIIKDIDTPEAVKILNDIETENFMPKLKVNDNSVIPHQLHLAELNKILENAEKHYEFLRIADDSGKTVSEKIRDIFNYRIPYYIGPVNTAMNSKGFGWAVRKESGKIYPWNIEEKIDYEESAAAFIRRMTNKCTYLYGKDVLPKYSVLYSKFTVLNELNNLRINGDKPSVELKQEIYNNLFLHKKNVTQKTLRDYLISNAYASSDVQFTGIDGNFKSSMKSWIELNEILTGIDFDMETAESIILNISLFGAEKKMLKKRLKAIVPEITDKQCNRISELNYNGWGRLSKELLTDIEAADPETGEYCNIIDMMFNTNDNFMQLLSEKYDFINQIEAHNEGLKNYTMSYKTVDELYVSPSVKRAIWQTMLIVKEIVKIKGYEPKKIFVEMTRNPDSEKKRTVSRKNRLKELYEKCKEEESYLFTELNNVSDTSLKSDRLYLYYTQKGRCMYSGEPISLEDLYDKTLYDIDHIYPQSKVMDDSINNRVLVKRVLNEEKSDVYPINEKIRHSQAGFWAMLKNQGFISEEKFKRLTRNTPFDDNELAGFIARQIVETSQSTKAVAEVLKNVYASEIVYVKSGVVSKFRQKYDLIKVRDVNDYHHAKDAFLNIVVGNAYNVKFTHNPLNFVKTNERYTYNLEKLFEHDIKTKNALAWKGGADGTIGKVKKIMSKNNVLFTRYSYEKKGELFDSQLVGKGKGQVYIKDSDERLHDISKYGGYNKASGAYFMLVESIKGRRNIRTIEVVPIYLKDKIENDNTYAINYLKNQCGLTEPKIILHNIKIDSLLNVDGFYMHLSGRTGKRLLLKNANQLCLSYEEEKLIKRMSKFKKEQSENEAREIVEKDNITEEALINLYDRFVDKLKNSIYKVRLSKQTSTLESGRDTFVTLSAEDKSICILEILNLFKCNSVAANLKKINGPENGGILVLNNDISNIKIKLINQSVTGIFEQSVDLNEI

SEQ ID NO: 4383 - protein, 1324 aa, unidentified
  REGION 1..1324: note = Description of Unknown: Cas Enzyme sequence
MKEYFVGLDIGTDSVGWAVTDSDYNLCRFKGNSMWGIRLFDESKTAEERRTARCARRRTDRKRERIEWLQMLFNEEISKKDISFFQRLKESNLYLEDKSVKGAYSVFADEHYTDEDYHRDYKTIYHLRKELIESDKAHDVRLVYLAIHHIIKNRGHFLFENLGEDYKNSNSFNNLVDEAFSYLEDEYDVHINCTDYEKMADILKDKTKNKTTKSAEIFKLCNISRKADPTETAVIKLMCGQTVQISDLFEELSAEEDGKIKISFDSGYDEKEEEYRSLLLEKFELIEKLKAIYDWAILADILKDEKYISFAKVKTYDEHKEDLKTLKDYIKKNCKDKYDMIFRESADKLDNYTAYCGKYKEQGRNGVILKRATQEEFCKFLKKELKNLPVEGYEKMFEKIENGNFMPKQVTKDNSVVPMQVNRQELSAILENASKYLDFLNEKDKNGVSVSEKILKIFDYRIPYYVGPLNTHSDKAWIVRGNEKIYPWNFENVVDVEKSAEAFIKNLTSKCTYLPDKDVIPKNSILYSKYTVLNELNNMRIDGEKPTVEFKQEIFNNVFMNPKNGRKVTQKAVRNYIKAEKGIDAELTGIDGDFKSNMRSAVELMKYNLTDDEKEDIILSITIFGDDKKLLRKRLKNKFSDKLTEDEIKSISKLKYSDWSALSREFLTQIYDFDVKTGEMRKNIIDTLWETNDNLMMLLSSKYNFSSSLEAAVSGSIKNTGIKDMVEDLYVSPKVKRPVYQSIKITNEIIKIMGCAPKKIFVETPRNDGIKGDAGRKHSRKMQLMELYKNCEKESDELYKELCDTSEEKLRSDRLYLYYTQFGKCMYTGESIDLDSGLFDIDHIFPRSKVKDDSLDNRVLVKKRQNEEKDNVYPLDGAIQRKMHSHWRFLLDKGFISRKKYDRLTRHEALSDDELADFIARQLVETGQAAKAVSTLLNKLYSDSGTEIVYVKAAIVSEFRHDFDFLKCREVNDFHHAKDAYLNIVVGNVYNERYTHSKINFVKGLQNKTYSLNKMFSYDVPKAWKAEKGESIAIVKKTMNKNNILYTRYAFNSSGALFKLNPLKKGSGQVPLKKDSPLSSIEKYGGYNKPTMKYFSFVKFKDEKGKECRQLVAINLYQAELYESNPIKFLEENMQMKEPEILINCVKCNACIEIDGFRMHLSGKTNGGKTICCKPGMQLVLSYEKECYVRNVVKLLSKPENVPISKFDHVSKEENLELYDLITQKLCDTILNVKFALIGEKLSSGRETFVNLNEREQCFVLNEVLKIVHCNAVLGDLKLIKDVAHAGATTIPSKLTSINGASKIYLVNQSITGLFETKTDLMNM

SEQ ID NO: 4384 - protein, 1316 aa, unidentified
  REGION 1..1316: note = Description of Unknown: Cas Enzyme sequence
MKEYYIGLDIGTDSVGWAVTDTQYNVLKFKGNAMWGVRLFDESQTAQERRMFRASRRRNQRKRKRLDLLEMLFDKEISAKDISFFKRLKESSLYYEDKDVDTPYAVFADKNYTDKDYHKQYPTIYHLCAELIKNQREHDVRLVFLALHHLIKNRGHFLFDNLSVTDIESFDKIFLELTTYLSDNYDISLSREDSNKLSEVLKNRSIGKVKKTAQILECCGVTKKSNPQLAAILSTLSGSSVKLADIFCDDTLKDVEVKSVSFSGKYEDSEAVLENILAERFELIEKLKAIYDWAILEEIRRGEKYISFAKVKTYNEHHDDLVILKEYVKKYCPKKYNKIFRKTEAKLANYTAYCGKIKENGHNGVLEHKCNQEDFCAFLKRELPKIDDKRFSKMFEKIEASSFMPKQVNKDNGVIPMQFNRAEVVAILDNAKKYLPFLNECDENGISVYQKILDIFDFRIPYYVGPLNKHSENSWIVRKAGEITPWNFKDIVDVDKSAEEFINNLTSKCTYLPDKDVIPKNSLLYSKFMVLNELNNLKINGNKISVELKQSIYNDLFMAKKRVTQKSLSGYFKAKGYEDVEITGVDGDFKANLKPFMDLTQYNLSGDEKEDIINSITIFGDDKRLLRKRLKERYSGKLTEDEILRISKLKYSGWSALSREFLTEIYGTKLDTGEHFNLITALWETNDNLMILLGSSYNFAQAVENACENDVNTSLKKMVENLYVSPKVKRPIYQSLKIVKEIVKIMGCAPKKFFIEVARGPEEKKRTVSRKAKLLELYKNCKKESEELYNQLVETPENDFKRDKLFLYYTQFGKCMYTGESISLDSLFDNNVYDIDHIFPRSKVKDDSLDNRVLVKKVVNAGKDNTYPLSSEIHQKMYSHWKFLLDRELISKKKFERLTRNYPLSDEELSDFISRQLVETRQSTKAVANILKSLYKEYGSEIVYSKASIVSEFRHDYDMLKCREVNDLHHAKDAYLNIVVGNVYNERYTHNKANFIKGLQNKTYSLNAMFNYNVDNAWVADNDESISIVKKYMNKNNILYTRYSYIQKGGLFDQMPVKKGKGQVPLKLNSPKADISKYGAYNRPSSAFFAFVEYTDNKGKNIRALVPVDSYRLSEYNNNPDIFMNNLLDAQNSKVLIKCIKYNSCLSFNGCRMHLSSKSGGGKTIVYKPAVQLAVGYRWEKYIKDIAKLIKKDKDAEITKYDGVTAEENIELFDILTNKMTNTVMKFNLGSIGTKIANKREVFSELTIWQQCFVISQILNIIHANVMTGDLKLIKEAGQAGASTTSNKLSDIKSVQSLKLINQSVTGLFETEVDLI

SEQ ID NO: 4385 - protein, 1334 aa, unidentified
  REGION 1..1334: note = Description of Unknown: Cas Enzyme sequence
MGKEYYLGLDIGTDSVGWAVCDTNYKIPKFKGNAMWGIRLFEKSNSAEERRGFRSSRRRTQRKRERLKLLEMLFDKEISKLDPAFFIKLRESNLYLEDKSTKIPYCVFSDENYTDKDFHRDYPTIYHLRNELIKNNKPHDVRLVYLALHHIIKNRGHFLFDYSYKNDKSGDFMPIYNDLKNYFYDNYEIELDCSDVDEFANTLKDKSKGKTKKNAEIAELFGVSKKDDKVLYSALSLLSGSSVKLFDIFDDEALKDVEKKSVSFSSGFDDNANDFQSYLGERFELLEKLKAVYDWAVLADILDGKEYISEAKVAIYEKHKRDLRTLKKYIKIYMPEKKAEIFNISSKDNNYVAYSKHIKTSSGTGVLNSTCTQEEFCAYLKKTLGICKDASYEEMFKEIENSTFMPKQVTKDNGVVPMQVNEKELVAILDNAKEYLPFLLNKDNDGKTVYDKIKALFEYRIPYYIGPLNTHSTKSWLVRSNEKIYPWNIEDVVDFDESAEKFIENLTSKCTYLPQYDVIPKHSLLYNKFCVLNELNNLKIDGEKISVQLKQDIYNDLFKKYYKVTNKKLCDYLKSRNIAFDEISGIDNDFKSSLKSYKDLVAYNLTDEQKEKIVKAITIFGDDKKLLKKRLKNEFGGCLSDDEIKKICKLKYTGWSKLSREFLTDVTAVYKETGELINIICALWETNYNLTSLLYSDEFCCDDKENKTFNDKINELNSFGSDKTLNQIVEELYVSPLVKRPIYQSLLITKELEKIMKCPPKKIFVEVARGAEEKKRTVSRRNKLLDLYKSCKNDYPLLFDELQNNTTDDELKSDKLYLYFTQFGKCMYTGENIDLGDLFNKNLYDIDHIYPQSKIKDDSLDNRVLVKKTTNAKKDNEYPLSSQIREKMTPHWKALLDKGLINKKKYERLVRNYPLSDEELSQFISRQLVETRQSTKAVANILEQLYPRPDTEIVYVKAALASEFRHQYDMLKCREVNDLHHAKDAYLNIVVGNAYNVKFTHNKANFIKGLQNNDKAYTVKLDSMLKHNIDGAWIADNNESLNIVKSTMNKNNIRYTRYAFTKHGKFFDATIQKKNGIGSVPLKENSPRNNISKYGGYTQIGVSYFGIAKIAKKKCDDIVIFPVYIYDEKEYTKAPLDYAKMVTNKNVSEILIKKLKIDSLLSIDSYKVFVSGNGDSTRFSYKPYSQLMIEPYYEKYLKRAFKYLDNCKKNKRELPISNYDGISEEMNMEIYKCLYKKMELPAFVFSFHDYGTKLKDKFVDFSKLKTYEQLCVLEAIVKTMKSDTVVGDIKKLLGISFSGFRNSKVFNLKKNTSLKIINQSVTGLFEKEFELLNL

SEQ ID NO: 4386 - protein, 1301 aa, unidentified
  REGION 1..1301: note = Description of Unknown: Cas Enzyme sequence
MGKEYYLGLDIGTDSVGWAVCDTNYKIPKFKGNAMWGIRLFEKSNSAEERRGFRSSRRRTQRKRERLKLLEMLFDEEISKIDPAFFIKLRESNLYLEDKSTKIPYCVFSDENYTDKDFHRDYPTIYHLRNELIKSNKPHDVRLVYLALHHIIKNRGHFLFDYSYKNDKSGDFMPIYNDLKNYFYDNYEIELDCSDVDEFANTLKDKSKGKTKKNAEIAELFGVSKKYDKVLYSALSLLSGSSVKLFDIFDDEALKDVEKKSVSFSSGFDDNANDFQSYLGERFELLEKLKAVYDWAVLADILDGKEYISEAKVAIYEKHKIDLRTLKKYIKIYMPEKKSEIFNISSKDNNYVAYSKHIKTSSGTGVLNSTCTQEEFCAYLKKTLGICKDASYEEMFKEIENSTFMPKQVTKDNGVVPMQVNEKELVAILDNAKEYLPFLLNEDNDGKTVYDKIKALFEYRIPYYIGPLNTHSTKHWLVRSNEKIYPWNIEDVVDFDKSAEKFIEKLTSKCTYLPQYDVIPKHSLLYNKFCVLNELNNLKIDGEKISVQLKQDIYNDLFKKYYKVTNKKLCYYLKSRNIAFDEISGIDNDFKSSLKSYKDLVAYNLTDEQKEEIVKAITIFGDDKKLLKKRLKNEFGGCLSDDEIKKICKLKYTGWSKLSREFLTDVTAVYKETGELINIICALWETNYNLTSLLYSDEFCCDDKENKTFNDKINELNSFGNDKTLNQIVEELYVSPLVKRPIYQSLLITKELEKIMKCPPKKIFVEVARGAEEKKRTVSRRNKLYLYFTQFGKCMYTGENIDLDDLFNKNLYDIDHIYPQSKIKDDSLDNRVLVKKTTNAKKDNEYPLSSQIREKMTLHWKALLDKGLINKKKYERLVRNYPLSDEELSQFISRQLVETRQSTKAVANILEQLYPRPDTEIVYVKAALASEFRHQYDMLKCREVNDLHHAKDAYLNIVVGNAYNVKFTHNKANFIKGLQNNDKAYTVKLDSMLKHNIDGAWIADNNESLNIVKSTMNKNNIRYTRYAFEKKGGLFKVTILKKGNGQASIKKNDKRNSIEKYGGYNQVSSTYFSCVEHGKDNKRMISMFSVNLYDKNKYEENPIAYLIENYGLINPIIKVKKVKIQSCISFDNMLCHLGGKDSGGSQISYRPGVQLVLGYDNERYIRNVIRCAGGDLHLQTSKNEEDIVTTEKNIELFNLLIEKMKNNIYGVLYSNLGDKLYCSKEKFEKLDIVEQCNVIKNVLTILKNNASKGDLKSIGIKANGAIRLNNNISEIKNVKSIKLINQSVTGLFEQEIELLNL

SEQ ID NO: 4387 - protein, 1333 aa, unidentified
  REGION 1..1333: note = Description of Unknown: Cas Enzyme sequence
MGKEYYLGLDIGTDSVGWAVCDTDYKIPKFKGNAMWGIRLFEKSNSAEERRGFRSSRRRTQRKRERLKLLEMLFDEEISKIDPAFFIKLRESNLYLEDKSTKIPYCVFSDENYTDKDFHRDYPTIYHLRNELIKNNKPHDVRLVYLALHHIIKNRGHFLFDYSYKNDKSGDFMPIYNDLKNYFYDNYEIELDCSDIDEFANTLKDKSKGKTKKNAEIAELFGVSKKYDKVLYSALSLLTGSSVKLFDIFDDEALKDVEKKSVSFSSGFDDNANDFQSYLGERFELLEKLKAVYDWAVLADILDGKEYISEAKVAIYEKHKRDLRTLKKYIKIYMPEKKAEIFNISSKDNNYVAYSKHIKTSSGTGVLNSTCTQEEFCAYLKKTLGICKDASYEEMFKEIENSTFMPKQVTKDNGVVPMQVNEKELVAILDNAKEYLPFLLNKDNDGKTVYDKIKALFEYRIPYYIGPLNTHSTKHWLVRSNEKIYPWNIEDVVDFDKSAEKFIENLTSKCTYLPQYDVIPKHSLLYNKFCVLNELNNLKIDGEKISVQLKQDIYNDLFKKYYKVTNKKVCDYLKSRNIAFDEISGIDNDFKSSLKSYKDLVAYNLTDEQKEEIVKAITIFGDDKKLLKKRLKNEFGGCLSDDEIKKICKLKYTGWSKLSREFLTDVTAVYKETGELINIICALWETNYNLTSLLYSDEFCCDDKENKTFNDKINELNSFGNDKTLNQIVEELYVSPLVKRPIYQSLLITKELEKIMKCPPKKIFVEVARGAEEKKRTVSRRNKLLDLYKSCKNDYPLLFDELQNNTTDDELKSDKLYLYFTQFGKCMYTGENIDLDDLFNKNLYDIDHIYPQSKIKDDSLDNRVLVKKTTNAKKDNEYPLSSQIREKMTPHWKALLDKGLINKKKYERLVRNYPLSDEELSQFISRQLVETRQSTKAVANILEQLYPRPDTEIVYVKAALASEFRHQYDMLKCREVNDLHHAKDTYLNIVVGNAYNVKFTHNKANFIKGLQNNDKAYTVKLDSMLKHNIDGAWIADNNESLNIVKSTMNKNNIRYTRYAFEKKGGLFKVTILRKGNGQASIKKNDKRNSIEKYGGYNQVSSTYFSCVEHGKDNKRMISMFSVNLYDKNKYEENPIAYLIENYGLINPIIKVKKVKIQSCISFDNMLCHLGGKDSGGSQISYRPGVQLVLGYDNERYIRNVIRCAGGDLHLQTSKNEKDIVTTEKNIELFNLLIEKMKNNIYGVLYSNLGDKLYCSKEKFEKLDIVEQCNVIRNVLTILKNNASKGDLKSIGIKANGAIRLNNNISEIKNVKSIKLINQSVTGLFEKEIELLNL

SEQ ID NO: 4388 - protein, 1341 aa, unidentified
  REGION 1..1341: note = Description of Unknown: Cas Enzyme sequence
MEKDYYLGLDMGSASVGWAVTDDQYHILRAHGKALWGTRLFESANTAEDRRINRTARRRLKRRNQRIEWLQEIFAEEIAEKDSGFFRRMKESRYWAEDKRDENGNCPEMPYLLFIDKEFTDKEYHEKFPTIYHLRKYLMTTEETPDIRLVYLAFHHMMKHRGHFLLNGSIEEIREFRTTFDQFLEVVRNEEMGFDGEITEETYHDIEKILKNVNLTRSAKKTTLIKLLKVTRVKEKELLALISGCTVKLSNIFNDKSLDETERPKISFADAGFDDYEVELKNNLNERYYIIESAKAVYDWAALADILNKYSSISEAKVALYEKHHKDLQHLKKIVKEDISIEAYKEIFTDTSGKYKNYCAYIGTVNINGKKKDFEGKKCTKEDFYAYLKKSVIERINDSEKTDWLKKELETGNFLPKQSTGANSVIPYQIHLYELNAIITNLQERIPLLKREGDKIRQIFTFRVPYYVGPLNGISIDGKKTNWVKRKEGKIYPWNFTDIVDEEVSAERFIRRMTNKCTYLIHEDVLPKYSLLYSKFEVLNELNNVRLNGELLSVELKQKIYEEVFQRYRKVTQKKFKRYLLIEGKIDENTVITGIDGDFKGSLTAYHDFKEKLTDVHLSEREKEEIILNVTLFGDARSLLRKRIGKICPQLTDKQRESLSNLSYRGWGRLSKKFLNGIAISVQGEEEWTIIKTLWGTQDNLSQLLSAKYTFRNEVEKENGQLDNKEISYETIKELNISPSVKRQVWQALLIVKEICKIQKTLPKRVFVEVAREKTNSGRTESRKKRLLDLYKYCSKYEKELYDENLQSKLEKCQEADLRSDRLFLYYTQMGRCMYTGLPIDLDELWNNQKYDIDHIYPQSKTMDDSIDNRVLVKRILNLEKTDVYPIQADIREKCRGFWKALKNAGFISEEKYKRLTRATEFEPAELAGFISRQLVENRQTTKVVASILKQAMPDTEIVYVKARTVSEFRHKFNFIKVRDMNDLHHAKDAYLNIVVGNTYLVKFTKSPVNFIENHSNRSYNLKKLFTYGEVERNGEIAWISGENGTIGTVRNIMKKNNILVTRRVHEATGGLFDQQLMKKGKGQVPVKGSDERLCDIEKYGGYNKEAGAYFVLVESDEKKGKKKRTIEYVPIRLKKQLENNREALENYLQEQRKLINPIVLLDKIKIDSLFQVGGFFMWLSGRTGNQLLFKCANQLILSTEDEATLKKVVKFVNRRKENKEIKIYESDKLNEEMLGQLYNTFLYKLQNSVYGNRLGEQAKTLSSKKEKFDELQIEEKCVVLYEILHMFQCQSVASDLKLIEGPGKAGILVLNSNITKCKNVCVINQSPTGIYEKVIDLQKL

SEQ ID NO: 4389 - protein, 1341 aa, unidentified
  REGION 1..1341: note = Description of Unknown: Cas Enzyme sequence
MDGNYYLGLDMGTSSCGWSVTDEEYHVLRRHGKALWGVRLFEGAKTAEERRMHRTGRRRLDRRGWRINILQELFAEEVSKIDPGFFLRMKESKYYPEDKRDINGERPELPYALFVDPEFTDKDYHREFPTIYHLRKWLMETKEVPDIRLVYLALHHMIKHRGHFLLSGDIEQVKEFKNTFETFIQNVKDEELDFDLEITEEKILYIEEVLSNKNILKSTKKSRLVKELGARTKCEKAVITLLTGGTAKLSDIFANEELDENERPKISFADNGYDEYIDSVEAELGEQFYIIASAKAVYDWSVLTDILDRCTSISEAKIKVYEKHKADLRLLKEVVRENFSKDIYKKIFVVSDAKLANYPAYIGMTKVNGKKTALGGKQCSQEDFLKYLNKTIVEKLPESEEKTYLKNEIETDQFLPRQVTKDNGVLPYQIHKYELQKILDNLSARIPVIAENKEKLIQLFTFRIPYYVGPLNKVKEENEPKYTWAVRKSEDKIYPWNFTDIIDVEASAEKFIKRMTNKCTYLIGEDVLPKDSLLYSKYRVLNELNNVRLDGKEISVELKQKIYEGVFCKRRKVRQKDLKNFLLREGIAERDVDITGIDGDFKASLTAYHDFKEKLSGIDLKQSEKEEIIQNIVLFGDDKKLLKQRLGKLFPKLTDKQKSSIAALSYHGWGRFSKKFLEEITIPAPETGEVWNLITALWETNENLSQLLGKKYQFSDQIKEYNEEQNNPTLSYKTVEEQYVSPAVKRQIWQTLQVIKEIKKVMGKEPERIFVEMARESQESKRTESRKKHLMDLYKVCKEEEKEIYEKLEKHEEQQLRKDKLFLYYTQRGHCMYSGERIEFDDLWDNTKYDIDHIYPQSKTMDDSLNNRVLVKKEYNSKKSDDYPINSDIQKKQGGFWKSLLDGNFITKEKYKRLVRKTELTSDELAGFIERQIVETRQSTKVVADLLKKVMPDSEIVYVKGRSVSKFRQDYDFVKVRDMNDLHHAKDAYLNIVVGNAYYTKFTKNAVWFIKENPGRSYNLEKMFIHDISRNGKVAWKAGDKGTIKTVRNVMNKNNILVTRRSYEEKGGLFDQQIMKKGKGQVPVKTSDERLHDINKYGGYNKAAGAYFMLVKSTDAKGNEQRTIEFVPIYKKDYIERSKENALEYLREIMKERKLSKPVILINKIKIDTLFKVDGFYMWLSGRTGKQLIFKGANELLLSDEETKILKKVIKFINRKIENKNVKIVAFDGINEAELTHLYDVFVSKLQNTIYKIRLGLQASTLIDNKGKFEKLSLEDKCTVLAEILHLFQCQSTMANLTLISGPAKAGSIKINNNITKCKQISIINQSVTGIYEKEIDLLKL

SEQ ID NO: 4390 - protein, 1340 aa, unidentified
  REGION 1..1340: note = Description of Unknown: Cas Enzyme sequence
MEQEYYLGLDMGTGSVGWAVTDSEYHVLRKHGKALWGVRLFESASTAEERRMFRTSRRRLDRRNWRIEILQEIFAEEISKKDPGFFLRMKESKYYPEDKRDINGNCPELPYALFVDDDFTDKDYHKKFPTIYHLRKMLMNTEETPDIRLVYLAIHHMMKHRGHFLLSGDINEIKEFGTTFSKLLENIKNEELDWNLELGKEEYAVVESILKDNMLNRSTKKTRLIKALKAKSICEKAVLNLLAGGTVKLSDIFGLEELNETERPKISFADNGYDDYIGEVENELGEQFYIIETAKAVYDWAVLVEILGKYTSISEAKVATYEKHKSDLQFLKKIVRKYLTKEEYKDIFVSTSDKLKNYSAYIGMTKINGKKVDLQSKRCSKEEFYDFIKKNVLKKLEGQPEYEYLKEELERETFLPKQVNRDNGVIPYQIHLYELKKILGNLRDKIDLIKENEDKLVQLFEFRIPYYVGPLNKIDDGKEGKFTWAVRKSNEKIYPWNFENVVDIEASAEKFIRRMTNKCTYLMGEDVLPKDSLLYSKYMVLNELNNVKLDGEKLSVELKQRLYTDVFCKYRKVTVKKIKNYLKCEGIISGNVEITGIDGDFKASLTAYHDFKEILTGTELAKKDKENIITNIVLFGDDKKLLKKRLNRLYPQITPNQLKKICALSYTGWGRFSKKFLEEITAPDPETGEVWNIITALWESNNNLMQLLSNEYRFMEEVETYNMGKQTKTLSYETVENMYVSPSVKRQIWQTLKIVKELEKVMKESPKRVFIEMAREKQESKRTESRKKQLIDLYKACKNEEKDWVKELGDQEEQKLRSDKLYLYYTQKGRCMYSGEVIELKDLWDNTKYDIDHIYPQSKTMDDSLNNRVLVKKKYNATKSDKYPLNENIRHERKGFWKSLLDGGFISKEKYERLIRNTELSPEELAGFIERQIVETRQSTKAVAEILKQVFPESEIVYVKAGTVSRFRKDFELLKVREVNDLHHAKDAYLNIVVGNSYYVKFTKNASWFIKENPGRTYNLKKMFTSGWNIERNGEVAWEVGKKGTIVTVKQIMNKNNILVTRQVHEAKGGLFDQQIMKKGKGQIAIKETDERLASIEKYGGYNKAAGAYFMLVESKDKKGKTIRTIEFIPLYLKNKIESDESIALNFLEKGRGLKEPKILLKKIKIDTLFDVDGFKMWLSGRTGDRLLFKCANQLILDEKIIVTMKKIVKFIQRRQENRELKLSDKDGIDNEVLMEIYNTFVDKLENTVYRIRLSEQAKTLIDKQKEFERLSLEDKSSTLFEILHIFQCQSSAANLKMIGGPGKAGILVMNNNISKCNKISIINQSPTGIFENEIDLLKI

SEQ ID NO: 4391 - protein, 1338 aa, unidentified
  REGION 1..1338: note = Description of Unknown: Cas Enzyme sequence
MADYLMGLDLGTGSLGWAVTDKEYKILRAHGKALWGVRLFDNADTAEERRTFRTARRRLDRRNWRIQLLQELFDAEISKVDPGFFLRMKESKYVPEDKRDASGCCPELPYALFVDDGYTDKDYHRQFPTIYHLRKWLMNTDETPDIRLVYLALHHMMKHRGHFLFSGNIENIKEFQGTFLQYIRSIKDEELDFEICIADEELQIIEDVLKNRGLTKSVKKTRLIKLLGAKSPCEKAALNLVAGGTVKLSDIFGDSRLDSCEKPKISFADASYEEYEGIVEEELGEQSIIIEMAKAVYDWSVLADILGGYDSVSDAKIEAYEKHQKDLKYLKNLVKGSLSKDIYKEIFVKADDKLHNYSAYIGMTKKNGIKSETAGKRCGRKEFYDYLKKKVLNAISDEEKTEYLRTGIETETFLPRQVTKENGVIPYQVHLHELEAILKNLSERIPVLKENEEKIRAIFTFRIPYYVGPLNGIMKGGEKTNWVKRKEGKIYPWNFSEMVDEEESAERFIRRMTSKCTYLLREDVLPKNSMLYSKFVVLNELNNVRLDGIPIDIELKQKIYEDLFQRHRKVTQKKLISFLVREGKCEKNVDITGVDGDFKGTLTAYHDFKEKMTGCSLSQADKENIILNITLFGEDKGLLMKRIGKLYPDLTGPQKKAVCSLSYKGWGRLSRRFLEGITAPAPETGEVWTIIRTLWETNDNLMQVLSEKYNFADAVDAENTGDEIKEITYKTVEQMNVSPAVKRQIWQTLQVIKEIRKVMGEPPRRIFVEMAREKGVGKRTESRKKRLMELYKKCKEEERDWMEELGHTEETTLRSDKLYLYYTQKGRCMYSGETIELGELWDNRKYDIDHIYPQSRVMDDSLDNRVLVKKECNAAKTDDYPIHEDIRKKMGSFWHMLMTSGFISKEKYKRLTRGTGFEPSELAGFIARQLVETRQSTKAVASVLKQVFPDTEIVYTKAKAASAFRQDFDLVKVREMNDLHHAKDAYINIVVGNVYYTKFTSNASWFVKEHPGRSYNLKRMFTSDKDVSRGGEVAWKAGNAGTIATVKSVMGKNNILVTRRSYQAKGGLFDQQIMKKGKGQVPIKGSDERLDAINKYGGYNKATGTYFMLVESEDKKGKRIRTIEYVPLHLCDRIEKDERYAERYLEKKEHELKNPKILIPKIKIDTLFKVDGFYMWLSGRSDNRLVFKGANQLIISEQDARILKKVIKYVNRRKENKNAVLAKQDGLSEEDLTGLYDVFLDKLKHTVYRIRLSAQEKTLSDNRDDFLELCKEDKCIVLSEILHIFQCQSSTADLKLIHGPGNAGKILLNNAISKHEQISIIYQSPAGIYVQEMDLKKV

SEQ ID NO: 4392 - protein, 1341 aa, unidentified
  REGION 1..1341: note = Description of Unknown: Cas Enzyme sequence
MGMDYFLGLDMGTGSLGWAVTDPEYEIVKKHGKALWGVRLFDSASTAEERRVFRTNRRRLDRRNWRIHILQELFAEEIAKVDPGFFLRMKESKYYPEEKRDMEGNCPKLPYSLFVDKDYTDKDFHKEFPTIYHLRKWLMETEITPDIRLVYLAIHHMMKHRGHFLLSGDISQIKEFSSTFTTLVQNLRKEELEWTLEINQEKLSEIEKILKDKNITRTTRKNRLVKISGAKSTCEKGIMTLIAGGTVKLSDIFGKSELNESERPKISFADSGYDDYIGMVADTLGEQFYIIETAKAVYDWAVLVDILGDSSSIAEAKIKIFEKHKNDLAYLKSVAKKCLTKQEYNKIFIDNEEKLHNYCAYIGMAKKNGCKVSLEAKRCCSQSEFYDFLKKDILPHLNDLKIKEYLENEIEHETFLPKQINKGNCVIPYQVHLFELKKILENMGNKIPFITQNAERITQLFEFKIPYYVGPLNGNKVGTGENFSWAVRKKCGKIYPWNFNEIVDTEASAEAFIRRMTNKCTYLIGEDVLPKDSLLYRKYMVLNELNNLKLNGNVISVELKQKIYADVFCKYRKVTLKKLKDYLVTQGLTDRNVDITGIDGDFKSSLTSYHDFKEKLTGVNLTQKEKEEIILNIVLFGEDKKLLKQRLSKRFPELSTGQMKAICTLSYKAWGRLSKGFLEEITIPAPETGEVWNIITALWETNDNLMQLLGRKYKFMEVVEEFNLDKKSDSLNYETIQDLYVSPAVKRQIWQTLQVVRELRKVMGNEPKRVFVEMVREKGENKRTISRKKQLQELYKSCQKDEKELISELNNAEEQTLRSDKLYLYYTQKGRCMYSGEAIDLGELWDNTKYDIDHIYPQSKTMDDSLNNRVLVRKVENEIKSDNYPIALTVRKKMQSFWKLLLEGRFISEEKYKRLTRSEAFDENELAGFIERQIVETRQATKIVADILKRAFPTSEIVYVKAGTISRFRQEFDLVKVREINDLHHAKDAYLNIIVGNSYFVKFTKNAAWYVKNNPGRTYNLEKMFTSKYDITRNGETAWKAGNQGTIVTVRKVMQKNNILVTRRSYEAKGGLFDQMILKKGKGQIPIKGSDERLSNIEKYGGYNKATGAYFMLIKSKDKNGKEIRTLEYVPLYLKSEIEKSEEAAKEYLIKEKGVKEPEILIRKIKTGTLFEVDGFKMWLTGRKGTQVTFAGANQLIISSNETKCLKKVLKYVQRRRENKNLILYESDGIAESALVNLYDCFLCKLQNTIYNKKLSLQVKTLSEKRENFVSLSKEEKCIALSEILHMFQCQSVNANLSLIGGPANAGSLAINSNIKDCKNIFIINQSSTGIFEKKIDLQKL

SEQ ID NO: 4393 - protein, 1352 aa, unidentified
  REGION 1..1352: note = Description of Unknown: Cas Enzyme sequence
MEIMKQKFYVGLDMGTASVGWAVTDDKYNIIKRHGKALWGVRLFKTANTAEERRIFRAARRRTQRRKQRMELLQEIFGDEISKTDIGFYQRMKESKYWFEDKRDINGKQPELPYALFVDDGFTDKDYHEQFPTIFHLRNVLVNEWTQKYDIRLVYLAIHHIIKHRGHFLFEGKKMSEVTDFGSAFEAFCKVASDNDIEITVDEEKLKDIEDLLKSRQKSKTAKKQELGKIIAGADKQKKALAALVTGCMVKLSEIFADKSLDDGERNKISFADSNYDEYIANVEETLAERFLLIAAGKALYDWAVLSDILEGSTYISEAKVKIYKKHGDDLRKLKGLLKTRPDEYKLIFGLPEKQANYSAYIGMVKKNGKKVPIDKKCTKADFYLFLKKTLNKINFEDEKEREIAESIINEIENETFLPKQVISDNGVIPYQLHEAELDRILKNAALYYPFLSEKDDEGYTNTDKIKELFKFRIPYYVGPLNTYHSDKGGNSWAVRKQDGKIYPWNFESKIDAEESAGKFIGRMTNKCTYLIGKDVFPKESLLYSKFMVLNELNNLRIDGEKVSVEIKQAVYENVFKKYQRVTGKKVKDFLIRSGIIGREQELSGFDQNFKSSLKAYHDIKQIAGDIDLSQNQKEDIIKDITVFADSQKMLKKRLKIKYPQLSDKQVTKLAAKKYTGWGRLSREFLEEVESVNKETGEVLNIISALWETNENLMQLLSNKYDYLSEIKRLNDEAEDKSDVVTYDDVQKLYVSPAVKRPVWQTLKIVEEISKIMGSKPERIFVEMAREPGQKGDVKVSRKSRLLEKYKYCKKEAPEIYENLVKEDDNKLRSDKLFLYYTQMGRCMYSNEVIDIEDLFTNRYDIDHIYPQSKVMDDSLDNRVLVKRELNSNKTDVFPVPKEYMDKAKTLWDMLKKKDLISKEKYHRLTRRDGFSENELSGFIARQLVETRQSTKAVTQLLTKAYPESEIVYAKANAVSEFRHKFGFTKVRSINDYHHAKDAYLNIVVGNTYYVKFTKDAAWFIRNNPGRTYNLKKMFEQGTVSRGGETAWVSGEDGTIFTVKRVMGKNNILFTRKAYEVRGGLFDQQIMKKGKGQIPVKNNSEDDRLCATEKYGAYNKASGAYFMLVESEDKKGNKIRTLEFVPVYLAKELEKSEDAAIRYCVEKLELKNPDVRVRKIKMDSLFNVDGFRMHLSGRTGKQLIFKCAEQLVLDEESQKILKKTAKVFVDYKENKNIKISDKIELTDEMLIKLYELFYKKLKDTVYNIRLSTQVKTLESGKEKFEKLSLLDKCLVIEEILHLFQCQSVAANLSSIGGAATAGILVLNNEISRCGKVEIINQSITGFYEQVIDLKNI

SEQ ID NO: 4394 - protein, 1354 aa, unidentified
  REGION 1..1354: note = Description of Unknown: Cas Enzyme sequence
MEIMKQKFYVGLDMGTASVGWAVTDDKYNIIKRHGKALWGVRLFKTANTAEERRTFRAARRRTQRRKQRMELLQEIFGDEISKTDIGFYQRMKESKYWFEDKRDINGKQPELPYALFVDDGFTDKDYHEQFPTIFHLRNVLVNEWTQKYDIRLVYLAIHHIIKHRGHFLFEGKKMSEVTDFGSAFEAFCKVASDNDIEITVDEEKLKDIEDLLKSRQKSKTAKKQELGKIIAGADKQKKALAALVTGCTIKLSEIFADKSLDDGERNKISFADSNYDEYIANVEETLAERFLLIAAGKALYDWAVLSDILEGSTYISEAKVKIYKKHGDDLRKLKGLLKTRPDEYKLIFGLPKKQANYSAYIGMVKKNGKKVPIDKKCTKADFYSFLKKTLNKINFEDEKEREIAESIINEIENETFLPKQVISDNGVIPYQLHEAELDRILKNAALYYPFLSEKDDEGYTNMDKIKAIFKFRIPYYVGPLNTYHSDKGGNSWAVRKQDGKIYPWNFESKIDAEESAGKFIGRMTNKCTYLIGKDVLPKESLLYSKFMVLNELNNLRIDGEKVSVEIKQAVYENVFKKYQRVTGKKVKDFLIRSGIIGREQELSGFDQNFKSSLKAYHDIKQIAGDINLSQNQKEDIIKDITVFADSQKMLKKRLKIKYPELSDKQVTKLAAKKYTGWGRLSREFLEEVESVNKETGEVLNIISALWETNENLMQLLSNKYDYLSEIKRLNDEAEDKSEVVTYDDVQKLYVSPAVKRPVWQTLKIVEEISKIMGSKPERIFVEMAREPGQKGDVKVSRKSRLLEKYKYCKKEAPEIYENLVKEDDNKLRSDKLFLYYTQMGRCMYSNEVIDIEDLFTNRYDIDHIYPQSKVMDDSLDNRVLVKRELNSNKTDVFPVPKEYMDKAKTLWDMLKKKDLISKEKYHRLTRRDGFSENELSGFIARQLVETRQSTKAVTQLLTKAYPESEIVYAKANAVSEFRHKFGFTKVRNINDYHHAKDAYLNIVVGNTYYVKFTKDAAWFIRNNPGRTYNLKKMFEQGTVSRGDETAWVSGDNGTIVTVKKVMRKNNILFTRKAYEVRGGLFDQQLVKKGNGQIPIKGNSYDDRLCATEKYGAYNKASGAYFMLVESEDKKGNKIRTLEFVPVYLAKEMEKSEDAAIRYCVEKLELKNPDIRVRKIKMDSLFNVDGFRMHLSSRNGKQLVFKGAEQLVLPEKYNKIVKDIGKICADYKINKDMVISDTIKITNYVLLDLYDLLLKKLSDTIYKIRLSRQFITLKNRRNNFERLSLLEKCIVLEEILHIFQCNIVNADITMINEGKGKDAGKLQLIYRLSNYDKVEIINQSITGFYEQVIDLKTI

SEQ ID NO: 4395 - protein, 1343 aa, unidentified
  REGION 1..1343: note = Description of Unknown: Cas Enzyme sequence
MNQEYYMGLDMGTGSLGWAITDTEYHILRRHGKALWGVRLFENALTAEERRSFRTARRRLDRRNWRIQILQELFSEEISKVDFGFFQRMKESKYYPEDKKDINGKCPELPYALFVDKNYTDKEYHRDYPTIYHLRKMLMETEEMPDIRLVYLAFHHMMKHRGHFLLSGDISKIKEFKGTFLQLEQNLKKEELNWTLELSDDEIQFIENILKDRMLTKSVKKSRLIKQLNAKTPCEKAILNLISGGTVKLSDVFENSELDGCEKPKISFSDMGYDDYIGTVEADLGEQYYIIKSAKAVYDWSVLVEILGDSSSVSEAKVKLYEKHKEDLRYLKEVVRKYLPLEYKHIFVDTEEKLNNYVAYIGMTKKNGKKNDLQSKKCSKEEFYDFLKKNVIKKISDEEVISYLGKELEQGTFLPKQVNKENSVIPYQVHMYELRKILDNLSGKSFFIQENAEKILQLFEFKIPYYVGPLGRNEEGTEGKFTWAVRKNNEKIYPWNFKDVIDIEESAEKFIRRMTNKCTYMLGEDVLPKDSLLYSKYMVLNELNNLRLNGEKISVELKQQLYKEVFCRYRKVTIKKLKKYLVCEGIVDKKVEITGIDGDFKAQLTAFHDFKEKLTGVTLSQKEKEEIILNIVLFGDDKKLLKQRVMRMHPELTEKQIKSISLLSYKGWGRLSKAFLEDITAPAPGTEEVWNIITAMWETNDNLMQVLSKNYQFMDRIEEGNSIRKEKKLSYKTVEELYVSPAVKRQIWQTLKVVKELQKVMGYAPKRVFVEMARGEQGNQKDKRRDSRKKQLIDLYKKCKEEEKDWIEELNKSEDQQLRSDKLYLYYTQKGRCMYSGEIIQLEDLWDNTKYDIDHIYPQSKTMDDSLNNRVLVKKEYNAAKSDEYPIKESIRKARKLFWKSLLDEGFITKEKYERLIRNTILTPDELAGFINRQLVETRQSTKAVAEILKQVLPNSEIVYVKAKNVSNFRQDFTPDLLKVRDMNDLHHAKDAYLNIVVGNSYYTKFTKNAVWFIKENPGRSYNLKMMFKGDKDIIRNREVAWKAGNNGTIVTVKKVMKKNNILVTRRTYEVKGGLFDQQIMKKGKGQVAIKETDKRLTVEKYGGYNKATGAYFMLVKSKDKKGNEIRTLEFVPLYRKEQIEKDEQTVLEYLRTEKKLVEPEILLEKIKTDTLFKVDGFKMWLSGRTNERLIFRGANQLLLSNDKAETLKKISKYVQRRKENKSILLNDRDGVGEEALEKLYGAFLEKLKGTIYGVRLSAQAETLVNKKEQFMKLTKEEKCMILYEILHIFQCQSGSANLKAIGGPGKAGILVMNNNITNCKQISIINQSPTGIYEEEIDLLKL

SEQ ID NO: 4396 - protein, 1336 aa, unidentified
  REGION 1..1336: note = Description of Unknown: Cas Enzyme sequence
MADYFMGLDLGTGSLGWAVTDREYEIMRAHGKALWGVRLFDSANTAEERRAFRTARRRLDRRNWRIELLQELFDEEVSKADPGFFLRMKESRYVPEDKRDALGNCPELPYALFVDEGYTDKDYHKQFPSIYHLRKWLMNTDETPDIRLVYLALHHMMKHRGHFLFSGNIESIQEFQETFRKYIKSIKDEELDFNLCIEDEELRETENILKDRNLTRTAKKARLIKLLGAHTTCEKEALNLVAGGTAKLSGIFGNGELDSCERPKISFADAGYDEYAAAIEDTLGEQYVIIEMAKAVYDWSVLADIMGDYASISDAKVAVYEKHQKDLRYLKELVKENLSQDIYKEIFVETRDKLNNYSAYIGMTKKNGRKSELEGKRCDRKEFYDYLKKTVVNAIADAEKTEYMQKEMDTETFLPRQSTKDNGVVPYQVHLHELDAILANLSGRIPVLKENGSKIRDIFTFRIPYYVGPLNGIRKGGEKTNWVQRRQNGKIYPWNFDEMVDAEASAEKFIRRMTSKCTYLNREDVLPKNSMLYSKFMVLNELNNLRLDGEPVSVELKQRIYEDLFQHNRKVTQKKLKKYLVREGITDKDVDITGIDGDFKGTLTAYHDFKALTDCALSQNDKENIILNITLFGDDKSLLKKRLNILYPELTESQIKIISALPYKGWGRLSRRFLEGITAPAPETGEVWTVIRSMWETNDNLMQVLSGKYHFAETIQAENEEETKEITYKTVDEMRVSPAVKRQIWQTLQVVREIRKVMGEPPKRIFVEMAREKTESKRTESRKKRLIELYKKCKEEERDWVSELGDTEETKLRSDKLYLYYTQKGRCMYSGESIDLAELWDNRKYDIDHIYPQSKVMDDGLDNRVLVKKVYNADKTDEYPIRQDIREKMRPFWNMLREGELISKEKYNRLTRGTGFEPSELAGFIARQLVETRQGTKAVASILKQVFPETEIVYSKARVASQFRQDFDLIKVREMNDLHHAKDAYVNIVVGNVYYTKFTSNVAWYVKENPGRSYNLKRMFTSEKDVARNGELAWKAGSGGTIATVKRVMGKNNILVTRRSYQVKGGLFDQQLMKKGKGQVPIKGSDERLADISKYGGYNKATGTYFMLVESEDKKGAKMRSMEYVPLYLCEHVEKDENAARKYLERERGLKNPRVLIAKIKIDTLFKVDGFYMWLSGRTGNRLVFKGANQLLLSEQDARILKKVIKYTNRKKENKNAVLVEQDGLHEEDLIKLYDVFLDKVANTVYNIRLSAQQKTLTDKKEVFCGLSNEDKCIVLSEILHMFQCQSGAANLKLINGPGNAGILVLNSVVSKCSQISIIHQSPAGIYEQEIDLKKI

SEQ ID NO: 4397 - protein, 1341 aa, unidentified
  REGION 1..1341: note = Description of Unknown: Cas Enzyme sequence
MEKDYYLGLDMGSGSAGWAVTDDQYHVLRAHGKAMWGTRLFESANTAEERRINRTARRRLKRRNQRIEWLQEIFAEEINTKDSGFFRRMKESRYWAEDKRDENGSCPEMPYSLFIDEDFTDKEYHEKFPTIYHLRKYLMTTEETPDIRLVYLAFHHMMKHRGHFLLNGNIEEIRKFRKTFDQFLEVVRNEEMGFAGEIEEETYKKIEMTLKDVNLTRSAKKTTLIKSLKVTRVEEKELLALISGCTVKLSNIFNDKSLDETERPKISFADAGFDDYEAEIQSNLNEKYYIIESAKAVYDWAALADILGEYSCISEAKVALYEKHHKDLKRLKDLVRNNISSEVYKEIFVDVSGKYKNYCAYIGTTNINGKKKDFEGKKCTKEDFYAYLKKSVIECINDSEKTDWLKLELEKGNFLPKQLTGENSVIPYQVHLYELNAIITNLQERIPLLKRDGEKIRQIFTFRVPYYVGPLNGISIDGKKTNWVKRKEGVIYPWNFSDIVDEESSAESFIRRMTNKCTYLIHEDVLPKYSLLYSRFEVLNELNNVRLNGELLSVELKQKIYEDVFQRYRKVTQKRLKRYLLTEGIIDENTVITGLDGDFKGSLTAYHDFKEKLTGLNLTEREKEEIILNITLFGDARSLLRKRIGKICSQLSDKQKENLSKLSYQGWGRLSKKFLNGIAISVQGEEEWTIIKALWETQDNLSQLMGAKYTFRNAVEKENGELENREISYETVKDLSISPSVKRQVWQSLLIVKEICKIQKKPPRKVFVEVAKEKTNSGRTESRKKRLQDFYKYCSKYEKELYDESIQNKLEKCSESDLRSDKLFLYYMQMGRCMYTGQPIDFDELWNNQKYDIDHIYPQSKTMDDSIDNRVLVKRISNQEKTDVYPIRADIREKRRGFWKELKNVGLISEEKYKRLTRATEFEPAELAGFISRQLVENRQTTKVVASILKQAMPDTEIVYVKARTVSEFRHKFNFIKVREMNDFHHAKDAYLNVVVGNTYLVKFTKSPVNFIENHSNRSYNLKKMFTDGRVERNGEIAWISGENGTIGTVRNIMKKNNILVTRRAHEATGGFFDQQLMKKGKGQVPVKGSDERLLDIEKYGGYNKETGAYFVLVESDEKKGKKKRTIEYVPIRLKKQLENNRKALENYLCEQRGLTNPVVLIDKIKMDSLFRVDGFFMWLSGRTGNQLLFKCANQLVLSTEDEATLKKIVKFVNRRKENKEIKIYESDKLNEEMLNRLYNTFLYKLQNSIYGNRLGEQAKTLSSKKENFDKLQIEEKCLVLYEILHMFQCQSATSDLQLIEGPGKAGTLRLNSNITKYKNINIINQSPTGIYEQVIDLQKI

SEQ ID NO: 4398 - protein, 1341 aa, unidentified
  REGION 1..1341: note = Description of Unknown: Cas Enzyme sequence
MEKDYYLGLDMGSGSVGWAVTDDQYHILRAHGKALWGTRLFEAANTAEDRRINRTARRRLKRRNQRIEWLQEIFAEEINTKDSGFFRRMKESRYWAEDKQDENGNCLEMPYSLFIDKDFTDKEYHEKFPTIYHLRKYLMATEETPDIRLVYLAFQHMMKHRGHFLLNGSIEEIREFRTTFDQFLEVIRNEEMGFDGEITEETYNDIENTLKNVNLTRSAKKSTLVKLLKGTRVEEKELLALISGCTVKLSNIYNDKSLDETERPKISFADAGFDDYEIEIQNNLNERYCIIESAKAVYDWAALADILGKCSSISEAKVALYEKHHNDLQRLKELVKKNISTEAYKEIFTDTSGKYKNYCAYIGTANIDGKKKDFEGKKCTKEDFYAYLKKSVIERINDPEKTEWLKKELETGNFLPKQSTGANSVIPYQIHLYELNAIITNLQERIPLLKREGDKIRQIFTFRVPYYVGPLNGISVDGKTTNWVKRKEGKIYPWNFKEMVDEEVSAERFIRRMTNKCTYLIHEDVLPKYSLLYSKFEVLNELNNVRLNGELLSVELKQKIYEDVFQRYRKVTQKKLKRYLLTEGKINENTIITGIDGDFKSSLTAYHDFKEKVTGLNLSEKEKEEIILNVTLFGDARTLLRKRIGKICPQLTDKQKEGLSSLSYQGWGRLSRKFLNGIVISAQGGEMWTIIRALWETQDNLSQLLGAKYEFRKEVEKENGELENREISYETIKELCISPSVKRQVWQALLIVKEICKIQKTPPKRVFVEVAKEKTNSGRTESRKKRLLDLYKYCSKYEKELYDENLQSKLEKCQEADLRSDRLFLYYTQMGRCMYTGQPIDLDELWNNQKYDIDHIYPQSKTMDDSIDNRVLVKRILNLEKTDLYPIQADIREKCRGFWKALKNAGFISEEKYKRLTRATEFEPAELAGFISRQLVENRQTTKVVASILKQAMPDTEIVYVKARTVSEFRHKFNFIKVRDMNDLHHAKDAYLNVVVGNTYLIKFTKSPVNFIENHSNRSYNLKKLFTYGEVERNGEIAWISGENGTIGTVRNIMKKNNILVTRRVHEATGGLFDQQLMKKGKGQVPVKGSDERLCDIEKYGGYNKEAGAYFVLVESDEKKGKKKRTIEYVPIRLKKQLENNREALENYLQEQRKLINPIVLLDKIKIDSLFRVDGFFMWLSGRTGNQLLFKCANQLILSTEDEATLKKVVKFVNRRKENKEIKIYESDKLNEEMLDKLYNTFLYKLQNSVYGNRLGEQAKTLSSKKVKFDELRIEEKCLVLYEILHMFQCQSVASDLKLIEGPGKAGILVLNSNITKCKNICMINQSPTGIYEQVIDLQKL

SEQ ID NO: 4399 - protein, 1336 aa, unidentified
  REGION 1..1336: note = Description of Unknown: Cas Enzyme sequence
MEQEYYIGLDIGTSSVGWAVTDMNYQIIKRHGKALWGSRLFASANTAEERRGFRTARRRLDRRNWRINILQELFAEEISKVDSGFYLRMKESKYYPEDKKDSSGKCPELPYALFVDKDYTDKDYHKEYPTIYHLRKMLMETEKVPDIRLVYLVIHHMMKHRGHFLLSGDINQVTEFENTFLQFAENLKNEELDFQVEMSEERIKEVEIVLKDKNLTKSAKKNRLIKYFGAKSACEKAVFTLITGGTVKLSDVLGNEELNNCEKDKISFSDNNYDEYVGTVEEDLGEQFYIIESAKAVYDWSILADILGDSASISEAKVKSYEKHKEDLAYLKKVVKQYLPKEIYKKVFVITEDKLCNYPAYIGMTKINGKKVDLQGKQCSREDFLSFLKKEVVKKIEDESVKNYLSEEIEKDTFLPRQVNKDNGVIPYQIHKYELKKIIDNLSDKMPFIKENGEKIMQLFEFRIPYYVGPLGKKSEKFAWAVRKNDDKIYPWNFEQVIDVEESAEKFIRRMTNKCTYLVGEDVLPKDSLLYSKYIVLNELNNLRLGGEKISVALKQRIYEELFQRKRKVRQKDLKNYLIREGIAGKEVEISGIDGDFKGSLTAYHDFKEKLTGVELSKKEQEEIILNIVLFGDDKKLLKQRLGKRFPKLTEKQKATLASLSYSGWGRFSKKFLEEITAPAPETGEVWNIITALWESNNNLMQLLSSDYMFMESIEEFNYGKKNITLTYETIENLYVSPAVKREIWQTLKILKEIQKVMGGEPKRVFIEMAREHQESKRTDSRKSWLMDLYKACKKEERDWLEELGQYESHQLRSDKLFLYYTQKGKCMYSGESINLEELWDNTKYDVDHIYPQSKTMDDSINNRVLVKRQYNAKKTDNYPLNSDIQEKMSTYWKMLLDGGFITKEKYERLVRKTELTPNELAGFIERQLVETRQGTKAVAEILKEAMPDTEVVYAKAKNVSEFRHEYGFIKVREMNDLHHAKDAYLNIVVGNSYYVKFTKSAANFIRENPGRSYTLKTKELFAHDIVRNDEVAWKSGNHGTMEIVEQTMKKNNILVTRRIYEVKGGLFDQQIMKKGKGQIPIKGGDERLKNIYKYGGYNKASGAYFMLVKSLDKKNNEQRTLEFLPIYMKDYVEQSEEKAQEYLVTNRKLKNPEIILPKVKIDTLFKVDGFYMWLSGRTKNQLKFKCANQLILSEEDVKILKKVIKFINRKKENKDIVLNDYDGITEEDAGNLYETFIRKLKDSIYKKRLALQGETLENKRKEFEALSLEDKCIVLGEILHLFQCQSGAANLKLIGGPASAGILVMNNNISKCNQISIITQSPTGIFEKEIDLLNL

SEQ ID NO: 4400 - protein, 1347 aa, unidentified
  REGION 1..1347: note = Description of Unknown: Cas Enzyme sequence
MEKDYYLGLDLGTGSLGWAVTNENYEVLRAHGKALWGVRLFESANTAEERRIFRTSRRRLDRRNWRIELLQGLFAEEIDKVDSGFYLRMKESKYMPEDKRDMNGECPQLPYALFVDKDFNDKDYHKQFPTIYHLRQWLMTTNETPDIRLVYLALHHIMKHRGHFLLSGDIENIREFDSTFSQFIQCLREEELDFHLDISAETSKVAETILQDKSLTKAAKKMRLIKELQAHTPCEKAVLTMIAGGTVKLSDIYTNSEYDNLERSKLSFSDSTYDDYSNTLQSDLGEQFIIIEKAKMVYDWSVLIDILGNYQSISESKVAIYEKHKKDLAYLKKLVKENFDSNLYRDIFVKTDEKTANYSAYIGMTKKNGKKVAIEGKQCSQSDFYQYIRKNVLNELTGNTDAQYLKDELDKETFLPKQVHKDNSVIPYQVHLYELNQILKNLSPRMPILQETGDKIRQIFTFRIPYYVGPLNGVLQNGQKTNWVVRRNAPNTKSEKIYPWNFNEIIDVEASAEKFIRRMTNKCTYLIHEDVVPKNSLLYSKYVVLNELNNLCLNGEPIDVALKQKIYHDVFEKSRKVTQKKLKDYLVREGIIAKSDAAKLDITGIDGDFKGSLTAYHDFKEKLSNCALSQEDKENIILNITLFGQDKTLLKKRLSALYPQLTDKQKSALCALNYSGWGRFSQKFLEGITAPAPKTGEVCTIIRTMWETNDNLMQVLSNQYLFRDAIEEENGKDEIKGFSYQLVDQLYVSPAVKRQIWQTLQIVKELCKVMGNPPKRIFVEMAREKSESKRTESRKKVLIDLYKKCKDEEREWVAELTKLEDTRLRGDKLYLYYTQKGRCMYSGEPIELDALWDNNKYDIDHIYPQSKVMDDSLDNRVLVKKTYNAEKTDIYPIRSEIREKMKPFWKSLLDGGFISKEKYNRLIRSNKFESSELAGFIERQLVETRQSTKAVASILKQLLPDTEIVYVKAKIVSNFRQDFHLVKVREMNDLHHAKDAYLNIVVGNVYYTKFTKDAVWFIHNNPGRTYNLKRMFTSKDIERNGQTAWKAGENGTISVVKRMMKKNNILVTRRSYEVKGGLFDQQLMKKGKGQVPIKGNDERLQNIEQYGGYNKASGTYFMLVESEDKKGNKIRTIEFVPLYLCHKIENDTAYAIQYLIQDRGLINPQILLAKIKIDTLFQVDGFYMWLSGRTGNQLVFKGANQLILSAADTSVLKKVLKFVARQKENKNLKLVAFDELDTADLIGLYDTFISKIKDTVYGVRLKAQESTLVEKRAEFCDLADEDKCIVLSEILHMFQCQSTTADLKLIHGPGHAGILVLNNNITKCKQISIINQSPTGIYAQEIDLQKL

SEQ ID NO: 4401 - protein, 1340 aa, unidentified
  REGION 1..1340: note = Description of Unknown: Cas Enzyme sequence
MGEEYFLGLDMGTGSLGWAVTDDKYQILRRHGNALWGVRLFETANTAEERRMFRTNRRRLDRQGWRIKILQELFAEEICRVDPGFYLRMKESKYYPEDKRDANGECPALPYALFADAQYTDKDYHREFPTIYHLRKMLMETETTPDIRLVYLAFHHMMKHRGHFLLSGDISQVTEFRNTFLQMIANIKSEELDFSLEIEETQMGQIEAVLKDHKLTRSEKKRRLTQILKPATACEKAIFTLLSGGTVKLSDIFGKAELDEGERPKISFADNGYDDYSASVEADLGEQYYIIESAKAVYDWSVLSDILGDSVSISDAKVKLYEKHKKDLAYLKKVVRENLPREVYNQVFVNTDEKLCNYCAYIGMAKKNGRKVALEGKRCTREEFESFLRKKIVNKIEDKEIQEYLSEEIEKGTFLPRQVTKDNGVIPYQIHLYELRKIIDNLSPRMPFIRDNGDKIIQLFTFRIPYYVGPLGKGEGSEKFSWAVRRTDEAIYPWNFKDVIDVEASAEKFICRMTNKCTYLYGEDVLPKDSPLYSKFMVLNELNNLKLDGQSVSVELKQRIYQELFCHTRKVTQKKLVSYLVREGITGKNVEISGIDGDFKASLTAYHDFKEKLTGVELSQQEQEEIVRNIVLFGEDKKLLKQRLEGRFPQLTQKQISVIATLSYKGWGRLSREFLENITVPAPGTGEVWNIITALWETNDNLMQLLYGEYGFQTEIECFNAKEKKKSLSYETIEESYVSPSVKRQIWQTLQVVKELKKVMRGDPKRVFIEMARENQESKRTESRKKTLLDLYKNCKKEEPEWIAELTEHLEKLDDSQLRKDKLFLYYTQKGRCMYSGERIELEDLWDNTRYDIDHIYPQSKTMDDSVDNRVLVKKEYNAKKTDVYPIAADIRGKMSPFWKKLLDNKLISKKKYDRLVRTEELTPEELAGFIDRQLVETRQSTKVVAEILKEAFPDTEIVYVKAGNVSNFRHMFDIVKVRELNDLHHAKDAYLNIVVGNAYYVKFNKNAAWFIKENPGRSYNLKRMFDYDIRRNNEVAWLAGSTGTISQVKNMVSKNHILVTRKSYEVTGGLFDQQLMKKGKGQVPVKTSDERLGNIEKYGGYNKASGAYFMLVKSKNKKGEEQRTIEYVPIYLKHYIEESKENALDYLKNERKLNEPEILLDKIKKDTLFRVNGFYMCLSKRTGKQLAFKGANELLLPEPETLLLKKITKYIQRRKENKDLKLTKQDNITEKELLELYDVFTEKLNHSVYAVCLGTQGKTLVQKKPAFVALPVEEKCIVLSEILHLFQCQSGSANLKLIGGPASAGILYLNSNISDAGEILIINQSPSGIFEKRIDLLRL

SEQ ID NO: 4402 - protein, 1340 aa, unidentified
  REGION 1..1340: note = Description of Unknown: Cas Enzyme sequence
MKNDYYVGLDLGSGSVGWAVTDPDYHLLRSHGKALWGVRLFDTAKTAEERRVFRTSRRRLQRRNWRLNLLQQIFVDEINKIDDGFFRRLKESRYLPEDKHNTDGSIPDLPYSLFIDKSYTDKDYHRQFPTIYHLRKWLMETDTTPDIRLVYLAFHHMLKHRGHFLFSGSIDEIRNFNNVFKQLSDALRSEDLPFNYNFTEDQVEKAELLLKNSQLTKSQKKTLLIQLFNEKTPCEKAVYTLLAGGTAKLSDLLGDELLNDSEKPKISFTDASYDDYVDSLQSTLGERYHIIEALKAVYDWAVLADILKGFSSISEAKVATYEKHHNDLVYLKKLVKENLSVTDYKELFVQTNEKLSNYSAYIGMTKKNGKKQSLENKLCSKEDFYSYLKKHVLACIADETKTAFLKAEIEYGTFLPKQTTKDNSVIPNQLHLYEFDRIIANLADRIPMLKEQKDKLRSLLTFRIPYYIGPLNGIVKNGERTNWMQRKSEGTIYPWNFSEIVDEEESARHFIQRMTNHCTYLPTEDVLPKYSPMYSRFMVLNELNNLRLDGQAISVPLKQQIFTELFMKKRKVTQKSLKQYLVREGIAKKEVEITGIDGDFKGSLTAYLDFKEKLTGMPLNTSDMEILVLNITLFGDDKRLLSKRLSRLFPKLTDKQRNSICNLPYRGWGRLSSAFLNELTAISPETGENWTILRTLWETNDNLMQILSDKYDFADAIEKQNQENGDLPQTLSYELIDRQPLSPAVKRQVWQTILIIKELCQAKKQPPKRIFIEMAREKQNTDRTVSRRKQLIDLYQSCKKEERDWINELNEKNDSDLRRDKLYLYYVQMGRCMYSGEPIELSDLWNDQKYDIDHIYPQSKVMDDSLDNRVLVKRTYNADKTDIYPISEDIRKKQTPFWKMLLEKKFISEEKYHRLTRNTGFEPSELAGFIARQLVETRQSTKAVASILKQFLPDTEIVYVKAKTVSQFRQDFHFIKVRDMNDFHHAKDAYLNIVVGNVYFTKFTKNAMWYVKEHPGRSYNLQKMFTAGVVERNGQTAWTPGENGSINIVRQVMGRNNVIITRRSYEVSGGLFDQQLLKKGKGQVPVKSSDPRLRDIEKYGGYNKETGAYFTLVQSKDKKGNLIRTIEFVPLRLKDSLEKNEMAMKTYMADEHGLNEPEILLSKIQIDTLFCIDGFYMWLSGRTGRQLVFKNANQLILSEKNTATLKKVLKFISRRKENKELQIYPSDELTNESLTQLYDQFLDKLKNTIYSSRLSAQIKSLEDKKEVFEQLSPEDKCTVLSEILHMFQCQSASANLKLIDGPGSAGILVLNSDITKCKHIQIIHQSPAGLYEQVLNLNQL

SEQ ID NO: 4403 - protein, 1340 aa, unidentified
  REGION 1..1340: note = Description of Unknown: Cas Enzyme sequence
MEKDYFLGLDMGTGSLGWAVTDENYEIVRRHGKALWGVRLFESAYTAEERRAFRTNRRRLKRRNWRLSILQSLLEEEINKVDEGFFLRLKESRYIPIDKRDMNGNCPVLPYSLFVDKDYSDKDYHKEFPTIYHLREYLMKTDNTPDIRLVYLAFAHIMKHRGHFLFSGNIENIKKFSDTFKQLVNTIQNEELDFNINIDNELLYQIEIILKDKNKTKSGKKSELIKLLGAKTTCEKEILNMIVGGKVKLSKIFGNSEFDSFEKSDVCFSDSNYDEYAAGVQSDLGELYVIIAQAKAVYDWSILVDILGEYNSISEAKVALYEKHKGDLAYLKKLVRDNCERSVYQDVFVKTSDKLSNYSAYIGMTKYNGKKQAQAGKMCSQKEFYDFLKKSVLSVIDNDKTEYLREELEKETFLPRQVTKDNSVLPYQVNLYELEAILDNLENKIPVLKENRDKIIKTFTFRIPYYVGPLNGISRKGKRTNWAVRRSNEKILPWNFEDIIDIQASAELFIRRMTNKCTYLVNEDVLPKNSLLYSKFMVLNELNNVRLNGELIPVKVKQNIYNDVFKRYRKVTQKKLRDYLVKEGIADRNVDITGIDGDFKGSLTAYHDFKEKLTGVELTDSQKEEIILNITLFGEDKKLLNGRLHILHPEFTEKQRKSICSLSYNGWGRLSNKFLEGITAPAPETGEVWTIIRAMWESQDNLMQVLSDKYLFGAAIDDENGKDEILEITYELVDNLYISPAVKRQIWQTLQVIKEICKIMGNPPAKIFVEMAREKQESIRTNSRKRQLIDLYKKCKNEEGAWISKLVNKLNDSEEHTLRGDKLYLYYIQKGRCMYSGERIRLEDLWDNHKYDIDHIYPQSKVMDDSLDNRVLVKREINADKTDEYPLNKDIRSKMQPFWKSLLDGGFISKEKYKRLTRATEFEPNELAGFIQRQLVETRQSTKAVASVLKQIFADTEVVYVKAKIASKFRQDFDLIKVREMNDLHHAKDAYLNIVVGNVYNTKFTQNAMWYIKEHPGRSYNLQKLFFFDVVRGDKVAWKAGKNGTISVVKKVMSKNNILVTRRSYQVKGGLFDQMPMKKGKGQVPFKGSDERLQNIDNYGGYNKATGAYFMLVSSVDKKEQKIKTIEYIPIYMVNIIERSHEKALEYLLNERKLKEPEILIPEIKIDTLFNVDGFYMWLSGRTGSQLVFKCANQLLLDYNMQRILKKVIKYVNRRKENSAIIITENDCIDAEDLLRLYDTFLDKLEYSVYSKRLSAQKKTLTDKREKFIGLCTEDKCIVLYEILHMFQCQSGAANLKLIDGPGKAGILVLNNDITKVNNISIINQSVTGVFEKEIDLGDL

SEQ ID NO: 4404 - protein, 1344 aa, unidentified
  REGION 1..1344: note = Description of Unknown: Cas Enzyme sequence
MEKEYFLGLDMGTGSVGWAVTDNSYEILRSHGKSLWGVRLFESANTAEERRMFRTARRRLDRRNWRIQILQELFAEEIADIDSGFYLRMKESKYYPEDKRDAKGNCPDLPYALFVDKDFTDKDYHAQFPTIYHLRKYLMNTSETPDVRLIYLAIHHMMKHRGHFLLSGDISQIKEFKGTFLQMVQNLKNEELEWEIEAEDKELDFIEETLKNKELTKNTKKSTLVKQLKARTACEKAVLTLLSGGTVKLCDIFGNEELNECERPKISFSDSGYDDYIGSVESALGEQYCIIESIKAVYDWSVLVEILGDSSSISEAKVKVYEKHRQDLRYLKKVVRKELSSDAYKKIFVETSDKLNNYCAYIGMTKKNGKKVDLLSKQCSKEDFYDFLKKTVIKNIVDPDAKKYLEKEIEQGNFLPKQVNKENGVIPYQVHLYELKEILRNMEEKLPFIKENKEKLIQLFEFRIPYYVGPLNCTDGKDEKFTWAVRKSREKIYPWNFTEIVDVEESAEKFIRRMTNKCTYLVGEDVLPKDSLLYSKFMVLNELNNLRLDGEKLSVELKQRIYEEVFCKYRKVTIKKLKKYLRCQGIADEKVEISGIDGEFKAQLNSYHDFKEKLTNIDLSQKAKEEIILNIVLFGEDKKLLKQRLHKRFPELTDGQLKGISTLSYKGWGRLSGTFLEKITAPAPETGEVWNIITALWETNDNLMQLLSRKYIFVEEIEAFNSGRKNAELSYKTVEELYVSPAVKRQIWQTLKIVKEIRKVMGADPQRVFVEMAREKQENKRTESRKKQLLDLYKACRKEEPEWIDELCGQLEELQDHQLRSDKLYLYYTQKGRCMYSGERIDLGDLWDNQKYDIDHIYPQSKTMDDSLGNRVLVKKSLNHDKTDIYPIKKEIRDKMSPFWKSLLEHGFISKKKYERLTRSTELEPGELAGFIERQLVETRQSTKAVAEILQMALPHTEIVYVKAGNVSRFRQDFELIKVRDMNDLHHAKDAYLNIVVGNSYYVKFTKDAAWYVKENPGRSYNLKTMFTSEKKDIVRNGELAWKAGNNGTITTVKKFMRKNNILVTRKAYEVKGGLFDQQIMKKGKGQVPIKGNDSRINNIEKYGGYNKATGAYFMLVKSKDKKGNEIRTFEYIPLYMKNQIEKDDNAAYTYLIEEKQLREPEILIKKIKTDTLFNVDGFKMWLSGRTGSQLIFKGANQLILSPQDTAILKKVIKYVNRKKENKEAVLNQRDELTEDMLMQLYDTFIDKLQNAIYGIRLMNQVQTLSTKRENFVKLCAEDKCFVLNEILHMFQCQSTASNLKLIGGPGSAGILVMNSNITKCKRISVINQSVTGIFEKEINLLTL

SEQ ID NO: 4405 - protein, 1349 aa, unidentified
  REGION 1..1349: note = Description of Unknown: Cas Enzyme sequence
MSKNGSSNNKDYYLGLDVGTNSVGWAVTDEEYNLLRAKGKDLWGVRTFKEAKTAEERRINRSSRRRNDRKKIRLQLLRELFEDEINKIDKEFYSRINESRLWEEDKKVSGKFSLFNDKNFTDKDFFNKYPTVFHLRSDLMTSEKKRDIRLYFLAINQMMKRRGHFLFQNQNIDNISDVTPYIESLDSILRDEDFNIELEPEFFNELIKIVSDSTLKRTDKTNVVKPMVVGLNLDKIQEKQVLNITKLLIGGKSPVIGIFNDFESNETEIKDIDFTSEQYENALESLESQLGSRIEIIEVIKAIYDYSRLQEVLKGKDGISSAQIARYKKHAEDLAELKQLVRGLEDKNSTYYKKIFTNKNEKSNYVNYIGSTNKNGKKITVGKCSSSEFFDFLKKILKEILNEDDPRYKKIIDDINNEQYLPKQITNLNSIIPYQIHLIELKKILFNLVRDFPSFKKLEDDIEKWKKIEKLFTFRIPYFVGPLNSVHVDSHNSNSWIIKNENEESTKIRPWNFEKVVNLEKCEEEFIKRMTRQCTYFPDEKVLPKSSILYSKYNVLNELNNLRVDGEKLPLSIKNDIFNKVFLKFKRVTPNRIKQFLIENNLADSKSVLSGFDRDLKSTMSSYIEISEILGNSFNLEKAESLIEWITIHSGETSSLLSNLKDLFPDINDEKIRKIGKLRFSDWGRFSKKYLNGFEGVNKETGETGTIIHFLENTDDNQMQLMSGNYSFTEDIDEYKKSFLPNKISYEMVENLFVSPSVKKMIWQVMKITNEIVDVLGKEPKRIFIEMARGKEEEPKRKESRKYQLLQLYKFIESDERNWVEELKLKTESELRSEKLFLYYTQMGKCMYSGNKIELADLWNENLYDIDHIIPRSKKKDDSILLNKVLVLKDLNQRVKGDSYPVPPELKKIELWNTLLSKGLIEKTKYERLVRSSPLSDEEMAEFINRQLVETRQSTKVIADLLKNIFKESKIVYVKAGLVSEFRQDFKLLKERDVNDLHHAHDAFLNIIVGNGYYTKFTGNALEFVKKNHGKYTLNKLFKQDIKGAGSKNVWNVDKDIPKVKSILNKPSVLFTAEQYEQHGRLFNATIERKDNIKKNTKYVPLKNDEKISDISKYGAYNNISGAYFMVVQHKVKNETIKSIEEVPLYLVKQIESGKLNLLDYCVKDLKLKEPKILIDKLLTKTVLEINNFRYLLNGRTNNRLIIQSNNQPYWDIDTTFKLKQVTNAVKKSKKYDKDYCEDLELSMLNELVSKLITKINSRPYIDRINVPDIVRTLDAEKISLPKKALCDLILGLLDYTKAVNVGIDLTMIEGSKFSGMTTTNKVIKKEDAMKVIYQSVTGIYEKEEILNK

SEQ ID NO: 4406 - protein, 1356 aa, unidentified
  REGION 1..1356: note = Description of Unknown: Cas Enzyme sequence
MKKIEEYYIGLDMGTGSVGWAVTDPTYNIIKRHGKALWGIRLFESAKTAEERRIFRTSRRRTERRKNRLHLLQEIFAEEISKKDMGFYQRMKESKYWHEDKKDINGNMPELPYALFADDGFTDKDYYKKYPTIFHLRYALATNTTDKPDIRLLYLALHHIIKHRGHFLFEGKKLSEVKEFSTAIEALVQQAEEQEIDLKSLTQEEVLTQLEHIMSDAQCTKSDKKTQVSKLIVGTDKQKQKQEKAIAALITGCTVKLSDIFADPELDKEEISKICFSDNGYEEKEVEIESVLADRFLLIAAAKGVYDWTVLHDILGDARFLSEAKVKTYEKHRDDLRKVKQLLRMDKEVYEAVFGVSEKNEANYSAYIGMAKKNGKKQPIEKKCSQEDFYKFLKKQLDRLSVDEMGQEIIDELKAEMDLGTLFPKQMIRDNGVIPYQLHENELNAILDNAQKFYPFLLEKDQDGYTPVEKIQKIFRFRIPYYVGPLNTAHQDKGGHSWSVRKKEGKIYPWNFSEMIDEEESATKFIERMTNKCTYLIGEDVLPKESLLYAKFNVLNELNNLRIDGELIAPELKQDIYNNVFKKYQRVTGKKVKDYLRINGVISKEQELSGFDQNFKSSLKAYHDFKQIVGTGVLSESEQEDIVRDITLFADSQKMLKQRIHRKYPMLSDKQIAQLANKKYAGWGRLSRTFLENIESVNKETGEVMNIITALWETNENLMKLLSGKYDYTKQIEQWNAGQMKKGEIEYQDIEELYVSPAVKRPIWQTIKIVREITNIMGGAPKRIFVEVAREPGEKGVRKVSRRNQLLDLYKACKKEAPELYDRLANKESDNALRSDKLFLYYSQMGRCMYSGDAIDLDELFTNRYDIDHIYPQSKVMDDSIDNRVLVKRDLNSKKTDTFPVPEEYRKAGKPLWSTLLKKGLISKEKYKRLTRTEPFGEDELAGFIARQLVETRQSTKAVAHLLEEAYPDAEIVYAKARAVSKFRNKFDMIKVREVNDFHHAKDAYLNIVVGNTYYVKFTKDAAWFVRNNPGRTYNLKKMFENETVKRGNETAWIPGDNGTICTVKKWMRKNNVLFTRRAYEVKGGLFDQNILKKGKGQIPIKGGVDERLQSIEKYGAYNKASGAYFMLVESDGKKGERKRTIEFVPVFLAKSLEESVELRRRYCEEELGLVNPDVRIPKIKINTLFDVDGFKMHLSGRSSNGLIFKGANQLVVPYKIEKIIKVISKYCLDYKENKEAVLSEKIRPTEGMFEELFDLLVGKLEYTVYEKRLSAQVPKLKNGKIIFDALSAEEKCIVLMEILHLFQCASQSANLKLLNGPGRAGILTMGFDISTLSNVYIINQSITGFYEQVIDLKTI

SEQ ID NO: 4407 - protein, 1356 aa, unidentified
  REGION 1..1356: note = Description of Unknown: Cas Enzyme sequence
MKKFEEYYIGLDMGTGSVGWAVTDPTYNIIKRHGKALWGIRLFESAKTAEERRIFRTSRRRTERRKNRLHLLQEIFAEEISKKDMGFYQRMKESKYWHEDKKDINGNMPELPYALFADDGFTDKDYYKKYPTIFHLRYALATNTTDKPDIRLLYLALHHIIKHRGHFLFEGKKLSEVKEFSTAIEALVQQAEEQEIDLKSLTQEEVLTQLEHIMSDAQCTKSDKKTQVSKLIVGTDKQKQKQEKAIAALITGCTVKLSDIFADPELDKEEISKICFSDNGYEEKEVEIESVLADRFLLIAAAKGVYDWTVLHDILGDARFLSEAKVKTYEKHRDDLRKVKQLLRMDKEVYEAVFGVSEKNEANYSAYIGMAKKNGKKQPIEKKCSQEDFYKFLKKQLDRLSVDEKGQEIIDELKAEMDLGTLFPKQMIRDNGVIPYQLHENELNAILDNAQKFYPFLLEKDQDGYTPVEKIQKIFRFRIPYYVGPLNTAHQDKGGHSWSVRKKEGKIYPWNFSEMIDEEESATKFIERMTNKCTYLIGEDVLPKESLLYAKFNVLNELNNLRIDGELIAPELKQDIYNNVFKKYQRVTGKKVKDYLRINGVISKEQELSGFDQNFKSSLKAYHDFKQIVGTGVLSESEQEDIVRDITLFADSQKMLKQRIHRKYPMLSDKQIAQLANKKYAGWGRLSRTFLENIESVNKETGEVMNIITALWETNENLMKLLSGKYDYTKQIEQWNARQMKKGEIEYQDIEELYVSPAVKRPIWQTIKIVREITNIMGGAPKRIFVEVAREPGEKGVRKVSRRNQLLDLYKACKKEAPELYDRLANKESDNALRSDKLFLYYSQMGRCMYSGDAIDLDELFTNRYDIDHIYPQSKVMDDSIDNRVLVKRDLNSKKTDTFPVSEEYRKAGKALWSTLLKKGLISKEKYKRLTRTEPFGEDELAGFIARQLVETRQSTKAVAHLLEEAYPDAEIVYAKARAVSEFRHKFDMIKVREVNDFHHAKDAYLNIVVGNTYYVKFTKDAAWFVRNNPGRTYNLKKMFENETVKRGNETAWIPGDNGTICTVKKWMRKNNVLFTRRAYEVKGGLFDQNILKKGKGQIPIKGGADERLQSIEKYGAYNKASGAYFMLVESDGKKGERKRTIEFVPVYLAKSLEESEELRRRYCEEELGLVNPDVRILKIKINTLFDVDGFKMHLSGRTGKQLLFKGANQLVLSEELQLIVKKIGKYCADYKENKEAVLSEKSEVTQEVLEELYDEFLHKLRNSLYGHRLSAQIEKIEKGKEIFQSMSNEQKCLILMEILHLFQCASQAANLQLIDGPGKAGILVLNNDISKLEDIKIINQSITGFYEQVIDLKTI

SEQ ID NO: 4408 - protein, 1347 aa, unidentified
  REGION 1..1347: note = Description of Unknown: Cas Enzyme sequence
MKKQFGEYYLGLDMGTGSLGWAVTDLNYNLEKLHGKALWGIRLFENAQTAADCRIQRGARRRLERKTWRLNLLQELFAEEISRKDPGFYLRLKESNFGPEDRSVDNNQKYSLFNDAAYSDKKYYMDYPTIYHLRKALLENKKAFDVRLVYLAIHNILKYRGHFLFAGLKADAITDFTRVFADVRQYLQDNVTGLENWNCTDPETVKKILKDRKMSVTNKKKQLEALFSAESKQEKAVVALLAGGTAKLCDLFVDEELKEVEKASLSFSKDNYDEIQQILKEELADRVEAIEKLKALYDWSLLTEILKDNTFISYAKCAVYEEHGHDLAILKQVVKKYIPKEYKNIFGAQQGKTANYSSYIGMYKINGTKEDVEKKCNQEDICKFLSTKLKDIRSDDANLKIIREKLALGIFLPKQVDKNNGIIPMQIHLVELEKILENASAYLPFLNNVDEAGNTIKSKIIDIMKFRIPYYVGPLNGTAMSKAKKRCWVVRSSDKIYPWNFEKVVNLEASAENFIRNMTNKCTYLTCEDVLPKNSLLYTEFMVRNEINNLKLDGMPISAGLKEQIFQDLFMQATKTRKLTLKKLAAYLKTENICGEVTGIDIDFKTSLKSYHDFYKIFGNDIIKNSAMIEKIILWITLFSNEKNMLIRKIKGNYPTVSETQIKQIKELNYADWGRFSQTLLDSAEIAYVDETTGEAVTILHAMKESGLNFMELLAKNCKYNFAQKIEAFNNANSSMETDLTYKTVDDLYVSPAVKRQIWQTITVVDELKGIMQHAPKKIFVEMARGEEEKKRTKSRKDRLMELYKACREDVKELLTELESSSDSDLRSEKLYLYYTQMGRDMYDTSKVIDVEQLMSSNIWDKDHIYPRSKTKDDSFDNLVLVNKAANAHKTDTYPLPAAVQSKNRGFWKLLLEKGFISQRKYDRLTRTTALSEDELADFIARQIVETRQSTKAVAQILTQVFKDTQIIYVKAGTVSDFRQVNEFTKVRDVNDYHHAKDAYLNIVVGNVYNTKFTNNPANFIKHLNGERYTLNPEKLYNFDVKNAWKAGKEGTISRVREIMSKNNILFTRHSYEGKGQLFDVNILKRGNGQVPVKKNWDIKKYGGYNSASTAYFTLVESVNKKGEKIRTIETVPMHIAKEIEKNEHGLETFLRKVDLLEPRVIIPKIKIKSLFVIDGYPMHISGRTGEQIMFWGAVELVLTAEQDSYAKKICKYIDRNKKANIKSGYLPINSLYDGITKNKNLELYDALLIKQKKTIYKQRPASQIKMVETSRDKFISLNIEEQSLVLKEILSLFTCSAASTNFELLGGGRQAGILKVSKNITDRAQAYIINQSPTGIFEQKVDLLRL

SEQ ID NO: 4409 - protein, 1341 aa, unidentified
  REGION 1..1341: note = Description of Unknown: Cas Enzyme sequence
MKKQKKQFGEYYIGFDIGTDSIGWAVTDLDYNIQKLNGKALWGIRLFDAGKTAEERRLHRSARRRRQRQIQRIDLLRDLFAKEIDKVDPGFYLRLEESKFYPDDKSIEQKNSLFNDKNYKDKDYLAEFPTIYHLRKALIENKKEYDIRLLYLAIHHIIKYRGHFLYEGQDISSEGDVGLLFKQVNQYLSDEYDTEFEFNSIEKVEDILKNKSLKKRDKKKELIDILSTKEKQQERIIDLICGYTVKLSELFCEEDYADSDLDKITFADGSFDEKKDAISDLLEDRMYLVEILKAIYDWALLAEILNGREYISYAKVDVYEKHKKDLKLLKDTIRKHLDKVTYNEVFRSHKVQNNYCAYSAKASTKKEEIGKKCTQEEFCTYIKGILKKIDVTDNNLEYLRNEAENNSLLPKQVTKDNSVIPYQIHLHELKIILSNASEYFAFLKETDDKGISVCDKIISIFKFRIPYYVGPINTAHEDAGFCWAEKKANEKVFPWNFSEVIDEEKSAEKFIRRMTNKCTYIYNADVLPKNSLLYSEFQVLNEINNLKINDEPISNDLKIKIFENLFMKEKKVTKKKLTNYLIANGYITNESSITGIDIELKNSLASYIDFKNILGNRANDRDMVENIIKWITLFGDSKRMLNERIEKEYGNIINQEEIVKLSNLKYKGWGRLSKELLCGIYDVDKETGELLNIISMMREKNDNLMQLLSSRYSYSDKISQINAQSIKQSNEISYEMVDELRLSPAVKRGIWQSLLILQELLKIMQHSPKKIFIEFARQEEKVKKRTLSRKESLIELYKNCKDQYAELVNDLETKTDFDLRNDRLYLYYTQLGRCMYTGESIDLFTLLRDTTSEIYDIDHIYPRSKMKDDSLENRVLVKKTANMQKGDNYPLPVSFMQQKALWNHLHNCKLIGDKKYNRLTSRKSLTDDDFANFIERQLVETRQSTKAFAELLKNIIPESDIVYVKANNVSEFRNNFEIVKVREINDLHHAKDAYLNIVVGNVYDVKFTRNPRNFIVNNSGKYNLRDLFKYDVKNQNCTAWKGGKEGTISTVKKTVEKNNILFTRYAYENKGEISDQQIMRKGKGQLPIKASDKRLHNIERYGGYNKASTAYFFLVEHGMKKERVRTIEFVPVYLAEEIEKDSDKLLRYCEENLNLVNPDIRIPKIKINALISYDGFLMHIKGRQNKHLIYANAQQLYIPKEYIKYLTIIYRNSDQVKSKKISVATAEKDFSNDMNIEIYDLLKDKLANSIYSKKMINQVKYLDKGRPTFITLTKMEQCEVIKKIIVLFKCVSGNTDLSLIGAGKSVGTLLTNKKLDANISLKIINKSITGVFSKEVDLNNI

SEQ ID NO: 4410 - protein, 1357 aa, unidentified
  REGION 1..1357: note = Description of Unknown: Cas Enzyme sequence
MKEIENYYIGLDIGTGSVGYAVTDENYNLIKHKNEAMWGSHVFEAGQQAAERRQHRIQRRLIARRKHRVQLTRELFAKEIAKIDENFYKRLDESALYPEDKSSHEIFSIFNDKNHTDAIYNKKYPTIHHLICDLMTSEDSHDVRLVYIAVSWLVKHRGHFLNEVNPDKIDSILDFDLLYSSFMMLFDEEKPWECDVKNLKDVLKKNLSVTAKERELLEILYNGKKPKTDEDDVFSKSAIVKLISGGTVKINELFNDEAASEENESICFKSPEKLEEVLPKLTDDRAEFLTRLWKLFDWSLLSNILIDSNSISEAKVKVYEQHKKDLCFLKQFFKKYMPDKYEHFFKCGGKDRVANYVNYSYNIKSLKGERPKKVTQAAFCDYLKGLVKNINVSEQDALYSGFVDMKSRLEAYYFMPKQVNTDNRVIPYQLYYHELKMILEKASLYLPFLSEAGDGLTTTEKLLKILEFRIPYFVGPLSKKSPHAWLKREDGKIYPWNFESKVDLDASEVAFIKRMTNKCTYLPDEDVLAKNSLLYSKFTVLNEINNLQINGLPISVELKQKVYTELFEKKKKVSVKMISDLLKSEGAIQGDDLISGIDTTVKSSLRSFHDFKNMLRQGMLTDLQVEEIIERLTYSEDRRRIKKWLNDKFSFLSEEDINYISKLKYNDFGRLSRAFLSEITGVCKEAGTGECCSIIEMLWETNDNIMQLRTDKYTFLEELRKRNNTENKVLEELLDDMYVSNAVKRPIYRTLDIVKDIVKVTKKAPTKIFVEMARGGGEKGKRTKSRRDSILELYSSIGKENSVIELKKQLGSITDNQLQKDSLFLYFTQLGKCMYSNTVLDILDILDIERFNSSDYDIDHIYPQSLVKDDSIHNNKVLVLKTLNGEKSNNLLKPEIRAKMSGFWAYLKEKGLINEEKYKRLMRKHAFSEEEKMGFINRQLVETRQSTKAIAAVFNAIYPDTEIIYVKAGLVSDFRHQYELLKCRDVNDLHHAKDAFLNIVCGNVYSSRFSKKFFNINSEYSLKTENIFRNPVSCGNKKVWRGQDSIALIKGIMRKNNIHYTRFAFCRKGGLFDQMPVRKSEGLVAIKKGLDTSKYGGYRKPTASCFLMTKFCLKKKTDIIILPIELMNEKIIFNDSNDMQLTLEFVAQTLADILGKEKSEINNISFPLGLRRIRVNTLLSLDGYLACISGKANGGKVISLSNMVPLILPSELELYCKKLSAFAEKRAKNSNINLDAQYDGITADENIKLYDLFLSKLSETVYKNAVFANQEKILKEGRTVFEQLPLEKQSELLLQILIIFNGSDADLSEVKGSKKAGVQTINTTISNWKKKYKNVYIIDISPSGLFKSMSKNLLELL

SEQ ID NO: 4411 - protein, 1338 aa, unidentified
  REGION 1..1338: note = Description of Unknown: Cas Enzyme sequence
MSTMKKQFGEYFLGLDIGTNSIGWAVTDLNYNIQKLNGKAMWGIRLFEAGKTAEERRTFRSARRRRQRQLQRIDLLQDLFRDEISKKDANFYLRLEESKFYPDDKTINQKNSLFSDKTYTDKDYMKEFPSIYHLRKALIENKKEYDIRLVYLAIHHILKNRGHFLFEGQELQSATKLEPILIKLQTYFKDEFNTDFEFKSLEEVEKILEDKALKKRDKKKELTELLIESDKQQITVIDLLLGYKRKLSNIFDDPSYAESTLDSISFSEATFQEKRDDYSDLLEDRMYLIDLLSAIYDWSLLAETLQGHEFLSFAKVEKYEKHKKDLSILKQAIKQYAMHEYYNIFSSPTIANNYCAYSGKKSKKTDALKDKCSQEDFNSFIGKVLDKIDDEDNDQLKYLKNEVENKSLMPKQVSKENSVIPYQVHLNELRTILRNVSKYHTFLNNKDDKGLTVSDKVISIMEFRIPYYIGPLNDYHADTKFAWIEKRSNEKIYPWNFKDVVDEEKSAEKFIRRMTNKCTYLYKADVLPKHSLLHSEFQVLNELNNLKINEELISVELKSFIFNDLYKKERKVTTKKLKTFLMANGYIGKSDSISGIDIEIKNSLTSYHDMKNIIGNVDINTDMIEEIIKWITLFGDSGPMLQKRIVDNYGDLLDKDQVSKILSLKYSGWGRLSKELLCDIYDVNKETGELLNIINAMRDTNNNLMELLSGRHEYSNKISKMNLADTEQDDKLSYQMVEDLRLSPAVKRGIWQALQIVEELMKIMQKQPKKIFVEFAREEGIKRRTTSRRQNLIDLYANCKEDCMSLMEGLESKSDVDLRDDRLYLYYTQMGRCMYTGETIDLSTLLNDKNSKIYDIDHIYPRSKIKDDSLENRVLVKKTANMKKGDNYPLPSEYSTQKPLWKNLHENNLIGNKKYKRLTERKYLSDDDLADFVERQLVETRQSTKAFAEILKKIMPDSPIVYVKANNVTEFRNKFEIVKVREINDLHHAKDAYLNIVVGNVYDSKFTRNPRNFVKESHGGYNLRTLFEKDVLVGNYFAWKGDRNGTIKDVKKTVEKNNILFTRHSFEHKGGISDQQIMPKGKGQLPIKSGDPRLLNIDRYGGFNKVSTAYFFLVEHDIKGKRIRSIEYVPVHLASTINGREDLIRYCINNLNLINPDIRLEKIKINALLSFDGFRAHLKSRTGERLVFSSAHQLYMPLDFNRYLKNIYNILSRRDLISKDGLVESLIDNNININIYDYLSEKLTNSIYKTKLSAQIKNFHDGRDLFLNLSKMNQIEALSKIIQLFRCVSGTTDLTLIGAKGTAGSIRNAKTLNIKNKVLIINQSITGIFEKEVDLNTV

SEQ ID NO: 4412 - protein, 1362 aa, unidentified
  REGION 1..1362: note = Description of Unknown: Cas Enzyme sequence
MCQVKKQFGEYYLGLDVGTSSVGWAVTDLDYNLQKLNGKILWGIRLFNSAKTAEDTRIQRSSRRRLARQKWRISMLQELFAEEISKVDPGFFMRLKESNLFLEDKIAKSKSKYTLFNDGKYTDVEFHEKFPTIYHLRKALINGEKLDVRLVYLAVLHIIKHRGHFLSEGLDASNVRAFVPIYNEMQQSLNENVEGMEEWECSNLKNLEAILADQGMNISEKKKRLEDVIGKDTKQKKALIALLSGGKGKLSDLFPISNETLNDYENNSFTFHGIDYDVARTSLEIVLPEQVEVLDKIKAVYDWSVLISLLGKYSYISDAKIAVYDEHKHDLKVLKEVYKKIGTKAYKRMFNAPKDDKSISYSSYVAHLKDGKEFTGKKCTQEEFCDFLQKEIKSLLKKDLSKMTTLPDKHSDQEELFYRIAQKKAFPKQVIKANGVIPMQIHEVELKKILENAATYLKFLTKVDENKLSVKDKVIQIFEFRIPYYVGPLAGTAMSKEKGRCWVKRKNGRIYPWNFDLLVDKTASAEVFIQKMTNKCSYLVGEDVLPKESLLYSEFMIRNQINNLKLDGTRLNADLCNEIFEHLFVAPEGNRKVTKKVIENHLKKNNIIGELSGFSDDEIKGTLRALKDFRHIFGAEYIEEHKDEIENIIKWITVLPGAEDMLGQKIKSEYPTITAEQLKKIKKLHYSNWGRLSNTFLNSSKISYIDDSTGEVVTIIGAMRKTGLNLMELLSTNCIYDFNARITEFNNFGTTVDTTTYDCVKELLVSPAVKRSIWQTMIIVQEIKKVMGHDPKKIFIEMAREDGEKKRTKSRKTMLLDLYKSCQKEAAEFGVAINKLVKGLDAVSDSQLRSKKLYLYYTQLGRNMYNYKESIDLVELNNNDKWDGDHIFPRSRTKNDSLENLVLVDHQRNMDKGDKYPLSNVIQKENLKFWQMLLDKGLISQGKYDKLVRKSDFTPEELSGFIARQLVETRQSTKAIATMLKDECKTSKIIYSKAENISDFRQEYDFIKCRDVNDLHHAKDAFLNIVVGNVYDVKFTDNPYNFIRSGEKYSLNTKQIYKYDINRNGIFAWHAGETGTLATVSKMMQKNSILYTKMQEIGKGQLYDLTLMRAGYGQVPLKKNKEIAKYGGYNKAGIAYFTLVQSLDKKGKKMLTIESVPIYLANQMTDDDLIDYLTNVIKLKFPKIVYEKIRINSLLEVDGFKLNFTGKSKNDILGISATQLLVNYEEEKYIKELFKVNNRFLKENCFKSAVITKQHNEEMYSLLLKKHESGAYNSRPAGQINVLKDGKIKFIKLDIENQVKVLCEIIRLFICKSCIANLSEIGGSSHAGNIHVSKNVTKKDKLILINQSVTGIFENKVDLLAI

SEQ ID NO: 4413 - protein, 1377 aa, unidentified
  REGION 1..1377: note = Description of Unknown: Cas Enzyme sequence
MKKKKEFGEYYLGLDMGTSSVGWAVTDLDYNVLKFHGKGMWGARLFDEAQTAEERRQFRTARRRNDRETQRIKLLQELFSEEIAKIDYGFFMRLRDSKYYEEDKEEFQSNTLFNDKEFKDSDYSKLYPTIYHLRKELMDNCEPHDVRLVYLALHHILKHRGHFLYAGQFSNVSEMALEPLLQELELAVADTCEYSIRCTDIESVKGGLANSNLNISAKKSIFGKAFDFPKENNKSVKAIVTLMSGGKASLTDIFSDDSYDDCEQKSVSFKDSSYEENEDAYRSILLDRIQLIESLKKIYDWGVLQDILDGEKYISYAKVRAYAEHQSDLNMLKAAIREYCPNKYNEVFRKQDGKDPNYSAYIGNYVDHGKHHVIEKTCTQEELCQYLKKEVFKGINIDDARYPGLSEKIENTSLLPKQKVKDNGVIPYQVHEQELKTILKNAEGYLPFLSEKDDNGITISEKIQKIFTFRIPYYVGPLNDAHRKDNGEGFCWIEKKTDDQIRPWNFEEVVDLEKSAENFIRRMTNKCTYLIGEDVIPKDSLLYSKFTVLNELNNIRINNEKISVDLKQHIYEDLFKRQRKITGKKVRDYLIREGVVGKSDPLELSGFDMNFKSSLKSYLDFADILGKTDFSDEETAMIEEIIKYIVLFGDDKKILKRKITREYGSKLTEEQLSRIWKLKYSDWGRFSRELLENIVEIDPSTGEVKDSSIIFALYNYDGNPNFMELLSNNYGFSTAIENYNSGKDMKKDNLVYSDLDKLYVSVPVKRSIWQTVTIVKELNKILGHAPKKVFVEMAKGPGKDDKGRKASRKDQLIELYKNCKEDTGKLFDALCETEENRLRADKLYLYYTQFGKCMYSGEIIDLSELNDYDIDHIYPQSKVMDDSLDNRVLVKRELNSIKSDNYPIPFEWQDNMKSFWFMLKEKKMISETKYKRLVRKETFSEGELVGFVSRQIVETRQSTKAVAHLFEEMYPDTEIVYVKAGNVSRFRHGVDDYAKGRKKYEIDERMKENEFIKVREINDYHHAKDAYLNIVVGNVFNSKFTSNPYNFFKQKDNTYSMNAMYKFPVTRNGITAWTPTTPEQEGTMATVRKMMQKNNIQFTRYSKEVHGGFYDQMIMKKGKGQVPLKGDGAISSIEKYGGYNKAAGAYFFLVEHTNKGKRIRTIEFMPVYYAAKVRNDENALMLYCKDVLKLDEPRILMGKIKFGTLFEYNGFRMHLSGRTGDQLVMINANQLILNESYATYVKKLSNFIARKQNNNGAEVDELHDGIYMNNNIELYDELIDVISNSVLKVKLDTQIQNLIEGRQAFELLSAENQSLVLLQILHMLQCNKTNTDLSMIGKGSLVGRVNMPKNISKLGKLYIINQSVTGLFETKVNLLEL

SEQ ID NO: 4414 - protein, 1350 aa, unidentified
  REGION 1..1350: note = Description of Unknown: Cas Enzyme sequence
MKKQLIKKKFGEYYLGLDIGTDSMGWAVTDLDYNVQKLNGKSLWGVRLFDSAKTAEECRMFRSARRRQQRKVQRIKLLQELFAKEICKKDAGFYLRLAESKFYEEDKTNEQPNTLFHDKNFTDKDLHKLYPTIYHLRQALIKNTKPLDVRLVYLAIHHIIKHRGHFLFEGQGLDSIYSFASVYKELKTYLYDEFDINFECTSMVEVENILKDRNLGVTNKKTALIKLFNAETKQEKAIISLLSGGTVNLSELFLDDELKECEKPKICFSGSSYDEDLIILRSILLERSYLLEKLKAIYDWAILAEIRKGEQYLSFAKVNVYEKHKKDLAILKKVIKESCPEKYKDIFAKTSKNDNNYCAYIGMNKKNGKKQAIEKTCLQEEFCKYLSNILKDIDRNDEQFKYLMIEIENGSLMPKQVLKNNGVIPYQIHFEELKIILQNASSYLSFLNETDEQGLSIKDKIIKIMKFRIPYYVGPLNDYHKGKNRDNCWIVKRSNERIYPWNFKQVVDVEASAEEFIKRMTNKCTYLIGADVVPKDSLLYSKFMVLNELNNLKINNEGISVELKKKIYKDLFEKYKKVTEKKLKKYLQSENIIIDQDEISGIDGDFKSSLSSYLDMKSILGDKVKQKEVVEDIIESIVLFSDDKKLLKQKIKNKYGKILTEEEIKNVISKRYSGWGRLSKEFLEDIIHVDKVTGECLNIITVLYETNNNLMQLLGRGFTYSEAIEKYNNERTDSVSDISYELVDELHVSPSVKRMLWQALVIIKELKNIMQHEPKKIFIEMARGAEEKKRTESRKSKLTKLYEACKKEGRDGVEEIGKRADGDLRSDRLYLYYTQMGRCMYSGEVINIAQLNNKNIYDVDHIFPRSKTKDDSLDNRVLVKRDLNAKKSDIYPLPAEIRAKQQETWKFLLAKGFISKKKYDRLTRKEGFSEEELSDFIARQLVETRQTTKAAADILKRVFSNSEIVYVKAGNISDFRHKYDLLKVREINDFHHAQDAYLNIVVGNVYHTKFTSDPLNYIKTHKNRDYSLTKMYDFDVVRGDTVAWKAENGETLSKVKQIMQKNNVLFTRYATEGKGTFFKQQILKKGHGQVPIKGSDTRLSIEKYGGYDKAAGAYFMLVEHVNKKGKKIRTIEFVPIYLTKQIGEDIRAKERYCMDDLNLNQPKVLLPKIKFDTLFKVDGSYMHLSSRTGQQLKFKGANQLCVSKEEQDYIKKIMNYINRRKTYRSNNIEECKITEYDKIIAEQNLKIYDMFLSKLEKRVYKSRLSAQIITLTEKRDRFKALEVEKQCVVLSEVLHMFQCNILNADLSLIGGAKFAGIMVISNEISKCAEALIINQSPTGIFEQKIDLLKI

SEQ ID NO: 4415 - protein, 1370 aa, unidentified
  REGION 1..1370: note = Description of Unknown: Cas Enzyme sequence
MKKEFGGTYLGLDMGTASVGYAVTDKAYKILKFNGKGMWGVRLFEEAKTAADMRLKRCNRRRLERRSWRVKLLQSLFSDAIAPLDMGFFLRQAESNLQSEDKSVNNRFKNSLFGDGFLSDKEYHMKYPSIYHLRLAQLNDEPDAFDPRLLYLSISHMVKYRGHFLFDNLKVDLDTKTDQTEQRFENAYKELINCLKDNLPDMEEHDFGRASAIKAIMTDKDSNITTKKRDLEKEISAGKDKVLKSVAGLLSGGTVKLSELFSDENLQDIKLQFKGTDFDAVEDELISALDERMEVIYKFKAVYDLGILEELLHGTSSISQAKVDTYREHQEDLKLLKKFVLEQDKALFKKIFGIPEGKETNYSVYIGRCLTHNSKKAVLSEKVCSKEDFCKYLKKVLKDYVDVSTIKDINTPTDRLFNRINNEKAFPKLRDKSNAVIPMQLHLAELRKILKNAERKLSFLSTKDESGLSVSDKIISIFKFRVPYYVGPLAGTEMSKKAKRCWVKRSNEKITPWNFDKVVDLPGSAEAFIEKMTNKCTYLYTEDVLPKQSLLYSEFEARNELNNITIDGDKIEPQLVKEIMNDLIIAGKGKVTKKKIVSHLFKKNVISSNKVEISGIDDDIKSTLKSHKDFYRIFGREYVNANYEQIENIIRWITLFSDEKRMLVTKIKEHYPDIPEEKVKEIKKLNYKEWGRLSKTFLNSEEISFYDDSIGEYITIIGAMRRNAVNLMQLLAKGNEYGFADRIEEFNFSVEKPDKIDYSYIEEMAVSPAVKRAIWQTVQIVQELKKIIGHDPERIFIEMAREEGEKQRTRSRKDQLLELYKKCKTDAIAFGMDYEQKYSELSNQDEAALRGKKLFLYYCQMGRDLYTGKKISISELFSQNVYDVDHIYPRSKTKDDSLDNLVLVHHNVNLNKGDKALCETPYQTEANKKLWTFLLEKGLISKKKYDRLVRNTPLTEDELAGFINRQLVETRQSTKAVANLLSIECPNSKIVYSKAGNVSDFRKVYDFVKCRDINDLHHAKDAYLNIVVGNVFYTKFTDRPYEIIKDRNFTYTLNPDKIYEWEIKRKGTTAWMPGDDGSISIVRRMMNKNNIQVTNMLKENHGEIFDANICKASDAKLFPIKKGLSPQKYGGYNSQSTAYFVYVESDNKKGQKERTLEAVYCHVANSINDNQEALLQFIKEEYGFKNPRIIIPKVKIGACLEIGDIFMIVTGTTGTQLTGKNAKQLVVDKKYEKYFKRVRQYLEKKKDNAAISLERFKEISFEANVDAFDMLVEKIKSKAYRERPAIKYDEMVATKAKFILLTVDEQCIVINEFLKLLAESSPANLLLLGLAKNKGDFKISKKMPSNQKVFLHNYSITGLFEQQPIDLLKI

SEQ ID NO: 4416 - protein, 1362 aa, unidentified
  REGION 1..1362: note = Description of Unknown: Cas Enzyme sequence
MSVIYLISVSFNFTTRHEKYYVGFDIGTNSTGWAVTDDTYKLFKCNGHKMWGVRLFDEAETAENRRMHRASRRRLQRRNARIELLQELFAEEICKVDPGFYQRLEDSKFYIEDKKIAEKYTLFIGTEYNDKDYYRQFPTIYHLRAALIKGKKEYDVRLVYLAIHHILKNRGHFLYEGDKFDTSSLDDSIHEVFENSDVNTNDVELTDELLKKIKDIILNVKLTKTDKKKELKNLFGKSKQLESIFGLAIGTKESLENLFGTSEYKELENDITKISFSEKIYEEEREKYEEVLEDRIILIDTLKKIYDTVLLSGIKKEGLSLSESKVELYNKHKKELAALKKIIKSYSTEEYKRFFSEKDADLANYKNYIGDGDKKCSREDFYNSLKSLLNKVEDTPEKKYILEEIKLEKYLPLQRIKENSAIPYQVHQEELKLILDNASTYLNFLNQTDGKLSVKDKIINIMTFRIPYYVGPLNTFHAGKKNGFAWAIKKSNERITPWNFENIIDLEASHDKFIQNMTNKCTYIKGKNVIPKNSLLYSEFTLLNELNNIRCNGEKLPVSIRNKIIDNFFKKSDKRGKVTVSMISQLLRCEGECEENVTITGIDNEVKADLKSYRDFKSILGDDFNYEMVEDIIRWITLYTNEPKSIKKRINDKYADMLNCTQINKICKLKYNGWGRFSKEFLTEIICDEFTDYSSGEVGSIITAMRNTTNNLMQLLSNDHDYMKQIEEENDLLYNPDEEISHDMLDELYVSPGVKRMIWQTILIMEEIKKVMGKDPEKIFIETIRSNKAEKKRTDTRKKKLLELYSSCKDEIKDWPKEIQSRSDGSLRSKKLYLYYLQMGKCLYSGEEINLDKLMSGEDYDIDHIYPRSKTKDDSFDNLALVKRSLNNEKGDTYPISNVIQAKMKDTWDFLYKKGFISHKKYERLIRKEEFGANELADFINRQIVETSQSSKAVAQIMQRLYSDSNIIYVKAENVSDFRNEMKYIKVREINDLHHAKDAYLNIVVGNVFDTKFTRSPINYVKEAGFREYNLNRMYDLKVERAGYTAWDGRNGRCKKIVDSQMKCNDVRITKRVATQKGELFDLTIYKKDIAKPDSYIGTKTSDPRLCDVTKYGGYRKISIAYLIPYTCDMINKKGVRKSIRRLIGIPVYLANNIKTPQELSEFIFKHVPAKHGETIENLKIINTKLRIGSLIKYNGFYYYVGGRTEDNFYADSAIQLLLDEDDEKYIKEIIKFTNIQKGDKEIKAERFSDFITKENNIKLYDVLVNKMNTNIYMQAKDNKYDVFMEDKMRSKFCNLLIEEQIKILLNMLNLLNNKISTYDFKSLGFGVGRRKIGFNIANAKEFKLINQSITGLFENNIDLLS

SEQ ID NO: 4417 - protein, 1349 aa, unidentified
  REGION 1..1349: note = Description of Unknown: Cas Enzyme sequence
MGIKSSNYYLGLDIGTDSIGWAVTDEEYRIQKFNGNAMWGIRLFDGGNTALDRRLQRTARRRTQRKVQRIKLIQEIFSEEISKVDPGFYLRLSESKYHLEDRTLKQSNTLFNDDNFDDKIYHKRFPTIYHLRHYLMNAKEKVDIRLLYLAVHHIVKHRGHFLFEGETLEVVDDVENILRRLTDYLYEEMDIQFKVTDIDTFKGIMSNTSLGINERKSAIEKTLEEKNSTTTLIVKLLAGAKVKVKDIFGKGSIEDESVSLQFGKSDSEEMMESLFQAIPEKIILIEYLKSIYDWGLLQQILNGKKSISKAKVNIYDQHHDDLQLLKKMTRKYISEKYDEIFNDTETNGNYVSYVGYSKHNGKKIQCQKTCTQEELIAYLKKCFKDIENEDSEFNLLNQKLLRGNFLPKQVNKDNGVIPQQLQAYELKMILANQTEHYPFLRETDETGFNGIEKIIKIHSFRIPYYVGPINPAHKQKDVRKGHCWVSIKGEGPIRPWNFERIVDVEKSGQDFIRRMTNKCTYLIGADVLPKDSLLYSEFMVLNELNNVRLDGIRIDNELKSQVVEDLFKKKKRVTAKIFKQYLKTIHGIDSEITGIDGDFKSSLASSIEIRGIIGDDRYQIEMVENLILSVVLFGDDKRMLRRRIKREYGSHLTENQITQIANLKYSGWGRLSRELLEQIAALDKENGDYPSIIELMRRKSVNLMELLGREYGYTEKIIEFNDELTDSSEKFSYDLVEELYISPKVKRGVWQTLQIIDEIVKIKKQPPAKIFVEMARGPEEKKRTDSRKKKLMDLYKACKAETRNWLEELDKKTEAELRSDKLYLYYTQMGRCMYTNEPISLFNLFDKNLYDIDHIYPQSRIKDDSLNNRVLVKKNVNYLKSDMYPLSDEIRNSKNKAFWNSLVEKGFITKEKYNRLVRSTGFSAEELAEFISRQIVETRQSTKAVTQLIRKVYSQTAVVYVKAKSVSDFRHQFKLIKLRDINDLHHAKDAYLNIVVGNVYDVKFTRNPVVFFRNSNNDYNIKRLFEFDVRNNQTVAWKSGESGTISIVKRQMAKNNILFTRYAYEKKGQLFDLMPMRKGKGQMPLKGSDKRLQNIKKYGGYNSIKGAYFSLVEYSGKGKITRKIVYIPIHLSEAIKKNPEVQIDFLKESLEVNELKILVPKIKMNTLFKIDGFPMHIAGRTDERLVFKSGVQLIIDEKEIIYLKKVFKYHERVEASKKFKEMITEPTLHDEVTPQDNLRIFKLFFEKLQNSIYANVKQLSELEKLFKNGESKFTSLSLNDQCELLVESVNLFHCRGNLADLRLIGGSGHAGLLRKNSIIMKKSEKLVDIKMIHQSPTGLFKREVDLNKI

SEQ ID NO: 4418 - protein, 1400 aa, unidentified
  REGION 1..1400: note = Description of Unknown: Cas Enzyme sequence
MNSKEYFIGLDMGTSSVGWAVTDTNYNLLRAKGKDMWGVRLFSEANTAADRRSHRTSRRNHNRKKAREGILKMLFSDEINKIDPGFFERLKDSKFYLDDKGIETPFVLFADKGYTDKDYYDQYPTVFHLINELVSDKGKEPHDIRLVYLACLNIFKHRGHFLNDSLSGDGIDNIEILSEDFASRLTDYNNEIDTDSGIVTKSFDSKELATIFREVLCDKHLSSSNKKRVLIEKLELTNKSKYIIEMVTLVCGLAATISNIFVKDSYDEDQKKLKLKFGSSTFEEDILKVEEMLTQDEYDLICVLKSIHDWSVVSIIMGTHKYISEARVESYNKHKDDLAKLKSIYKNYTPEKYDSMFREMEDNNYSAYVGKVSSDKKTQSGNHKTRMQRRGAKCNTEEFYKRILKDIEAVPDEVKADIVEDIETNNFLPKQLTNENGVIPYQLHFAELKMILENASNYLEFLNDADESGISTKEKIKQLFSFRIPYYVGPLFKSEKNKTNAWVVRKESGKVYPWNFSKKIDEKASAEVFIERMVRHCTYLNNESALPKNSLKYERFRVLNELNSLRINGVRVSPELKQRIYNELFKVAKKNVNKTMLYNYLIREGLVDKDVELSGFDGTFANTLASYRKFAELFGVKTLTDTQEKAAEDIIKWATVYGDSKKFIKEKIEENYGPDSDNPLLDEKQIKRAIGYKFKDWGNLSKEFLNLEGADNDKNTTTGEILPLITRMWEENYNLNELLSEKFTYKKTLLDKTEEISKSITDIEFDDLEDLYISAPVKRMAWQTLLILKEIYQIMGYAPKKVFVEMARSEEEKVNGKGARKSSRKKRLEELYKNCKNDSRELSAGLNKLDEPSLRSKKLYLYYMQKGRCMYSGKAIKFESLMTNDYDIDHIYPQSVVKDDSLDNNMVLVERNYNNIKSDKYPISPEWQKNMYSFWNMLKEQGFLSNEKYNRLTRTYELTDDELANFVNRQLVETRQATKVIAELIKNSFEGSNSRVVYAKAGNVSEFRHKFSMKYDKDTDKSIVIHPELVKCREINDFHHANDAYLNIVVGNVYDVKFTQNPYNYIKEFKNQKDSTDSNEREKYHMDKIFNFNVKRGNEVAWVRNGENKSLDTVLKVMRKNTPIVTRMSYEAHGTISNQTIWSAEKAKNGVGYISTKTTDSKLDPNRYGGYSTLSTAYFFLVEHTKKGKRIRTIEAMPIYLKDKLDSKEKIEEWCADKEKGLGLEDPSVRLEKIKVYSRIRIDGFDLCLTGKSKSSLLTSNEVQFKTVSKWKYYIKKLFDYNGNNNQIINIDENIELYDIILEKNINCIFAKRPNPVGKILSSGRTKFVNLPIDEQVECLKEMLRISSFENQGFDLQVIGGSKQSGKMGPSKTISEKNSVELINQSITGLYESKIDLLTV

SEQ ID NO: 4419 - protein, 1376 aa, unidentified
  REGION 1..1376: note = Description of Unknown: Cas Enzyme sequence
MSDFDKHKDQICKHKGFKRGNYFIGFDIGTNSVGWAVTNEKYELLKFKSHKMWGSRLFTEAQTAVDTRMKRSGRRRLQRRKFRLLLLESLFAKEINAVDETFFMRLHESKYHVEDKTNPVKYTLFIDKEYTDVDYYKEFPTIYHLRNHLMTEGTKDIRLLFLAIHHILKYRGNFLYGKKEFSVDGEINEVVRSTLSELGFGTHIDNESVLGVVVSLLLDRGVGRSDTVKQLEPIIGNGKKLSSIDKKRLKAWGNLIIGLKANLVDLFTEEDVEIAVPEDKEFKDICLSKIIYDDVRDAYTEVWGDKFTVVDQCKVLHDIIVISSIIKPGQSLSEAKIESYQQHKEDLVVLKSVLKDDRKLYDDMFVADVDKGTNYVKYIKQGVTGNTSTTEEDFFKYVKKVVSALPATEDTEIVLQKIEEGVFLPLQRISKNGVVPYQLHKEELVRILDKAKVNFPFLNEVEDGLTVADKIISILEFKIPYYVGPLNPAHSIENGGFAWVVRKEAGQVLPWNFEQKIDVQASAVKFIENLTNKCTYLIDQDVLPKYSLLYEEFSLLNELNNIRVNDKPLPADVKHAFIRDHFMSLQDSKTATKKVVAKYLVDNNYVSQPPIITGMDQHIATKLTSHRDMTRILGEHFDHAMAEDIIRYITIFGESKDMLRQVLKNYYGDRLTREQIKKLGKLTYTGWGKLSKKFLTDIWGMKKNDNDAEAGTIIEHMREGQENLMQLLSSSYSFIDVVQEYVTQVLGSKEKTTFEMLEDLSLSPMVKRSVWQTLRILDELISIRKEVPKKIFVEVARTNKADKKRTQSRKGILVDLYKQIKDGEIERLRDELNAFNESDLDSKKLYLYFTQLGRCMYSGERIDIRDLATGQYDKDHIFPQSKTKDDSFDNLVLVDKTLNMRKKDTYPIDETIQKQRRDFWKMLLDKGLISQKKFERLIRVEPLTDEELNHFINRQLVSTNQSVKAVTTLLRQLYPDTEVVFSKAENVSDFRRDFGFIKVRSINHHHHAKDAYLNIVVGNVYHEKFTKNFFVFAKQNGTHRTYNLTKMFEKKICSTENKDSIIWDPDVSMDTVKTMMRSNDVRVTQRAVPQKGGLSDETVYKKGVAKQGVYLPLKSSDIHLSDVEKYGGRTKMTIAEYVILKIVDIKDKEKIEIFPLPLYVSNQGCLKEDIIALYSKGSKDAKKIRSIEVMYRGLYIGSLVNINGFKYYLGGRTGDKVCVDCAIDLVLDNDISVYIKLLEKVEYQKIENPKTFDIHTITTTYSDNKIYVTAEDNKKLYQVFMDKLSTPLFIKLKGNKLEEFKTIGFDKFCELSLENQVTILMEILNIITNFKTTRNLELINIKSSRSTVGINVSNTESFSVITTSITGLYENEIKIK

SEQ ID NO: 4420 - protein, 1356 aa, unidentified
  REGION 1..1356: note = Description of Unknown: Cas Enzyme sequence
MKKDFYLGLDIGTDSVGYAVTDDRYKLLKFHGEPAWGVTLFDEASLSADRRGFRSARRRLDRRQQRVQLIQELFATEIAKVDERFYIRLQESSLFREDVGEPYTLFNENGFTDKEYYNRLTGYPTIHHLIKELMENDNPHDVRLVYLACSWLVAHRGHFLSNINKENLVDIKDFSAAYKNFLAFFEENGYRAPWECKETEAIGEILKKKISVSEKTKELANCVLAGGKAEKEGSEEFPFSQEAIIRLLAGRTCKVQDVFCNEAYADFGSVSLGMDEEKLGEIAANIGDDFELIAAMRGIADWAVLVDVLGNEATISEAKVKVYEQHKKDLAVLKYMIRTYQKDKYDEVFRDLEKDNYVAYTGHLSKPDKDNKLKRKKLEDVSAFLLKVVDKMQPSKKDEAAYQDMVSRLELRTFLPKQKNTDNRVIPNQLYWYELTSILKNAEKYLAFLGEQDSDGLSVSKKIESVFLFRVPYFVGPLNAHSSNAWIVRKAGKIYPWNFDQMVDLDASEQQFIQKMTNHCTYLPDEPVLPKDSLAYHKFMVLNELNNLRINGNRISVELKQRVYNELFLNLKRVTRKKLEDYLISIGELEKDKRDALSGIDEDIHSNLAPQIAFSRLLNGKVLTEQDVELVIERASYAEDKSRLAHWLEKNYPQISEEDRKYICKIKIKDFGRLSRRFLCAFEGANKETGEVTTILGAMWNTQNNLMELLSERFTFVDELRKYSEEYYNEKKFSLVDRLDEMYLSNAVKRSVFRTLAIVHDIKKAFGEPKKIFIEMTRGASEEQKGKRTKSRKQQILDLYAQCKDEDVRLLKKELEQMGDYADNKLQGDKLFLYYMQFGRCMYTGKRIELEKLGTKLYDIDHIYPQAYVKDDSILNNKVLVLSEANGEKSDTYPIKESIRSSQKEFWNRLKSCGMMSEEKYKRLVRATPFTEEEKYGFINRQLTETSQSTKAVAELLQEYFENTEIVYCKAKLASEFRQEFDLPKSRVYNDLHHAVDAYLNIVTGNVYHSKFTKQFNVDTRYSIKTKTLFTHPVIVNGRTIWEGEEDIARIKSTAAKNTAHFTKFATLKKGGLFDQMPVPAAEGLTPLKKGKDTAKYGGYNGSSAMFYIPTQYIAGKRKELIIMSVEMLYGPRFLQDATFAREYSFQRLEHILGKKVDDVAFPLGMRPWKVNTMLSLDGFRVCITGISGGGKTLIVQNMMQFSSDEYWKYYLKKIEKYVEKKEANPKYIYSEEFDKISQDDNIKLYDLYSDKMKNSVYNKRVNSPIDILIKGRELFCKLDITEQANVLLEIQSTFCRMTGGCNLKPIGGSPNSAATKNFSSTVSNWKKKYKDVRIVDSSPSGLWEKVSDVNLLEVL

SEQ ID NO: 4421 - protein, 1347 aa, unidentified
  REGION 1..1347: note = Description of Unknown: Cas Enzyme sequence
MSRDKSKFEKYYLGLDIGTDSVGWCVTDPDYNILKFNGKAMWGIRLFDEASPAADRRAFRTNRRRLQRRKQRIALVEELLNEEISKVDPLFFIRIKESFFREEDKKEAVRQRYSIFSDGKYTDIDYHREFPTIFHLRHALMLHEQPYDIRLYYLAISHFMKHRGHFLFAGDISEATSFETVYRGLMDYIAENMEDISFSCTDTGKVQRLLTDRTTGRAEKKRIINGLFNEGKNTVQQKEILATLCGATVSLEKLFDDERLKDTEVPKFSFADGIDDDKETKLANALGERFELIVRMKAVYDWAVLTRILSGSKSISQAQVNSYTKHREDLKLLKKLVRKYIPNEYKEVFTDLSVSNNYAAYVGHVSANKKAFKVKRMTEQKDFCDYIRKKFAKVDSNDDELIRMRDELEKGTFMPKQVMKSNSAVPYQIHRQDLRKILDNMGVDYPSLSKKDGTGLSSCEKIMKIFEFRIPYYVGPLNGYHSDKGGNSWVIRKRSGRVTPWNFQDMVDTKASAEAFMRRLTNKCTYLIGEDVLPKDSLMYSKYMVLNELNNVRINGNRIDVNTKQRIYKELFRDKSAQLSLNKLQDWLIKENIAGKDDQLSGIDKTFKAKLKSYHDFYKIIGTRVDTEPVMVDDIICNILIFGEDKRLLKERLHEKYGDILTQDEIKMISKLTYSGWGRLSYKFLNEIRAVDRETGELRTIIQAMWDGQENLMELLDSKHGYMDEVSKVNAEVEGRTREISYDLVSESYASPAVKRGIWQTLQVVKEIQKVTGHDPARVFVEVARSKETNPTRKDSRKERLIAAYKSIQDETRDWINEINEKEERSFASKKLYLYYTQMGRDMYSGKPIDLDELMTTDTYDIDHIFPQSKTKDDSIINNLVLVRSEYNRDKSDVYPIPSKYRQEELWKMLEKHELISEEKYARLIRRNGLSDEELAGFIGRQLVETRQTTKVVTQILEQTMPDTKVVYSKANAVSDFRKDNGFIKCRSVNDYHHAKDAYLNIVVGNVYYTKFTDNPMNYIHNANKPGSNEKYSLNHMYDYDVIRGGITAWKRGEDGSISTVRKYMNKNNILFTRYASEKRGGFYDQMLLKKGDGDLLPIKNKDTRYDTSIYGGYKNPSINHFMLVESDGKKGRKRTIEGVPVYLSSASIDRLERFCSQKLGLVNPIIRYLNIKINSLLKIEGYPMHLSGKSNARIVIKNAVQLCIEREQEDLIRRIDKVAERIREDKNYKVDEHDGITDDDMVRIYDTLYEKTKGIYKKRHSSQISILENGRETFVSMTIEDKIKQLLEILHLFQCNAVSSDLSKIGGASRAGVLVVGNEVSKYSDVRLITQSPTGLFEKEIDLLTV

SEQ ID NO: 4422 - protein, 1207 aa, unidentified
  REGION 1..1207: note = Description of Unknown: Cas Enzyme sequence
LVKLYKSSKSINYLKKSFKETFNKENDKYLGVIFNLIIGGSVKLKDISFGADIESTDSICVANADFDSKYTEAGAFLDDVYMDILKNAKSIYDQLVLKDILGDDKFISDVMINRYNEHKEQLKQLKNYVKENYDGKTYDEVFRLYTGKDSVNNYAKYIGSSSSKKASIKRFAHCDRDEFYKFLKKELDIETKAKSGDEVAKQILNLIENKRYLLRQNSSENGTLPYQLNKVEMEEIIYKQSKFYPFFNEKDKDGNLVKDKIIALLEFKIPYYVGPLDPASKDEEHHKLSWSIRNPGYEHTKIVPWNFDKVINKEASAEAFIRRMQNKCTYLHDSYCMPKGSLLYGYYTVLQDLNNLTFNGDKIDEKAKNYLFKELYLKKDKVTTKDIKNVLNIYFDKDVTIGVKNGDIDNFVLNGSLKSINIFTRIFGSLDVVKKYYVDIEKLIIDLTLFEDKSIIKDRIKNTELYSEDFVNFISSNPKYLASIKGLRFEKYCSISRDLLSLKGVIIDENGVINYTENNVIEIMDKEGINLEEIINRKEFVDAINLKNEDEEKLDFKNDKSLKDYIDNLYVSPGMKRPLLQTVKIIRELEGIIKQPIDNFYIETTRTNKNKKKGQKQESRRDKLLKLLNSEAKKIVSDIQGSSSAAFVDSLTKEDDGRLQAKKIFLYYLQCGKDVYSGQPIDLNNLNNYDIDHIIPQARIKDDSLQNTVLVSKDLNNSKQDYYPIPNSIISSEGRNIIEYLHRNKELMSDIKYERLTRSVNKPLTEDELQTFANRQLTYTNQAVKALCDLIKKKKENAKVVYCKAENVTDFRRDFDLTKSRLANNFHHAHDAFLNIIVGDVYDKYFTEQFIYHNYYKYESANLGKFLKPCDGKPDKNGQIKSETILKNKKGEVIWQSSKFVPYIDKVVKTQFDIMVTEPTYFKKSGFYKQQILPKGNNLIPLKSKDSIIGDVNKYGGYQKPEYGFYDIIKETKGDIKLVPTPVYFGKNPSSSSIKLNTILKRDDSYCRIASVTSTSYNINKGFEPHFAYKAILIIKKINVFADILTENKMFNISESCSEIGSDKNKDFLYKANQIRGFKIEDEKVLLNNSSNYFSYVSREESNFLLDYLLKFIKKSEALYSLFSNCIRVFNKSNFDKIGQCPLYIALFLEYQLLLLLQRTKLTADFSLIGLGEFVGNTCLGNKLVKGDKFYSDSITGFYRKLIYEVR

SEQ ID NO: 4423 - protein, 1388 aa, unidentified
  REGION 1..1388: note = Description of Unknown: Cas Enzyme sequence
MKNKEWYLGLDVGSASVGWAATDSNYKLLRKNKKRLWGARLFEEAKTAADRRSFRAVRRRLARRKWRINLLQELFVKEISKNDPNFFLRLKESKYHFEDKSLMNEYLLFNDKDYTDKDYYKEYPTIYHLRSSLMTEENPDIRKVYLTIHSMLKNRGHFLLQGQSFNDSNIDNVIKELLELSIVKTNLEVTDEVIYSLKEIALQKKNLSDKNNDVKKLYPKEKQLQEIFKLVFGGKTSLDKLYDIEEYKELDTSVKSISFKEKVYEEVRPDYEQILSNYIELLDLAKLVYDSIVLADIKKEGKTISESKVELYNKHKDDLANLKKLVKTDSKLSEDKKKEVYFAIFKEDKEKGTNYVNYTHRSQEGKSCSYEDFKKFLKKELEKLEDSPTKTTILEELDLETFLPLQRTKDNSVVPYQIHKEELVKILDNAAKYHSFLDEKDDSGYSTREKVVQLFEFRIPYYIGPLNAHHNTENGGYSWAIRKKGMESVPVTPWNFKDVIDESASAEAFINNLTNKCTYLAGEDVLPKNSLLYSEYALLNELNALRYEGNRISVEARDVIVTKLFKEQGKKVTKKTIKELLKTEGFIDGKGEIAGIDNIVKNDLKSYRDFKKILGDRFDKERVENIILWITLYGESRKLIKEKIIKVYGDFYTVDEIEKMSRLTYKDWGTLSRKLLTELVSEKLYNEETGECLNIIGAMRQSTILFMELLADKFDYMSQIKNHNKENKDDITEITPDILENLYASPAVKRSIWQTVRIVEELKTIIGSAPTKIFVETTRSNKAPNKVTTSRQNDLIAKYKTIKDQEIFELEKELNSSIDFPTNKDRLSKEESSRLKAKKLYLYYTQLGRCMYTGKRIDFGELFDNNKYDIDHIFPQSKVKDDSFNNTVLVKKESNANKKDVYPLGSSIQTKENKKFWRFLKEKKLITEEKYNRLVRTEEFSDDELTGFIARQLVETSQAIKAISTILSELNPETTICYSKAENVSAFRQNFGKIKEGNRKSENNEKLIKVREINDYHHAKDAYLNIVVGNVYDVKFTRNVYNFIKNKKDARKYSLNSLFYTDVKNANTIAWEMDKTVHVVEKTMNNNNILITRRTSEQKGALYDATVYKAKVAAEAKEGAYYPLKTTDNKIKDVSKYGGFTSIKIAYYSIFEYTLDSKKGEQKITRIVPIPIYISQNIKDDKALLEYAKTQLLGKDLKLKYRKLCIGSTLKINNFNYYMGGKTNDNFFYDSAIQVVLAKESELYIKELSKYLNWKKENKDGLPWESIIKKKNIHLYNILLEKMNTGIFIRKNPNKYDELSTKEVRDKFENISKDEQAKVLLEVLNLLTNKKSTFDLKNIGITASRGKCGFNLSNQSQFSIIEQSVTGVYEKEIVIVGEKNNDLENSSN

SEQ ID NO: 4424 - protein, 1391 aa, unidentified
  REGION 1..1391: note = Description of Unknown: Cas Enzyme sequence
MENKVWYLGLDIGTASVGWAATDTEYKIIRKNKKRLWGVRLFEEATTAQERRTYRSNRRRLARRKWRLYLLEELFSEEIAKVDPNFFLKLKESKYHNEDKTHKLPYTIFNDKDYTDKDYYKEYPTIYHLRSSLMTENEPDIRKVFLAIHHILKNRGHFLLQGQSFKDGNINNLIKELLELDILHHDLEVNDEFVENIKNIAIEKKNLTEKINDLKKLFPKEKQLLEVFRVILGGKSSLDKIFAIEEYKELDASVKSISFKEKVYEEVRHDYEQILSNYIELLDLAKLVYDSIILSDVKKEGKTLSESKVELFEKHKADLAKLKALVKSDSKLSEERKDEIYRIIFKDDNDKGTNYVNYIKNSKEGKGCSYEDFKKFLIKELAKLEDSEEKNKILTDLELETFLPLQRTKDNSVVPYQIHREELIKILDNAEKYHSFLKAKDESGYTVKERIIQLLEFRIPYYVGPLNSHKKANEGGYAWSVRNKGEENTPVTPWNYSKVINESASAEKFITNLTNKCTYLKGEEVLPKHSLLYSEFALLNEINALRYDGNRISVEARNTIIEKLFKEQGKKVTKKSIKELLKAEGFINGKGEISGIDITVKNDLKSYRDFKKILGDKFNTEHVENIILWITLYGESRKLIESKIEAVYGDKYTKEEIAKMSRLSYKDWGRFSRKLLTEIVSEKLFNEETGECLNIINAMRNNNILFMELLADRFNYMSQIEEYNKALQKEVTEITPDILEDLYVSPAVKRSIWQTIRIVEELKKIIGCAPSKIFVETTRSNTTDKKPTDSRKKQLEAVYKNIKDKEIQELEKEINSTIDFSIKKDRLSAVEPSKLKAKKLYLYYTQLGRCMYSGESIDINKLFDNNKYDIDHIYPQSKVKDDSFTNTVLVKKVSNAEKTDKYPLGQDIQTKENKRFWKFLKEKKLISEEKYNRLVRTEEFSDEELSGFIARQLVETSQSVKAVASVLGELNTETVICYSKAENVSAFRQNFGKIKDGNRKSKNTEQLIKVREINDYHHAKDAYLNVVVGNVFDVRFTRNAYNFIKDKKDGRKYSLNNMFYTDVRNSNTIAWEMDKTVHQVDKVMNNNIILVTRRTAEQKGALYDATIYKKTKAKEGAYYPIKTSDSIMKDVTKYGGFTKIKIAYYSIFEYILDSKKGSEKITRIIPIPVHISQNISEDSTLIEYAKEQLTLKPGEEIKEFRLKYRKLCIGDLIKLENYFYSVGGKTDDNFVYDSAVQVVLEKNSELYIKELSKYQNWKKENKDGLLWESITAEKNIELYNTLVKKMNTGIFIKKKHSKYTELNSEKIRNNFINLKVEEQAQVLLEILNLITNKKSTFDLKLIDMKVGRGRISFNLSKLNSVNVIEQSVTGFYEKEITIIGDKGNDVENNNS

SEQ ID NO: 4425 - protein, 1400 aa, unidentified
  REGION 1..1400: note = Description of Unknown: Cas Enzyme sequence
MENKVWYLGLDIGTASVGWAATDTEYKIIRKNKKRLWGVRLFEVANTAKKRRTYRSNRRRLARRKWRLNLLEELFSEEMAKVDPNFFLKLKESKYYSEDKTHKLPFTIFNDKDYTDKDYYKEYPTIYHLRSSLMTEKEPDIRKVFLSVHHILKNRGHFLYKDLSVERNNLKDLIKELLVTGKFIDIEEIDMLLLNRIEEISYSKISKKDKENEIAKLFKREKNVNNVKQLNKVFKLIFGGSSSLSDLFDDESYKDVDSKVKNISFVEKNYEEIRYMYEEILKEDEDIEILDLAKKCFNCITLDKITQEGKTLSESKVEMFEKHKADLAKLKALVKNDTKLLEEKRDELYRIIFKEDKNKGTNYVNYIKDSKEGKGCSYEDFKKFLVKELAKLVDSEEKNKVLTELELETFLPLQRTKDNSVVPYQIHREELIKILENVEKYYSFLKEKDESGYTVKEKIIQLLEFRIPYYVGPLNSHKKANEGGYAWSVRNKGEENTSVTPWNYSKVIDESASAEKFITNLTNKCTYLKGEEVLPKYSLLYSEFALLNELNALRYDGNRISIEARNTIIEKLFKEQGEKVTKKTIKELLKTEGYIDGKGEISGIDITVKNDLKSYRDFKKILGDKFNTEHVENIILWSTIFDKEQGKKLIKEKIEDFYEGIYSEDEISKILKLNYKGWGNFSRKLLTEIVSKKLFNEETGECLNIINAMRNNNILFMELLADRFDYMKQIEDFNKTLQKEVTEITPDILEDLYVSPAVKRSIWQTIRIVEELKKIIGCEPSKIFIETTRKNKTKKIATNSRKEMLKKVYGSISNKDIMNLEKELDYTFNIQNKNKMLGDEDDLSLKRKKLFLYYLQLGRCVYSGESIKLDKLFNDNYYNIDHIYPRSKVKDDSIYDNLVLVTREKNEKKEDKSIFEVGFQTSNNKRFWKFLKEKKLITEEKYYRLTRTSDFTDYELAGFIARQLVETSQSVKEVASILRTLNPNSTVCYSKAENIIDFRKNFGKIKKGKKCSNNNEKLLKVRELNDLHHAKDAYLNIVVGNAYDTKFTRNPYYYIINSKNGRNYSLNNLFFKDIINNNTVAWEMDKTVQQVDKVMNNNCILVSRRTSEKKGIFYKATLQKAKKAKKKLDKYFPIKSNDNMLKKISLYGGYSSGQISYFSVVKYKLVSPKGIKTVKKVIPIPIINAISINDNSSLVKYAKSKIKLKENQTLSEFKLVYKKIKEKDLIKLNNHLYYMGGRSNDTFYFDNAIQLLLDKESENYLEMIQNFINRKKENKDITVENNIKFYEIIIKKMNIDLYRQKQPNKFNELNLDSTKKTFEKLDLENQILVLLDILDMIINKSNKFKKSDELLGIKYSRGQQNFDISNLNQFSIIEQSVTGFYEKEITIIGDKGNDMENNNS

SEQ ID NO: 4426 - protein, 1391 aa, unidentified
  REGION 1..1391: note = Description of Unknown: Cas Enzyme sequence
MENKVWYLGLDIGTASVGWAATDTEYKIIRKNKKRLWGVRLFEEATTAQERRTYRSNRRRLARRKWRLNLLEELFSEEIAKVDPNFFLKLKESKYHKEDKTHKLPYTIFNDKEYSDKDYYKEYPTIYHLRSSLMTEKEPDIRKVFLAIHHILKNRGHFLLQGQNFKDGDINNLIKELLELDILHHDLEVNDEIVDNIKNIAVEKKNLTDKINGLKKLFPKEKQLLEVFRVILGGKSSLDKIFAIEEYKELDTSVKSISFKEKVYEEVRHDYEQILSNYIELLDLAKLVYDSIILSDVKKEGKTLSESKVELFEKHKNDLAKLKALIKNDSKLSEEKKDELYRIIFKEDNDKGTNYVNYIKDSKEGKGCSYEDFKKFLVKELAKLQDTEEKNIILTELELETFLPLQRTKDNSVVPYQIHREELIKILDNVENYHSFLKEKDDSGYTVKEKIIQLLEFRIPYYVGPLNSHKKANEGGYAWSVRNKGEENTPVTPWNYSKVIDESASAEKFITNLTNKCTYLKGEEVLPKHSLLYSEFALLNELNALRYDGNRISVEARNTIIEKLFKEQGKKVTKKSIKELLKAEGFINGKGEISGIDITVKNDLKSYRDFKKILGDKFDTEHVENIILWITLYGESRKLIKAKIEAVYGEKYTKEEIAKMSRLTYKDWGRFSRKLLTEIVSEKLFNEETGECLNIINAMRYNNILFMELLADRFDYMSQIEDFNKTLQKEVTEITPDILEDLYVSPAVKRSIWQTIRIVEELKKIIGCAPSKIFVETTRSNTADKKPTDSRKKQLEAVYKNIKDKEIQELEKEINSTIDFSIKKDRLSAVEPSKLKAKKLYLYYTQLGRCMYSGESIDINELFDNNKYDIDHIYPQSKVKDDSFTNTVLVKKVSNAEKTDKYPLGLDIQTKENKRFWKFLKEKKLITEEKYNRLVRTEEFSDEELSGFIARQLVETSQSVKAVASVLGELNPETAICYSKAENVSAFRQNFGKIKDGNRKSKNTEQLIKVREINDYHHAKDAYLNVVVGNVFDVRFTRNAYNFIKDKKDGRKYSLNNMFYTDVRNSNTIAWEMDKTVHQVDKVMNNNSILVTRRTAEQKGALYDATIYKKTKAKEGSYYPIKTSDSIMKDVTKYGGFTKIKIAYYSIFEYVLESKKGVEKITRIIPIPVHISQNIREDSTLVEYAKKQLTLKPGEVIKDLRLKYRKLCIGDLINLENYFYSVGGKTDDNFVYDSAVQVVLDCNSEYYIKELSKYQNWKKENKDGQLWKTITAEDNIKLYNTLVEKMNTGIFIKKKHNKYIELNSERIRNNFINLTIEEQAQVLLEILNLITNKKSTFDLKLIDMKVGRGRFSFNLSKLNTVIVIEQSVTGFYEKEITIIGDKGNDVENNNS

SEQ ID NO: 4427 - protein, 1395 aa, unidentified
  REGION 1..1395: note = Description of Unknown: Cas Enzyme sequence
MENKVWYLGLDIGTASVGWAATDTEYKIIRKNKKRLWGVRLFEEATTAQERRSYRSNRRRLARRKWRLNLLEELFSEEIAKVDPNFFLKLKESKYHYEDKTHKLPYTIFNDKDYTDKDYYKEYPTIYHLRSSLMTEKEPDIRKVFLAIHHILKNRGHFLLQGQSFKDGNINNLIKELLELDILHHDIEINDEIVENIKNIAIEKNNLTEKVNGLKKLFPKEKQLLEVFRVILGGKSSLDKVFAIEEYKELDASVKPISFKEKVYEEVRHDYEQILSNYIELLDLAKLVYDSIILSDVKKEGKTLSESKVELFEKHKDDLMKLKALVKNDSKLLKEKRDELYRIIFKEDNDKGTNYVNYIKDSKEGKGCSYEDFKKFLVKELAKLVDSEEKNKVLTELELETFLPLQRTKDNSVVPYQIHREELIKILENVEKYYSFLKEKDESGYTVKEKIIQLLEFRIPYYVGPLNSHEKANEGGYAWSVRNKGEENTPVTPWNYSNVIDESASAEKFITNLTNKCTYLKGEEVLPKHSLLYSEFALLNELNALRYDGNRISIEARNTIIEKLFKEQGKKVTKKSIKELLKAEGYINGKGEITGIDITVKNDLKSYRDFKKILGDKFNTEHVENIILWITLYGESRKLIKAKIEAVYGDKYTKEEIAKMSRLTYKDWGRFSRKLLTEIVSEKLFNEETGECLNIINAMRYNNILFMELLADRFDYMSQIEDFNKTLQKEVTEITPDILEDLYVSPAVKRSIWQTIRIVEELKKIIGCAPAKIFVETTRSNTADKKPTDSRKKQLEAVYKNIKDKEIQELEKEINSTLDFSIKKDRLSAVEPSKLKAKKLYLYYTQLGRCMYSGEKIKISELLKNNKYDIDHIYPQSKVKDDSFTNTVLVKKENNAEKTDKYPLGQDIQTKENKRFWKFLKEKKLITEEKYNRLVRTEEFSDEELSGFIARQLVETSQSVKAVASVLGELNPETAICYSKAENVSGFRQNFGKIKDGNRKSKNTEQLIKVREINDYHHAKDAYLNVVVGNVFDVRFTRNAYNFIKDKKDGRKYSLNNMFYTDIRNSNTIAWEMDKTVHQVDKVMNNNNILVTRRTSEQKGALYNATVYKAKVAAKAKEGTYYPLKTSDKVINDVTKYGGFTSIGIAYYSIFEYILETKKGEEKITRIIPIPIYISQNKTDDNILLEYARKQIILKQNEKLKDFKLKYKKLCIGTLIIIDNYPYYIGGKFNNNIYIDSAVQILVDSNTEKYIKVIFKYKDWKEKSKDGKVWEIITDEKNIKLYIMLVEKMNTSILKKKKQNKYSELIDNQSVEKFKKLDIDTQIIVISQVLNLLTNKVQPKLDRKLIGVTASRGNCNSIISNLNQFSIIEQSVTGFYEKEITIIGDKGNDMENNNS

SEQ ID NO: 4428 - protein, 946 aa, unidentified
  REGION 1..946: note = Description of Unknown: Cas Enzyme sequence
KEKIVQLLEFRIPYYVGPLNSHKKANEGGYAWSVRNKGEENTPVTPWNYSKVIDESASAEKFITNLTNKCTYLKGEEVLPKYSLLYSEFALLNELNALRYDGNRISVEARNTIIEKLFKEQGKKVRKKTIKELLKIEGYIDGNGEISGIDKTVKNDLESYRDFKKILGDKFNTEHVENIILWLTIFDKGEGKKLVKEKIKKEYRNIYTEGEISEILKLNYSGWGKFSRNLLTEITSKKLVNESTGECLNIINAMRYNNILFMELLTDRFDYMGQIEDFNKALQKEVTEITPDILEDLYVSPAVKRSIWQTIRIVEELKKIIGCEPAKIFIETTRKNKTKKDTTSSRKETLEEVYNKISSNEDIMNLEKELEYTFNLQYKNKMLKGENNFSLKRKKLFLYYLQLGRCVYSGESIKLDKLFNDNYYNIDHIYPRSKVKDDSIYDNLVLVTREKNEKKEDKSIFEVGFQTSNNKRFWKFLKEKKLITEEKYYRLTRTSEFTDYELTGFIARQLVETSQSVKEVASILRTLNPNSTVCYSKAENIIDFRKNFGKIKDGNRQSKNTEQLIKVREINDYHHAKDAYLNIVVGNVYDTKFTRNPYNYISNMFYTDVRNSNTIAWEMNKTVKQIEKVMDNNNILVTRRVSEKKGALYDATIYKANQINEKNEERYQSVKKSNDILSNITKYGGFGNIKIAYYTIVSYEILKKKHIRILPIPIYILNNRLSEVEFSQHIYNLIQNKKNDKIVNFRIIYNKLLVGHKIKLNDYLYYVGGKNGDSFDYDNAIQILLDKDSESYIKIISKYYNDKNLQVCDCEKITKENNIKLYKTLIYLMKKDVFKKNKYIFGNRKPTKFDILNSNENIDLFNETDEENQVRILLNILNILTNKKTKTNLNLNDILSVKGETKRGKHSFNLSSLDQFSIIEQSVTGFYEKEITIIGDKGNDVENSNS

SEQ ID NO: 4429 - protein, 1262 aa, unidentified
  REGION 1..1262: note = Description of Unknown: Cas Enzyme sequence
MKPQILSELNIRKVFLAIHHILKNRGHFLLQGQSFKAGNLNNLIKELLELDILHVGFEVTEKVVDKIADISLEKKTSKDKLNDIKELYPKEKQLLEVFRLIFGGKPSLDKLFAIDEYKELDAAIKSVSFKEKIYEEVRHDYEQVLSNYIELLDLAKLVYDSIILSDIKKEGKTLSESKVDFYNKHRDDLTKLKNLVKNDSKLSEDKKVELYTAIFKEDKDKGSNYVNYIRKSDEGKGCNYEDFKNFLVKELAKLEESAAKEEILRDLELELFLPLQRTKDNSVVPYQIHKEELVRILDNAAKYHNFLDEKDESGYSIREKVIQLLEFRIPYYVGPLNSSKKAREDGFAWSVRNKGYENTPVTPWNYEKVIDESASAEKFITNLTNKCTYLKGEDVLPKSSLLYSEFALLNELNALKYDGNRISLEARNAIMEKLFKQQGKKVTKTSIKNLLKAEGYIDGKGEITGIDITVKNDLKSYRDFKKILGNKFNSEHVENIILWITLYGESRKLIKAKIEAVYGDIYSKEEIAKMSRLVYKDWGRFSRKLLTELVSKKLYNEETGECLNIIGAMRQNNILFMELMADRFDYSQQIVKFNKELQEDVTEITPEILDDLYVSPSVKRSIWQTVRIVEELKKIIGCAPAKIFVETTRSNQGKKEPTSSREKQLKLAYKAVKKDVKELEKEIGAINFDVLNDRLSSEEQSKLKAKKLYLYYTQLGRCMYSGKQIDLENLYTPEYDIDHIYPQSKVKDDSFTNTVLVERELNAKKGDRYPLSSDFQTPSNRKLWKFLKEKGLITDEKYNRLVRTEEFSDEELSGFIARQLVETSQSVKAVASILGELNPETSICYSKAENVSSFRQNFGKIKKGNRDSKNNDQLVKVREINDYHHAKDAYLNIVVGNVYDTKFTRNVFNFIKDKKDGRKYSLNKVFYENVSDSKTVAWEMDKTIYQVEKVMNNNNILVTRRIAEKKGELYNATRHKAKKVKKAKGVGYVPFKSSDNVLKNILDYGGFNSINIAYFSIVRYLLINKQGEINIIRIVPIPVYIENSLQSKRDLFNYIKKQLDDIENEKVKNIEIMYEKLREKTLLRLNDFKYISGGKSGNRIYCDSALQILLSEETEKYIKTIIKFRNWKNENKNGNLWENVSKEENYKLYSKLLEKLNSGIFFNKKSNKFVELNEETTRNKFKQLKEEDQIKVLIEILNLLTCKKQPGKDLSLIGMTASRDLQNFDLSNLNQFSIIEQSVTGFYEKEITIIGDKGNDMENNNS

SEQ ID NO: 4430 - protein, 1392 aa, unidentified
  REGION 1..1392: note = Description of Unknown: Cas Enzyme sequence
MSNKIWYLGLDIGTASVGWAATDTEYKIIRKNKKRLWGVRLFEEATTADERRGYRSNRRRLARRKWRLNLLEELFEKEIAKIDSNFFLRLKESQYHYEDKTHQVPFAIFNDKDYTDKDYYKEYPTIYHLRTKLMSEDNPDIRKVFLAIHHILKNRGHFLLQGQSFKEGNLNNLIKELLNLDILHISIEITEENIAKISEIALEKKTLTDKVNDLKKLYPKEKQLLEVFRLIFGGKTSLDKLFAIDEYKDLDASVKSVSFKEKIYEEVRHDYEQVLSNYIELLDLAKLVYDSIILSDIKKEGKTLSESKVELYNKHRDDLTKLKNLVKNDTKLSEDKKVELYAEIFKEDKDKGTNYVNYIRKSEEGKGCNYEDFKKFLVKELAKLEESAAKDEILRDLELEIFLPLQRTKDNSVVPYQIHKEELVKILDNAVKYHKFLDEKDESGYSLREKVIQLLEFRIPYYVGPLNSSKKAKEDGFAWSVRNKGYENTPVTPWNYEKVIDESASAEKFITNLTNKCTYLKGEDVLPKSSLLYSEFTLLNELNALRYDGNRISLEARNTIIDKLFKQQGKKVTKTSIKNLLKAEGFIDGKGEISGIDITVKNDLKSYRDFKKILGDKFNSEHVENIILWITLYGESRKLIKSKIEAVYGDIYSKDEISKMSRLVYKDWGRFSRKLLTELVSKKLYNEETGECLNIIGAMRQNNILFMELLADRFDYSHQIEEFNKALQQEVTDITPEILDDLYVSPAVKRSIWQTVRIVEELKKIIGCAPSKIFVETTRSNQEKKKPTDSRKKQLEALYKAAKKDAKELEKEIGDLNFDTLSERLSSVEPSKLKAKKLYLYYTQLGRCMYTGEKIELNELNTNKYDIDHIYPQSKVKDDSFTNTVLVKRESNAAKTDRYPLGSDIQTPSNRRFWKFLKDKGLITVEKYNRLVRTEEFSDEELTGFIARQLVETSQSVKAVANILGELNQETLICYSKAENVSSFRQNFGKIKDGNRKSDNNEQLIKVREINDYHHAKDAYLNVVVGNVYDTKFTRNVFNFIKDKKDGRKYSLNNVFYENVSNSNTVAWEMNKTVHQVEKVMNNNNILVTRRTSEQKGGLFDATVYKAKVAENAKEGVYYPLKTSNPVVKDVTKYGGFTKVKIAYYSIFEYTLVSKKGEEKITRIIPIPIYISQNIKDDSTLVEFAKSQINIKDGEEVKDFKLKYRKLCKDNYIKLNDYPYYIGGKFNDYIYIDSAIQLILENNFEKYIKLISKYQNWKKENKDGELWGSITEEENKELYKYLVEKMNTSLFEKKKNNKYNEFIDEETFINFVKLEKEKQIVVLIELLNILTNKRQPSLDKKLIGVTVSRGYCGLDISNFCQFSIIEQSVTGFYEKEITIIGDKENDMENNNS

SEQ ID NO: 4431 - protein, 1391 aa, unidentified
  REGION 1..1391: note = Description of Unknown: Cas Enzyme sequence
MANKTWYLGLDIGSASVGWAATDTEYKIIRKNKKRLWGVRLFEEATTAEDRRGYRSSRRRLARRKWRLNLLEELFASEVKKVDENFFLRLKESQYHYEDKTHKVPYAIFNDKDYTDKDYYKDYPTIYHLRAKLMTEKTPDIRKVFLAIHHIIKNRGHFLLQGQSFKDGNLNNLIKELLEPDILHVGFEVTEEVVGKIADISLEKKTLTDKVNDLKKLYPKEKQLLEVFRLIFGGKTSLDKLFAIDEYKELDASIKSVSLKEKIYEEVRHDYEQVLSNYIELLDLAKLVYDSIILSDIKKEGKTLSESKVELFEKHRDDLLKLKNLVKNDSKLSEDKKVELYASIFKEDKDKGTNYVNYIRKSEEGKGCNYEDFKKFLVKELAKLEESSVKTEIIKDLELEQFLPLQRTKDNSVVPYQIHKEELVKILENAAKYHNFLDEKDETGYSIREKVIQLLEFRIPYYVGPLNSSKKAKEGGFAWSVRNKGYEDTPVTPWNYSKVIDENASAEKFITNLTNKCTYLKGEDVLPKSSLLYSEFALLNELNALKYDGNRISLEARNTIIEKLFKQQGKKVTKTSIKNLLKAEGYIDGKGEITGIDITVKNDLKSYRDFKKILGNKFNSEHVENIILWITLYGESRKLIKAKIESVYGDVYSKDEITKMSRLVYKDWGRFSRKLLTELVSKKVYNEETGECLNIIGAMRQNNILFMELLADRFDYSQQIVEFNKELQEDVTEITPEILDDLYVSPAVKRSIWQTIRIVEELKKIIGCAPAKIFVETTRSNQGKKEPTDSRKKQLELVYKAAKKDVKELEKEIDELKFDTLNNRLSAEEPYKLKAKKLYLYYTQLGRCMYSGKPITFKDLNTKKYDIDHIYPQSKVKDDSFTNTVLVERELNAKKEDRYPLGSDFQTPSNRRFWKFLKEKGLITDEKYNRLVRTEEFSDEELSGFIARQLVETSQSVKAVASILGELNPATSICYSKAENVSSFRQNFGKIKKGNRDSKNNDQLIKVREINDYHHAKDAYLNIVVGNVYDTKFTRNVFNFIKDKKDGRKYSLNKVFYENVSDSKTVAWEMDKTIHQVEKVMNNNSILVTRRTSEQKGGLFNATVYKAKVATKAKEGVYYPLKTSDRFIKDVKKYGGYTSIGIAYYSIFEYVHVNKKGEEKITRIIPIPIYISQNIKDDATLLEFGMSQINIKSGEKIKNFKLKYKKLCIGSLIFINNYPYYIGGKSGDSFYYDNAVQVVLDSQSEKYLKILSKYQNWKKENKDGELWESITEEKNIELYNKLVEKMNSGIFIKKKPNKFNELNSEEVRNNFNNISLEEQAKVLLEVLNLLTNKKSIFDLKLINIPLGRSRYNFNITPQMHFSIIEQSVTGFYEKEITIIGDKGNDMENNNS

SEQ ID NO: 4432 - protein, 1392 aa, unidentified
  REGION 1..1392: note = Description of Unknown: Cas Enzyme sequence
MANKTWYLGLDIGTASVGWAATDTEYKIIRKNKKRLWGVRLFEEAKTAEERRGYRSSRRRLARRKWRLNLLEELFTQEIAKIDSNFFLRLKESQYHYEDKTHQVPYAIFNDKDYTDKDYYKEYPTIYHLRTKLMTEENPDIRKVFLAIHHILKNRGHFLLQGQSFKAGNLNNLIKELLELDILHVGFEVTEKVVDKIADISLEKKTSKDKLNDIKELYPKEKQLLEVFRLIFGGKPSLDKLFAIDEYKELDAAIKSVSFKEKIYEEVRHDYEQVLSNYIELLDLAKLVYDSIILSDIKKEGKTLSESKVDLYNKHRDDLTKLKNLVKNDSKLSEDKKVELYSVIFKEDKDKGTNYVNYIRKSEEGKGCNYEDFKKFLVKELAKLEESTAKDEILRDLELELFLPLQRTKDNSVVPYQIHKEELVKILDNAAKYHSFLDEKDESGYSIREKVIQLLEFRIPYYVGPLNSSKKAKEDGFAWSVRNKGYENTPVTPWNYEKVIDESASAEKFITNLTNKCTYLKGEDVLPKSSLLYSEFALLNELNALKYDGNRISLEARNVIIEKLFKQQGKKVTKTSIKNLLKAEGYIDGKGEITGIDITVKNDLKSYRDFKKILGDKFNTKHVEDIILWITLYGESRKLIKAKIEAVYGDIYSKEEIAKMSRLVYKDWGRFSRKLLTELVSKKLYNEETGECLNIIGSMRQNNILFMELLADRFDYLQQIIDYNKELQTEVTEITPEILDDLYISPSVKRSIWQTVRIVEELKKIIGCAPTKIFVETTRSNQEKKKPTDSRKKQLELFYKAVKKDVKELEKEIGSLNFDVLNERLSSVEPSKLKAKKLYLYYTQLGRCMYSGETIDITQLNTTAYDIDHIYPQSKVKDDSFTNTVLVKREYNAAKTDRYPLGSDIQTPSNRNFWKFLKEKGLITDEKYNRLVRTEEFSDEELTGFIARQLVETSQSVKAVAGILGELNPDTSICYSKAENVSSFRQNFGKIKDGNRKSENTEQLIKVREINDYHHAKDAYLNVVVGNVYDTKFTRNVFNFIKDKKDGRKYSLNNVFYENVSNSNTVAWKMNKTVHQVEKVMNNNNILVTRRTSEQKGGLFDATVYKAKVAAKAKDGVYYPLKTSNPVIKDVTKYGGFTKVKIAYYSIFEYTLVSKKGEEKITRIIPIPIYISQNIKDDSTLVEFAKSQINIKDGEEVKDFKLKYRKLCKDNYIKLNDYPYYIGGKFNDYIYIDSAIQIVLENNFEKYIKLISKYQNWKKENKDGELWESITECENKELYKKLVEKMNTSLFEKKKNNKYNEFIDEETFLNFVKLEKEKQIVVLIELLNILTNKRQPSLDKKLIGVTVSRGYCGLDISNFSQFSIIEKSITGFYEKEITIIGDKENDMENNNS

SEQ ID NO: 4433 - protein, 1392 aa, unidentified
  REGION 1..1392: note = Description of Unknown: Cas Enzyme sequence
MADKIWYLGLDIGSASVGWAATDTEYKIIRKNKKRLWGARLFEEATTAEDRRGYRSSRRRLARRKWRLNLLEELFAAEVKKVDENFFLRLKESQYHYEDKTHKVPYAIFNDKDYTDKDYYKDYPTIYHLRSKLMSEKNPDIRKVFLAIHHILKNRGHFLLQGQSFKEGNLINLIKELLDLDILHVGFEVTEEVVDKIADISLEKKTLKDKLNDIKELYPKEKQLLEVFRLIFGGKPSLDKLFAIDEYKGLDAAIKSVSFKEKIYEEIRHDYEQVLSNYIELLDLAKLVYDSIILSDIKKEGKTLSESKIELYEKHKNDLLKLKNLVKNDSKLAEDKKVELYASIFKEDKDKGTNYVNYIHKSEEGKGCNYEDFKKFLVKELAKLEESSVKAEIIKDLELEQFLPLQRTKDNSVVPYQIHKEELVKILDNAAKYHDFLDEKDESGYSVKEKVIQLLEFRIPYYVGPLNSSKKAKEDGFAWSVRNKGYENTPVTPWNYSKVIDESASAEKFITNLTNKCTYLKGEDVLPKNSLLYSEFALLNELNALKYDGNRISLEARNTIIEKLFKQQGKKVTKTSIKNLLKAEGYIDGKGEITGIDITVKNDIKAYRDFKKILGDKFNAEHVENIILWITLYGESRKLIKAKIEAVYGDIYSKDEITKMSRLVYKDWGRFSRKLLTDLVSKKVYNEETGECLNIIGAMRQNNILFMELLADRFDYSQQIVKFNKELQEDVTGITPEILDDLYVSPAVKRSIWQTVRIVEELKKIIGCAPAKIFVETTRSNQGKKEPTSSREKQLDLAYKAVKKDVKELEKEIGAINFDVLNDRLSSEEQSKLKAKKLYLYYTQLGRCMYSGKTIEIDKLNTTKYDIDHIYPQSKIKDDSFTNTVLVEREINAAKSDRYPLSSDIQTPSNRRFWKFLKEKGLITDEKYNRLVRTEEFSDEELSGFIARQLVETSQSVKAVASILGELNPETSICYSKAENVSSFRQNFGKIKDGNSKSNNNEQLVKVREINDFHHAKDAYLNVVVGNVYDTKFTRNVFNFIKDKKDGRKYSLNKVFYENVSDSKTVAWEMDKTIHQVKKVMDNNSILVTRRRSEQKGGLFEATIYKSKLAKKAKEGVYYPLKTSNNVIKDVTKYGGYTSVGIAYYSIFEYILVSNRGEEKVTRIIPIPIYLSQNIKDDDKLIEFARTQLNTKESESIINLKLLYRKLCKDSYITLDYYPYYLGGKFNDYIYIDSAIQLILEEEIEKYIKLIFKYQNWKKENKEGNVWDNITEESNLDLYYKLVNCMNNRIFKNKKKNKYLEFISEETVNNFKNLDKDKQILVLIEVLNVITNRRKPSLDKKLIGITVSRGYTGLNLSNINQLAIKEQSVTGFYEKEITIIGDKGNDMENNNS

SEQ ID NO: 4434 - protein, 1395 aa, unidentified
  REGION 1..1395: note = Description of Unknown: Cas Enzyme sequence
MTNKTWYLGLDIGSASVGWAATDTEYKIIRKNKKRLWGARLFEEATTAEDRRGYRSSRRRLARRKWRLNLLEELFAAEVKKVDENFFLRLKESQYHYEDKTHKVPYAIFNDNEYTDKDYYKDYPTIYHLRSKLMSEKNPDIRKVFLAIHHILKNRGHFLLQGQSFKDGNLKDLIKELLELDILNVGFDVTEEVVAKIADISLEKKTLTDKVNDLKELYPKEKQLLEVFRLIFGGKTSLDKLFAIEEYKELDATIKSISFKEKIYEEVRYDYEQVLSNYIELLDLAKLVYDSIILSDTKKEGKTLSESKIELYEKHKNDLLKLKNLVKNDSKLSEEKKVELYTSIFKEDKDKGTNYVNYIRKSEEGKGCNYEDFKKFLVKELAKLEESSVKAEIIKELDLEQFLPLQRTKDNSVVPYQIHKEELVKILDNAVKYHDFLDEKDESGYSVREKVVQLLEFRIPYYVGPLNSSKKAKEDGFAWSVRNKGYENIPVTPWNYSKVIDESESAEKFIENLTNKCTYLKGEDVLPKNSLLYSEFALLDELNRLKYDGNRISLEARNTIIEKLFKQQGKKVTKNSIKNLLKAEGYIDGKGEIEGIDITVKSDLRAYRDFKKILGDKFNSEHVENIILWITLYGESRKLIKAKIESVYGDIYSKDEITKMSRLVYKDWGKYSRKLLTELVSKKLYNEETGECLNIIGAMRQNNILFMELLADRFDYSEQISKFNKKLQEEVTEITPEILDDLYVSPAVKRSIWQTVRIVEELKKIIGCAPAKIFVETTRSNQGKKEPTDSRKKQLELAYKAAKKDVKELEKEIGVINFDVLNDRLSSEEPSKLKAKKLYLYYTQLGRCMYSGESIIISELLDNNNNNKYDIDHIYPQSKVKDDSFTNTVLVKRDRNEKKGDRYPLSSDFQTPSNRRLWKFLKEKKLITDEKYNRLVRTEEFSDEELSGFIARQLVETAQSIKAVAKILGELNPETSICYSKAENISSFRRNFGKIKDGNSKSKNNEQLVKVREINDLHHAKDAYLNVVVGNVYDTKFTRNVFNFIKDKKDGRKYSLNNVFYENVSDTKTVAWKMDKTIHQVKKVMDNNSILVTRRTSEQKGGLFKATVYKAKIAAKAKEGVYYPLKTSDKFIKDVKKYGGYTSIGIAYYSIFEYILVNKKGEEKVTRIIPIPIYVSQNIRDNSTLIEFGRRQINIKDGEEIKDFKLKYAKLCIGSEIRMNNYPYYIGGKSKDTFYYDSAVQVIIDNQSEQYLKILSKYQNWKKENKDGELWKNITKESNLELYNKLVEKMNSKIFTKKKPNKYNELNSEEIRSNFNSITAEEQVKVLLEILNLLTNKKSTFDLKNIKLGAARGQQLFDLTKLNQFSIMEQSVTGLYEKEITIIGDKGNDMENNNS

SEQ ID NO: 4435 - protein, 1388 aa, unidentified
  REGION 1..1388: note = Description of Unknown: Cas Enzyme sequence
MKNKEWYLGLDVGSASVGWAATDINYKLLRKNKKRLWGARLFEEAKTAADRRSFRAGRRRLARRRWRISLLEELFAKEVSKNDPNFFLRLKESKYHFEDKSLMNEYLLFNDKDYTDKDYYKEYPTIYHLRSSLMTEENPDIRKVYLAIHSMLKNRGHFLLQGQSFNDSNIDNVIKELLELSIVKTNLEVTDEVIYNLKEIALQKKNLSDKNNDVKKLYPKEKQLQEIFKLVFGGKTSLDKLYDIEEYKELDTSVKSISFKEKIYEEVRPDYEQILSNYIELLDLAKLVYDSIVLADIKKEGKTISESKVELYNKHKDDLANLKKLVKTDSKLSEDKKKEVYFAIFKEDKEKGTNYVNYTHRSQEGKSCSYEDFKKFLKKELEKLEDSPTKTTILEELDLETFLPLQRTKDNSVVPYQIHKEELVKILDNAAKYHSFLAEKDDSGYSTREKVVQLFEFRIPYYIGPLNAHHSTENGGYSWAIRKKGMESVPVTPWNFKDVIDESASAEAFINNLTNKCTYLSGEDVLPKNSLLYSEYALLNELNALRYEGNRISIEARDIIVTKLFKEQGKKVTKKTIKELLKTEGFIDGKGEIAGIDNIVKNDLKSYRDFKKILGDRFDKERVENIILWITLYGESRKLVKEKIIKVYGDFYTVDEIEKMSRLTYKDWGTLSRKLLTELVSEKLYNEETGECLNIIGAMRQGTILFMELLADKFDYMSQIKNHNKENKDDITEITPDILENLYASPAVKRSIWQTVRIVEELKTIIGCAPTKIFVETTRSNKAPNKVTTSRQNDLIAKYKTIKDQEIFELEKELSSSLDFSINKDRLIKEEASRLKAKKLYLYYTQLGRCMYTGKKIDLGELFDNNKYDIDHIYPQSKVKDDSFNNTVLVTRESNANKTDVYPLGISIQTKENKKLWRFLKEKKLITEEKYNRLVRTEEFSDDELTGFIARQLVETSQAIKAISTILSELNSETTICYSKAENVSAFRQNFGKIKEGNRKSENNEKLIKVREINDYHHAKDAYLNIVVGNVYDVKFTRNVYNFIKNKKDARKYSLNSLFYTDVKNANTIAWEMDKTVHVVEKTMNNNNILITRRTAEQKGALYDATVYKAKIAEKAKEGTYYPLKTTDNKIQDVNKYGGFTKVKIAYYSIFEYTIEDRRGESRITRIVPIPIYISQNIKDDKALLEYAKTQLSGKDLKLKYRKLCIGNLIKINNFNYYMGGKTSDNFTYDSAIQVVLDKDSEVYIKELAKYLNWKKENKNGEIWNNITKNKNIQLYNALVEKMNTGIFIRKKPNKYDELTTEEVRDKFKNISRDEQAKVLLEILNLLTNKKSTFDLQNIDIKTSRGKCGFNLSNQSQFSIIEQSVTGVYEKEIVIVGEKNNDLENSSN

SEQ ID NO: 4436 - protein, 1350 aa, unidentified
  REGION 1..1350: note = Description of Unknown: Cas Enzyme sequence
MKKYYLGLDIGTDSVGYAVTDEEYNILKFAGRPAWGATIFDPVSENAERRSFRSGRRRLDRRQQRVHFVQELFAKEIAKKDAGFFKRLEASALFREDAGERYPVFNDKDYTDLDYFRDYPTIHHLIVDLMKSDEPHDVRLVYLACAWLVAHRGHFLSNIDKNKLSEIKDFNSVYSNFVKFFKDAALDEPWVCNDPDAFSKIIKEKMGVTAKYKKLVELIYGSTKPSKEATETFPYSHEHMLKLLAGGTCKLQDLFDNEEYADKGSVSLGMDDDKLGEIMSNIGDDFGLIEILRTIYDWSVLVDALGDASTISEAKISVYEQHKNDLELLKYIIRTYKKDKYNEVFRTIGKDNYPAYVYHTDENKAELKKKNKEDFSKFVLAVVKDIKPDEKDEEAFNQMISRLEARDFMPKQKNTDNRVIPHQLYWYELKTLLDNAAMYLPWLNDVDDSNLSVKEKIEKVFEFRIPYFVGPLNKNSDYSWLVRTNEKIYPWNFEKVVDLDASEQEFIKKLTNTCTYLPGEHVIPKDSLCYHKYIVLNEINNIKINGQKIDVELKQSIYKNLFMTRKKVTRKSLIDYLISNGKIGKNEESAVTGIDINVNSNLAPQLAFKRLMETGTLSESDVERIIERASYAEDKQRLLKYLNKEFARLSDEDKKYIAGIKIKDFGRLSRKFLTEFEGACKKTGEVMTIMSALWNTNDNLMELLSDRYTFRENVDNYCKEYYSEHSMSLSDRLDEMYISNAVKRPIYRTLDVVGDVVKAFGKPEKIFIEVTRSASDEMKGKRTKSRKQQILDLYTKCKDEDVKILQKQLEDMGEYADNKLQSDRLFLYYTQFGKCMYTGEAISLEKLSSKEYDIDHIYPQAYVKDDSILNNKVLVLSSANGEKSDTYPIKESIRDKMASYWSYLQKVGCITEEKYKRLIRRTPFTEEEKTGFINRQLVETSQATKAIATILSEKYPDTSIVYSKAGLVSDFRHEFDILKSRLFNDLHHAVDAYLNIVVGNVYDLKFSKRWFDVNSKYSIKTKTIFSHPVVAGGKTIWEGASSLAKVKATAVKNNAHFTKYSFFKTGGLFDQMPVPAAEGLVPRKKELPTEKYGGYNKSSVMFFIPVKYTCGKKTDIMIMSVELAHGKHFLEDEEFAKQYTNTRLRKILGKEVTNISYPIGKRALKINTVLSCDGFRMCITGSGSGGKALSVQPIMQLSEDKYWQFYVKKLERLVEKVKINSKYVFSEEYDHVNNNDNTKLYDIFCNKLSNSVYRMRPNNPYELIENGREKFGTLSEIEQAKTLLNMLQVFGRMTGGCDLLSIGGAGKTAATVSFSSMISNWKKKYKTAYIVDISTTGFWEKKSQNLIELL

SEQ ID NO: 4437 - protein, 1370 aa, unidentified
  REGION 1..1370: note = Description of Unknown: Cas Enzyme sequence
MKRNYFLGLDIGTDSVGYAAADTEYSLLKCKGEPIWGVSLFDEAQLGDDRRSHRTDRRRLNRKQQRVALIQTLFAKSIADIDPSFFYRQSISSLTADDAGEKNSLFIDPDYSDKDYHRDYPTIHHLIWELMNSAEPHDVRLVYLACAWLVAHRGHFLSPIDTEHIADVTDFSIVWNALLNCFQDCGYSVPWKSGNEKEIARILCLPGGIRSHESGLRSVLFDGGKAPKPDENTFPFDSDEIVKCLCGGNTSLKKLFADHGEQYEELPSIDPTKDPDDLEPTLSELEDTDAELIRRLLAISDWVALERLLSVGNIDVSLRSDEERLSVSHAKIAIYERHKSDLRDLKMLIKKYQPEKFKKIFGDDGNSKSKNYTAYSYHLNGESIEKKATQEEFCDYIGKILKGITPSEEDLLLYEQMMDRIADRSFMPKQKSTDNRTIPYQLYWYELDRILKNAELYLPFLSERDENGLTVSDKIHSVFSFRIPYYVGPLFKTEHNHAWIERKANGKIYPWNFNDMVDLDRSEEEFIRRMTAKCSYLPGEDVLPKESLLYHRFTVLNELNKLCIDGNPISVEQKQQIYRDVFLVQPKVTLKRVKDYLISRNWMEKNSDISGLNDQIPFNLKPQRDFKRLLENGSLTQDDAERIILRITCTEDTTRLYKWIKTNYPELPENDMRYLSRLNYKDFGRLSERFLNGICGVEKNSATGEAFTIISALWNTNNNLMELLSSRFTFRETIETELRNYWLEHPQSLNERLDGMYISNAVRRPIIRTLEIVKEVTKAIGCPPEKIFVEMTRGDQPEKKGKRTESRREQILRYYKSLKDTDIRELNQQLENKSDNELQSDRLFLYFMQLGKCMYTGTPINLDQIKGSTYNIEHIYPQKLVKDDSILNNEVLVLSEINGQKSDNFPIEAWIRSARTPFWTMLKDNGLITAEKYKRLTRSTPFSADEKWGFINRQLTETSQATKAVAELLSERYPETKIVYVKARLASEFRQEFDLLKSRLYNDLHHAKDAYLNIVVGNVYNSRFTEQWFRQNADSDYTVKTKALFSHPVVCGNETVWNGSDMLDKVKKTVRKNNAHLIVYPFLRKGGLFDQQPLKKAAGLIPLKRGLPTEKYGGYNKPAISSFLLVKYTAGKKTDVMFLPLRLIYEREYSSGDTDAMEAYARQQIREITGKEPGSVSFPLGMRLIRINTVLSLDGFRVYITGGLNVGRTISIRTFTSFSAAPIWETYIKHMERTDEKHRGSDHYVFDSLYDKISSERNIELYDLYLSKFEKTIYRYRPSTPLTAIMEGRDIFIHLSELNQVSVLLNIHQLFGRSAVGCNLTGIGGVAKAGVTTLSSSLSNWAKNYTDVRIIDQSPAGLWEKQSCNLLELL

SEQ ID NO: 4438 - protein, 1365 aa, unidentified
  REGION 1..1365: note = Description of Unknown: Cas Enzyme sequence
MKKKSFDEERTWFLGLDVGTNSVGWAATDEEYNILKFKGNATWGIYLFDEAKNAADRRNNRVARRRLQRKKQRIALLRQFFAKAIAEKDPQFYTRLNESQLWSEDRTTGKETCLLIGPEWNDRLYHRTYPTIHHLICELMESKEYHDPRLVYLACSYLLTHRGHFLLEVDENNVENTTEFNGIYEELMSWFDSAEIDRPWNCASKSFEDIMKKRVSSTKKEKLFIEEIFNGKKITGDDDSPISVKAIIAFLSGRKVKLSELYCDETYDQIDNPEISASSSSFEDQFEALSSILKDEEYDLLSRLKRIYDWSLLVDILQGEKNISFAKVKTYEIHRKDVELLKHIVKMYCPEKYSKVFREIGKENNYPRYSYNVNDLGKNAIVPKEFKGKCSQEDFCKFVLSIVKNLDSSIEAEDKKQYGQMIERLEQKAFCPKQVTSDNRVIPYQLYYVELKNILENAKEYLAFLNERDEYGTVKDKILSIMTFRVPYYVGPLNARSEHAWIRKLSKEKIYPWNFDAVVDKDRSETEFIRRMTSSCTYLAGKDVLPKYSLLYSKYTVLNEINNLQVNDTRISVEAKQGIYNDLFLKRRRVSLRMIREYLLANGYIQGEDELKGVDETIKSELRSYHDFKEYIRKGVLSEKQVEEIIYRITLTTDRSRLRKWLREELNLDENAVKSISRLKYSDFGRLSRELLTQIFDLDLSTGELRCEENIISKLWTSNCNLMMLLSNQYGYMDHIASMNEEYYEENPSSIDQRLKDMYVSNAVKRPILRTIEIAKELKKVIGCPPEKVFIEMARGTKENQKGKRTKSRKDQIKELYENYDKNEVAQLIDELESYSDSELRSDRLFLYFCQLGRCMYTGTPINISELGTDRYDIDHIWPQCKIKDDSLDNRVLVLSKYNGKKGDEYPLPEEWRRSQMAFWMHLHKTGLISDKKLERLKRATTFTDEELASFINRQLVETRQSTKAIATILKELFPKTEIVYVKAGLVSDFRQEFKDDYQTLKCREINDFHHAKDAYLNIVVGNVFHTKFTANPLQYVKSGDIYSLKIRTLLEHDVARAGRVAWKAENNVWLKRVTDILHKNNIRFVRYSSYQNGCLFKVTPVRRGLAHVPLKKTLSTQKYGGYVEPRNRGFFLVKYADKKKCVITLVAVPIHKANMIKSNEGKIEYCKELGYANPELLLGGRMIKLNSLWEIDGYRVSLACKSNDSVKFKCAQQLVLPVEEELYVKKLGKYCERSKGIKDDLKILDHDGISVSKNLKLYQLLKEKLEKTNYSTLMKVPKDIICNGLEKFESLSIEKQSKALMEMIGLFSCGDTQGADLSLLGGAQTTGVQKMAMKLQRDKFSCIRIIDQSPTGLFEQKTPNLFDL

SEQ ID NO: 4439 - protein, 1365 aa, unidentified
  REGION 1..1365: note = Description of Unknown: Cas Enzyme sequence
VGNIKKDMFIGLDIGTDSVGYAVTDSDYRILKHRGEDMWGSCLFESGATKAERRGFRSARRRLDRRQWRVALTQEIFASEIRKVDENFFIRLQESGLYREDTSTHSQYTFFEDDTYTDKQFHAEYPTIHHLIVSLMENKQAHDVRLVYIAVAWLMAHRGHFLNEVDKHKVDEVTRFDEVYQKFEEYCNGAYEEGDLNPFIACDFGEFQKIMLMKASVSVKEKAFFDLLNNGKTFKDEPDDIVSKKMIVKLLSGGTVQPAKLFISEESKEAYKEVDSVRLGMEEEKFAAILTELGDEGELLLKLRQIYDWSILAEILHADDHQDKMTISKAKVEQYEQHKKDLNDLKKIVRKYIPDEYNEIFREQREDNYVAYSGYEYSGKRKSDIEKFSAYLTKKLKAVEVEEIDAEKFEDMMARLEIREFLPKQVNGDNRVIPYQLYWDELNNILQNVKEYLPFLNEKDADGFNNIEKLLSVFEFRIPYYVGPLRADKNSKYAWMQRKAEGKIYPWNFYDKVDLDASEKNFISRMTNSCTYVPGEKVLPKNSLLYSKFMVLNEINNIKVNGVAIDVELKQKIYKEFEKNKKVTRKKIEGLLASEGCFEKGKDVLSGIDINVNSSLKSYHVFKNLLESQQLTLEDAERIIEYMAYTEDKNRFKKWLAREYSNLSEEDRKYIAKQKLKDFGRLSKKFLTGVKGISKKQNSYEKISIIDALWNTNDNLMQILSDQYTFMESIKNEQKEYYEGKGQSIDELLDDMYVSNSVRRPIYRTLAILEDINKATKTQPKRIFIEMARGGGEKGKRTVTRRKQIEEMYKTVKHEDIAELSKQLEDCSDNKLQSEAVYLYFMQLGRCMYSGEPIRIEELPTTKYNIDHIYPQSAVKDDSIDNKVLVLSTLNGDKKDIYPIPSKYREKAGWLWNHLHKNKMISDEKYKRLMRTTGFTDDEKMGFINRQLVETRQSTKALGVILEQMYPDTEIVYAKARLASEFRQEYEIYKSRSVNDLHHAKDAYLNIVCGNVYHCRFTRNFMVDRTYSLKTKTLFGHQVHDGEKLAWAGEESIAFVKRMVLKQTPHYTRFAFERKGGLFDQMPLKKGEGAVPRKKNLPIEKYGGYNKSTATFYLLVKYKEKKKTDIMFMPVDLYAGAVVLRDEIAAKEYAQKTIATINGKKLEDIQIIAFPLGLRKIKVNTILSLDGFRIAITGKASGGKQLLYVLAESLKLDNESEKYIKRIDNYFAKKEKNKDIKLDSEYDEITKENNSKLFNIILEKGQSNPYIKISSLREVAAFISGVAEKFDVLSLEEQALALTKLIEIYKSGRAGSCDLSIVKGSKNAATMIISSKLSNWKKNYSDVRIVDTSASGIYTKESCNLLELL

SEQ ID NO: 4440 - protein, 1361 aa, unidentified
  REGION 1..1361: note = Description of Unknown: Cas Enzyme sequence
MKNEENIYLGLDIGTDSVGYAVTDDKYKIMKYHGNAAWGSTIFDAGALGADRRVFRSARRRLDRRQERIQLLQEIFANEIAKVDERFFIRLLESGLWRADAEDRYVFFNDKEYTDVQYMRDYPTIHHLICELIYNPNKHDVRLVYLACAWLVTHRGHFLSNINTENIADLVDIHNVYNGFMRFFEENEIICDWREVNVEELGRVLAANIGINEKYRNLSTVLFATRKPDKKAKEGFPYSEDAIVRLLAGGTCKLKDVYIKEEYDEFGSITLGMDDEKMTEVMADIGDDFDLIKALRSLYDWGILANILVNENNSPLISQSKVKVYEQHREDLANLKYLVHKYIPHKYNEIFREIRGDNYVAYSYHYELKNDEKMGKKADVEKFSKFLLKILEGISVDEQDKVVYDNMIERLTLRLFLPKQKNTDNRVIPHQLYEYELKSILKNTKNYLPFLKEKDSDGISNEDKIISIFKFKIPYFVGPLNCNSQFAWIQRKADGKIFPWNFEDKVDFDASEQAFIQRMTNQCTYLPEESVLPKQSLYYQKFMVLNEINNIKIDGRKISVAMKQELYNEIFEKKKRVRKKDVIDFFVSNGYLEGGKEALISGLDEQIHTNLSSFHAFRRLLQNHILSVEDVESIIERASYSYDKRRVLLFLKNKYSFLTDEDIKYICKIKIKDFGRLSKKFLVDFEGTCKETGEISTVLRLMWETNNNLMELLSDKYTFANGIKENRKKYYTEQQKTLDDRLDEMYISNSVKRTIYRTLSVVKDVTKAFGVPKKIFVEMARTNNPDLKGKRTRTRQQQVIELYAKCDEEDVRELKHQMESLGEYVDNKLQSDKLFLYFIQFGKSAYSGKMIDLEKLMSGSKVYDIEHIYPQAYVKDDSIINNKVLVFSEENGAKQDIYPIKTEIRKQMSGIWTTWHHVGAISDEKYKRLTRSTPFNEDEKYGFINRQLTETSQSTKAIAQILNEKYPETEIVYVKAGLVSDFRHEFGLCKCRSYNDLHHATDAYLNVVVGNVYNMKFNRKWFSVDSKYSIKSKTIFSHSLVCNGKIIWDKEKMLPMVLKNAKKNNAHFTKYQFMKTGGFFDQMPCKKASGLVPRKKGLDTERYGGYNKSGIMFLTPMRYKIGKKSDIIILSVELLYGKLFLKDEVFAKKYAEERLQKIIGKKADEVSFPMGMKPWKINTVLSLDGFNVCITGIGGGGKCLSAQPIMQLSLPYELMKYLKKIEKFVEKNKNNANYIYDEQYDSVSVDENIKLYDVYLDKLENSIYNKRINSPEAILKNGREKFCKLNVLEQAVTLINIQSIFGRMTGGCDLENIGGKKHSAATVNFSSNVSNWKKYYNDVRVVYQSPSGIWEKRSQNILKLL

SEQ ID NO: 4441 - protein, 1363 aa, unidentified
  REGION 1..1363: note = Description of Unknown: Cas Enzyme sequence
  MOD_RES 421..433: note = Any amino acid
MKNEKKYYLGLDIGTDSVGYAVTDTEYRLLKFHGEDAWGSHVFSAAALCDERRNFRSARRRLDRRQQRVQLLQEIFADEISKIDSRFFLRLSESYLWREDTADRYIFFNDKEYTDVQYMGEYPTIHHLISDLMHDKKKHDVRLVYLACAWLVAHRGHFLNQISVEHMDSLLDIQEVYQNFMGFFIENGFENPWSSDAQAIGAILKEHVRVTEKHNLLAATILDDRKPNKNVSETFPYSEYHIIRLLAGGTCKLQDLYGKDEYEAFGSLSLEMDDDKMAEIMVNIGDDYELISVLRNLHDWSVLAEVLDAESGITTISEAKVKIYEQHKADLKTLKYFIRKYCPTKYDMVFREARNDNYVAYSYHVNRDIADQVKSKADVETFSKFLEKIVGKIQPDEEDEAAYQEMYGRLELRQFLPKQKXXXXXXXXXXXXXHQLYEYELKKILDNASEYLPFLKQNEDGISNKDKILSVFKFKIPYYVGPLNTNSDFAWIQRKAGKILPWNFQSMIDDDASEEAFIKKMTNQCTYLPGEAVLPKDSLCYQKFMVLNEINNLKIDGRKIPVEAKQGLYTCLFLKYKRVKKKQIEDYLISNGYLDKNRRESLSGIDVTIKSSLSSYLSFKRLLDKKILSEQEVERIIERSSYAEDKGRVGKWLRKNYPDLSDEDVTYICKIKIKDFGRLSRKFLTGMEGVCKATGEIATIINMMWETNDNLMELLSERYTFVETIDACRKEYYTGRKQTLEERLDEMYVSNAVRRPIYRTLDIVKDIEKAFGTPEKIFVEMARGGLPEQKGRRTKSRYQQILDYYAKCREEDVRDLKHQLETMGEYVDNRLQSDRLFLYFMQFGKSAYSGTPISIERLMAGSKEYDIDHIYPQAYVKDDSIINNKVLVLSEENGAKQDVYPIKAEIRNQMQSTWAYWHHLGTISDEKYKRLIRSTPFTEDEKYGFINRQLTETSQSTKVVAELLKERFPQTIIVYSKAGLVSEFRHEFDLYKSRTYNDLHHAVDAYLNVVVGNVYHMRFSRQWFRVESRYSVKTKTLFTHTVKCQDQIVWNKEEMLPRVLKTAKKNTAHFTKYASFKTGGLFDQQPVKKGANLIPLKAGLLTEKYGGYNKAGVMFFIPVRYKAGKKTALMILSVELIYGKRFLEDASFAKEYAKDRLQRILGKKVDDVTFPLGMRPWKVNTVLSLDGFRACITGVASGGTKLIAQPIMQFSSDEYWKYYLKKVERLTEKVSNNPRYVYDVDYDVVQAEDNLKLYDLYIDKLQNTIYKKRINSPLQLLIDGRERFMGCNVIEQCQVLLNIHQVFGRMTAGCNLEKIGGKAHSAATVSFSSTMSNWKKNYSDVRIIDQSASGLWEVVSDNILEYV

SEQ ID NO: 4442 - protein, 1035 aa, unidentified
  REGION 1..1035: note = Description of Unknown: Cas Enzyme sequence
IYEQHKKDLATLKYFIRKYCPEKYNTVFKDAREDNYVAYSYHYSDKLDGQIKKKADTETFSKFLIKVITSIKPDKEDEIIYQDMNNRLGLRQFLPKQRNTDNRVIPHQLYEYELKKILKNAAKYLPFLNQKEDGISNTEKIISIFKFKIPYYVGPLNKHSEFAWIERKAGKILPWNYEKMIDDDASEEAFIKKMTNQCTYLPGESVLPKDSLCYQKFMVLNEINNLKVDGRKISVEAKQGIYTDLFLKYKKVKRSQIEDYLISNGQLEKNRRETLSGIDIQIKSSLSSHIAFRRLLEQKILNEADVERIIERASYAEDKGRVAKWIRTKNPHLAEADIKYICKVKIKDFGRLSRTFLSGIEGVCKETGEVSTIINMMWESNDNLMELLSERYTFADKILEFKSDYYTERKQTLAERLDEMYVSNAVRRPIYRTLDIAKDLEKAFGKPEKIFVEMTRGGLPELKGKRTRSRHQQLSEYYDKCKEEDVRDLKQQMEALGEYVDNKLQSDRLFLYFMQFGRCAYTGMPISLEQLMAGSKEYDIDHIYPQAYVKDDSIINNKVLVLSVANGEKKDAYPIKPEIRNTMQKTWSFWHHIGTISEEKYKRLIRSTPFTEDEKYGFINRQLTETSQSTKAVAELLKERYPEAEIVYSKAGLISDFRHEFDLYKSRSYNDLHHAVDAYLNIVVGNVYHMRFSRQWFNVDSSYSIKTKTLFTHTVNCNGAEVWNKDMLPQVLKTAKKNTAHFTKYAAFKTGGLFDQNPVKKAPGLTPLKADLPTEKYGGYNKAGIMFFIPVRYKSGKKTVLMVLSVELLYGNRFLEDEIFAKEYAKDRLQRIIGKPVEEVDFPMGMRPWKVNTILSLDGFRICITGNASGGKCLIAQPIMQFSSDEYWKYYLKKIERFVEKVKNNSSYIYDVDYDAVHHEDNLKLYDLYLDKLQNSIYRKRINAPTQTMIDGREKFMACSVLEQCQVLLNIHQVFGRMTAGCDLTLIGGKPRSAATKNFSSTISNWKKNYTDVRIIDQSASCLWEVVSENILEYL

SEQ ID NO: 4443 - protein, 1358 aa, unidentified
  REGION 1..1358: note = Description of Unknown: Cas Enzyme sequence
MKQGKRGYYLGLDIGTDSIGYAVTDEQYHLLRFHGNDAWGSHVFDSASLCDERRGFRSARRRLDRRQQRVKLLQEIFAKEIANIDPRFFIRLSESYRWRDDTDDRYIYFNEEEYTDIQYMRDYPTIHHLICELMENEEEHDIRLVYLACAWLVAHRGHFLSQLSVDNIDSLIDIESVYQKFLHFFIDNGCENPWIQDAELVGGILKEHIGVTEKHNRLGEIMLGNRKPSKDVRDTFLYSEYCIIRLLAGGTCKLRDLYGKEEYEDFGSVSLEMDDDKLAEIMINIGEDYELIAVLRSLHDWSVLADILDGQNGLTNISTAKVAIYEQHKKDLATLKYFIRKYCPEKYNAIFKDAREDNYVAYSYHYNNKLDGQIKKKADTETFSKFLIKIINSIQPDEEDEIIYQDMDNRLGLRQFLPKQRNTDNRVIPHQLYEYELKKILENAAKYLPFLNQKEDGISNTEKIISIFKFKIPYYVGPLNKHSEFAWIDRKSGKILPWNYENMIDDDASEEAFIKKMTNQCTYLPGESVLPKDSLCYQKFMVLNEINNIKVDGRKISVGAKQGIYSDLFLKYKKVKRSQIEEYLISNGQLEKNRRETLSGIDIQIKSSLSSHIAFRRLLEQKILNEADVERIIERASYAEDKGRVAKWLRAKYPHLTEADIKYICKVKIKDFGRLSRTFLTGIEGACKETGEVATIISMMWESNDNLMELLSERYTFADTILEFKSDYYTERKQTLSERLDEMYVSNAVRRPIYRTLDIVKDLEKAFGKPEKIFIEMTRGAMPELKGKRTKSRQQQLLEYYDKCKEEDVRDLKQQLEALGEYVDNKLQSDRLFLYFMQFGKCAYSGMPISLERLMAGSKEYDIDHIYPQAYVKDDSIINNKVLVLSVANGEKKDVYPIKSEIRNKMQKTWSFWHHVGTISDEKYKRLIRSTPFTEDEKYGFINRQLTETSQSTKVVAELLKERYPEAEIVYSKAGLISDFRHEFDLYKSRSYNDLHHAVDAYLNIVVGNVYHMRFSRQWFNVNSSYSIKTKTLFTHTVNCNGKEVWNKDMLPGVLKTAKKNTAHFTKYATFKTGGLFDQNPVKKALGLTPLKAGLPTEKYGGYNKAGVMFFIPVRYKSGKKTVLMVLSVELLYGNRFLEDEIFAKEYTKDRLQRIIGKPVEEVDFPIGMRPWKVNTVLSLDGFRVCITGNASGGKCLIAQPIMQFSSDEYWKYYLKKVERLVEKVKNNSRYIYDVDYDVVHPEDNLKLYDLYLDKLQNSIYRKRINTPIQTLIEGREKFIDCSVIEQCQVLLNIHQVFGRMTSGCDLTLIGGKSHSAATVNFSSTISNWKKNYTDVRIIDQSASGLWEVVSENILEYL

SEQ ID NO: 4444 - protein, 1355 aa, unidentified
  REGION 1..1355: note = Description of Unknown: Cas Enzyme sequence
MKNKKYYLGLDIGSDSVGYAVADEEYNLLKFHGEPAWGATLFDAPASKAERRGYRTARRRLERRKQRVQLVRELFAEEIAKVDGRFYIRQQESALFREDAGDAYSIFNDPDYTDREYYAEYPTIHHLIFELMKNPAPHDVRLVYLACAWLVAHRGHFLSNISKDNMDSFRDFNLVYKSFISFFTDNGYDVPWNECDEKELGNILKKKIRATDKKKELTDLLYGGKKPSSEATEDFPFSRAAIIGLFAGSKVRPKDLFQNSDYENLEGITLDMDDEKFINLSTELGDDYELIADMRAVYDWTVLADILGNYSCISEAKAAVYEQHRKDLRFLKDVIAKYRPEKYSEVFRAADKDNYVAYAYHTDEVSGSNLKRKDKEAFSKYILGIVKNISPDASDKQNFDDMIMRLEDRTFMPKQKDGDNRVIPQQLYAYELDAILKNATQYLPFLNETDEDGLSVADKISSVFSFRVPYFVGPLNSNSPRAWLARKSGKIYPWNFEKMVDLDASEQNFIEQLTNTCTYIPGEPVLPKDSLLYHKFSVLNEINNLCINEKRISVELKQEIYNNVFMCRRKVTRKQLISYLVANGYVEKGKEDTVTGVDININSNLAPQISFKRLIESRVLSEQDVERIIERASYSEDKTRLAAWLKREYPNVNDADRKYICSLRIHDFGRLSRRFLSGVEGVRKETGEVMTVISALWETQYNLMEIVADADRFTFKDELKTIRDDYYSEHPQTLDSRLDDMYVSDAVRRPIHRTLDIIKDVVKAFGEPEKIFVETTRDASGKKKGERTTPRKEQILELYKKCGSEDVRLLQEQLEAMGEAANTKLQSEKLFLYYMQLGRCMYTNQPIKLEALGTKLYDIDHIYPQCFVKDDSIINNKVLVLSEANGAKGNVYPINSDIRKKMHGIWESYKAHGLISEEKFKRLTRTTPFTEEEKYNFINRQLTETSQSTKAVATLLNEFYPDTEIVYSKAGPVSDFRKEFEIYKSRLFNDLHHAVDAYLNIVVGNVYHMKFTRRWFNVNSDYSMKAKTIFTHPVICGGQTVWDGAHMLEKVKTTAAKNNAHITKFATFKNGGLFDQNPISAKEGLTPLKKGLPTEKYGGYNKAGSMFFIPVRYRVGKKTDIIIMPVELLCGKKFLEDAAFAKEYTFDRLGRLLKKTVDEFSFPLGMRPWKVNTVLSLDGFRVCISGGKGGGTQLITQTLTQFAASKDWAFYLKKLEEFNKKNSKNPNHIYDEKYDKISAEKNLELYDLYIDKLENSIFSKRVNCPTELLKKGRDKFIALGIKEQAQALLNIHQVFGRISRGCDLSAVGGTSRSAATESLSTKISNWKKDYKDVRIIDSSASGLWEKRSCNLLDLL

SEQ ID NO: 4445 - protein, 1354 aa, unidentified
  REGION 1..1354: note = Description of Unknown: Cas Enzyme sequence
MSGQKNFYLGLDIGTDSVGYAVTDEQYSLLKFHGEPAWGVQVFDAAELNAARRGFRTGRRRLDRRQQRVSLTQELFAEEIAKVDPGFFKRLRESALFRDESGQQFPLFNDAGYTDVEYYTQYPTIHHLICDLMNDARPHDVRLVYLACAWLAAHRGHFLSNIDKNSLAELKSFSGTYTSFRKFFDDRDYLYPWDGADEEKVSAALRKHIGVTAKEKELTAALLGGGKAPKDGTEGFPFSQAAIIKLLAGGTRQVKELFPGREGYGELGSVSLAWDDDKLGELAAKLGDDFELITALRSVYDWSVLVDAIGAFDTISAAKVHTYEQHRADLAFLKKVIRKYCPERYDAMFRAVGQDNYVAYSYHTDSKNTSDLKRKDKEAFSKYVLASIKDITPDAEDQAEYADMKERLGLRTFMPKQRDGDNRVIPHQLYWFELKKILANAQRYLPFLAQADSQGLTVADKIESIFLFRIPYYVGPLNTASAHAWVVRKPGKIYPWNFEQMVDLDASEDAFIRNLTGKCAYLPGEDVLPKDSLLYHKFTVLNEINNLRINGVRISVDLKQRIYSELFLCKKKVTRKKLLDYLLSEGVIARGEEDSVSGIDEEIKSNLAPQMAFKRLLEAGALTEHDTERIVERASYAEDKTRLAKWLEREYPDLSEEDRRYLCSQRWKDFGRLSRAFLAELMGASKDTGEAFTVIDALWRTQCNLMELLSDRFTFAAEIEAAQREYYARNPQSLSDRMDAMYLSSTVKRSVYRTLDIVKDVTKAFGTPKKIFVEMTRGAREDQKGKRTKSRYQQLMELYDHCRHKDVPRLRQELEAMGDSADSRLQSDKLFLYYRQLGKSMYSDTPISLEKLWTKEYDIDHIYPQAYVKDDSIINNKVLVLSTENGAKSDDYPIKSEIRQARAGFWKYLKDAELISEEKYRRLTRETPFTDEERRGFINRQLTETSQSAKAVATLLKERYPDAEIVYCKARLTSEFRQEFELLKSRAFNDLHHAVDAYLNIVTGNVYHAKFTPNFDVHSKYSIKTKTLFTNPVIAGGRTVWDGEGMLAKVKATAVKNTAHFTKYAFFKTGKLFDQTIYSPSAGLVPRKKDLPPEKYGGYNSASVMFFIPVRYRAGKKAELFIMPVELLHGQRFLEDEAFAREYAKDRVGRILGKPVDEVSFPLGMRPWKINTVLSLDGFRVCISGSSSKGKSLIVQPIVQFSDAPFWQFYLKKLEMLAEKVSKNPSYMFDETYDKVSAEKNVALYELYLTKLESSIYRKRVNPPTEILRDGQEAFRSLTVPEQAKALLNIHQVFGRIAGGCDLTAIGGAGKAAATVNFSATASNWEKNYSDVRVIDVSASGLWEKQSGNLLELV

SEQ ID NO: 4446 - protein, 1360 aa, unidentified
  REGION 1..1360: note = Description of Unknown: Cas Enzyme sequence
MADKLFIGLDVGSESVGWAATDENFHLYRLKGKTAWGARIFSEANDAKTRRGFRVAGRRLARRKERIRLLNTLFDPLLKKDPAFLLRLENSAIQNDDPNKPIQAIADCPLLVNKQEEKDYYKRYPTIWHLRKALMENDDHAFSDIRFLYLAIHHIIKYRGNFLREGDIKIGQFDYSIFDKLNETLAVLFDLQNEDGENEEGRFIGLPKSQYEAFITCANDRNLPKQPKKAKLLSMFEKTEESKAFLEMFCTLCSGGEFSTKKLNAKGEETYQDAKISFNSSYDENEGAYQEILGDFFDLVDIAKAVFDYCDLSDILNGNDNLSSAFVELYDSHKSQLSALKSICKRIDNQNGFIGEKSIYVKLFNDPNDKSNYPAFTNNKTLVDKRCDIHTFDKYVKETILPYESSLTGRDAVNWQMLKSLAEQDRLLQTIALRSTSVIPMQLHQKELKIILKNAVSRNIKGVAEIEEKILKLFQYKIPYYCGPLTTKSDYSNVVFKNNEYRPLKPWDYEEAIDWDGTKQKFMEGLTNKCTYLKDKNVLPKQSVLYQDFDTWNKLNNLKVNGNKPSLEDLNDLFSFVSQRSKTTMRDIQRYLKSKTNSKENDVVVSGWNSEDYICCSSRASFNKNGIFNLNNSEVLKECERIIFLKTIYTDSPKDADAAVLKEFPDLTNNQKTLLKTIKCKEWSPLSKEFLELRYSDKYGEIRQSIIDLLRNGEGNLMQILAKYDYQEVIDACNAASFQTKSKSQIVSDLIEEMPPKMRRPVIQAVRIVQEVAKVAKKEPDEISIEVTRENNDKEKKQQLTKKAKSRSTQIQNFLKNLVKIDASEKKQANEVLEELKKYSDQSINGKHLYLYFLQNGKDAYTGKPINIDDVLSGNKYDTDHIIPQSKMKDDSIDNLVLVEREINQHRSNEYPLPESIRKNPANVAFWRKLKKAGMMSEKKFNNLTRSNPLTEEELGAFVAAQINVVNRSNVVIRDVLKILYPNAKLIFSKAQYPSQIRKELNIPKLRDLNDTHHAVDAYLNIVSGVTLTDRYGNMRFIKASQDEEKHSLNMERYISSLIQTKEGQRTELGELIDQTSRRHDFLLTYRFSYQDSAFYKQTIYKKNAGLIPAHDNLPPERYGGYDSMSTEVNCVATIIGKKTTRYLVGVPHLLIKKAKDGIDVNDELIKLVPHKENEVVKVDLNTTLQLDCTVKKDGFMYLCTSNNIALVKLKPFSPIFLSRESEIYLSNLMKYVEKYPNISDENSEYEFKINRENVDPIKFTEKQSIEVVQDLIIKAKQDRFSYCSMISKLRDINAEEMIHSKSLTEQLKIIKSLIGVFTRKSEILSDKNNFRKSRGAILQEDLFLCSDSITGLYHTERKL

SEQ ID NO: 4447 - protein, 1365 aa, unidentified
  REGION 1..1365: note = Description of Unknown: Cas Enzyme sequence
MEENRYYLGLDMGSSSVGWAVTDQNYCILRKKGKDLWGIREFDPAESAAERRTNRINRRRRQRQMARIGLLKDYFADEIEKVDRDFFTRLDNSKYFMEDKDDRLQSSNGIFNDEYFKDADYYKLYPTIFHLRKALLDIDGTGQAFDVRLVYLALLNMFKHRGHFLLNTTDEESDNEQMRTIYERLIEQMNEEYEISLACVSLKQIVSVIGDNGIGRKQKHEQLCELYGVSKKQKAANEFLKCMSGLSINANVIFETDSEEKIPVCFHDFSYTDKIPELMEQLGDETYSVIESMKSIYDYAVLSGTLKNSDYLSLARVADYEKHKSDLQCLKAVYREYRSDQEYNRMFRSNEPATYSAYVNSLNSSNSLADDHKYRRNMKDRKSDQLYATIKKTLGDCPKSDERILYILDQIEKEQFLPKQLTGANGVIPNQVHRKEMKKILENAEAYLPFLKEKDESGYTVSERILMLFSFQIPYYVGPLGENSKTGWAMRKEDGRILPWNIEQKIDMQATSKEFIEHLIRSCTYLSGERVMPKASLAYEKYCVLNEINNICIDGERIDTELKQRIFNECFLPGRRVTRKQLCKQLVLWGKIRSEDQVSGIDVVINQSLSSYGKMYAVFGEKLQEDKYRDIAEDIIYWGTIFADSKKMYREHLTKYVESGELTDANVKRILGYKFKDWGRFSRALLELQGCDKSTGEKLSLIQAMWDYSLNFMELINSPDFTFKEALEEKRDHIVRSLSDFAYEDLDEYYFSAPVKRMIWQTILVVREIEKVMGQAPTRVFVEMTRSDEEKGDNGRKASRADQLLERYKHIKNTEIHNWEQEIKDADSNGKLRSKKLYLYYMQMGRDMYTGEEIELSKLFDDNLYDIDHIYPRHYVKDDSIINNLVLVNKSANEHLKKDDYPVPAQITANPKVRELWDSLRRSGLITDEKYHRLISREPFTDKQKGDFIARQLVETSQGTKGVCELLKSLLPESTEIVYAKASNVSEFRHKNGFVKSRLVNEFHHAQDAYLNIVVGNVYYTKFTKNPWNFIKNDYTKDKKKNHYNMDRMFDWDVTRGEEVAWIADKKDGQGTIRIVREMMHKNTPLMTRMAVKKNDALFNVQPVSHYVAKAQNYVPVKKGIMEDVGRYGGYTSLTPAYFIFIEAKKGKKRIKTFESVLMYHESRIKTEKDLVKYCTDVLGYSDVRIISQKIEKYSLICLNGYFLYIVGFDSRKNVELKNATSLILDGCDIKYIKNIEKALRNKETIDNSEIICREKNLRLYEKLETKHNNSIFVNHPKAIGSILTYGKEKFASLTLERQIELLVNLVSFTATNLQSVGFSLIDIAGPKDVGRIRISGNMSAANELFLINRSILGLYESKVNLLKA

SEQ ID NO: 4448 - protein, 1388 aa, unidentified
  REGION 1..1388: note = Description of Unknown: Cas Enzyme sequence
MDYYIGLDMGTNSVGWAVTDPQYRLLRRKGKDMWGIREFDEAEPAAERRTYRIRRRARQRSRVRIGLLKEIFHDAIMEEDPNFYARMENSFYKAEDKDSGLSTVDGIFADEDYHDADYYGEYPTIFHLKYDLISDRVPRDNRYARKVYLALHNDFKHRGHFLNESLSGTGEGGKDVWQAYLELSDILEQELEVVLPTDAALASDFRSVFSDEKLSRTGKRERLQELLSVTKKDSPQAFLVLAAICGLKIDFGKLLSLETEEKAELDFSSAGFEETVIYTIVGDSHAGLVEAMKQVYDAGVLVGLMSGTDMEGNPIQWLSQARVNSYEKHKKDLHLLKKCIYKYCGAGEYDYLFREDVDDSYSAYVGSVAGRQKARRGERLHGSKAGERYNNLKKRLKKDLAGHEDDVDVKYILEELERETFLPKQLTFANGVIPNQLHEREVRKILENASVTLPFLSEVGADGISNQEKIIRLFTFRLPYFIGPVSRNIGREDYKGNGWAVRREGSENDVVYPWNIENVIDYDATRAEFITRMVRECSYLAGEKVLPKESMEYQAFMVLNTINNIRINGEKISCALKQDIYHDVFEKKGGRITKKKILEYLNHRGIAVEEKELSGIDTTIGCQLSTYQRFHGVFGENMAKDSVRHMVEDIVFKGTVYGESKAMLKEMLQSTYEDMLTEQQLKRVLGFKYRDWGNLSKAFLELEGCNCETGEAISLIRALWEDEDNLNMMELLHSEKYTFSEVLKEKHQSCMKPMTEFTYQDLDEMYFSAPVKRMIWQTLLLIREITEVLGCYPKKIFVEMTRTEEEKKGDAGRKDSREKELLNLYKFIKDDRSWDEEIREAGSSGRLRSKKLYLYYKQMGRDMYTGLPIDLQELFDDNKYDIDHIYPRHYVKDDSIHNNLVLVDKRKNSRKSDNYPLDEDIRKKETPLWNMLHEKGFLNDEKYRRLTGSRSFTEEQKADFIARQLVETGQATKGVNDLLKEILPEGTRLVYSKAGNVSDFRRDFGFYKSRIINDFHHAHDAYLNIVVGNVYDTKFTTNPLNFIKNERTGYHMGKMFDRDVVRNGYMAWQAPIRDDVTGEVVDAKESLTMVRTMLAKNTPLMTRLTRPQQGKLSEATIYCATDAKEGSYLPLKSKNDRKREDVTKYGGLKSIQNAYCFLVEHEVVEGKGKNKGKTIKVRTLEYLPIYKRAEVEGSADGLLNYCLELGLKNPSIRLKKINPKSLMVVNGFPVCLAGKNQSQFSMENACNLILQPQWTEYIHFIDKSNRICRLSQEITAEKNLMLYDELVKKHTEGIFAKRPNPIGEKLKKDREKFMELSAERQILVLTEILKLSSIGSISSSGANLKDIGESPSTGTIKLNRNISKLEQCKLVHTSVTGLFEKEVDLLTV

SEQ ID NO: 4449 - protein, 1382 aa, unidentified
  REGION 1..1382: note = Description of Unknown: Cas Enzyme sequence
MEYYIGLDMGTNSVGWAVTDPQYHLIRRKGKDMWGIREFDAAESAADRRTHRVSRRSKQRSQVRIGLLKEIFEDALAKEDADFLVRMDNSFYKAEDKDSILDTLDAVFADKDYKDADYYREYPTVFHLKYALIKDEVPHDGRYARKVYLALLNYFKRRGHFLNEGLSGEDEGCEDVWTAFVQLCNVVYDDLELSIIHDDALAERFRAVFCDSSLPRSGKREHLMELLGMYKKDNPKAFMILGAICGLKTDLLKLFEIESEQKADIDFSSAGVEEQLPEIYSVIGESYVDLLDAIKLVYDAGVLAGIMSGTDYEGNTIKWLSQSRVNSYEKHKRDLKLLKSCIKKYCDQDEYDHLFRQDEDGSYSAYVHSVNSGNKVRRGDRLHASKSGERYTNLKKRIKKDLEAYSDNEDVAYILRELDAESFLPKQLTFANGVIPNQLHEREMRRILENASQYLAFLNDKDESGQTNSEKIISLFTFRVPYFIGPISQNYKGNGWAVRKTGMEHTAVYPWNIEQVIDYDNTRKEFITRMVRECSYIAEEKVLPKESMEYQAFMVLNTINNIKVRNEKISCALKQDIYHELFEKNGKITKKRIVTYLNQRGIAASENEVSGIDTTIGCQLSTYRRFNGVLGNDLSKDSVRHMVEDIVFHGTVYGESKTMLHALITENYGDRLSADQMNRIFGFKYRDWGNLSKEFLELEGCNKETGEVTSLIRALWEDEDNLNLMELLHSDKYTFEESLKDKHQNSLKTLTEFTYEDLDSMYFSAPVKRMIWQTLLIIKEVTDILGCPPKKIFVEMTRTEEEKKGDAGRKDSREKELLELYKSIQGDRSWDDEIRDAGTSGKLRSKKLYLYYKQMGKDMYTGLPIDLAELFDDNKYDIDHIYPRHFVKDDSIHNNLVLVDKRKNSRKSDTYPIDSDIRNNAKMAAYWKMLHEKKFINDEKYRRLTGTRSFTEEQKADFIARQLVETSQATKGVNDLLKEIMPEGTTLVYCKAGNVHDFRRDFGFYKSRTINDFHHAHDAYLNIVVGSVYDTKFTSNPLNFIRKEKQEYHLGNIFKRDVVRNGYIAWKAPIYDKQTKEMLEPGESLAIVRQMLARNTPLLTRLSTTQHGAIADATIYSASKAKAEGYLPVKSSTDPKLMDVTKYGGFNSIKIAYYFLVEHEVDGKGKDKGKMVKIRTLESLPVYKRAYVESHEDGLYQYCLELGLRKPSVRVKKIKPQSLIKVDGFPLYITGKKPVQFIVRNACNMVLDSYWNRYIHAIEKCNSVDYMPELITIEDNIRLYDELQKKHKYGIYAKRQNPVGDTLESGRMDFVNLDISKQVYVLSQILNLSLICNSANANLKDIGSSKTGEMSINKKVSQYHECKLINYSVTGLYKKEVDLLTV

SEQ ID NO: 4450 - protein, 1364 aa, unidentified
  REGION 1..1364: note = Description of Unknown: Cas Enzyme sequence
MKTQKNQKYYLGLDMGTSSVGWAVTDSDYRLIRKKGKDMWGIREFDEAVAAAERRSHRTSRRRRQREVARIGLLKSYFADAVLAVDENFFTRLENSKYFLEDKDENLSSSNGIFDDENYKDKDYYREYPTIFHLRKALLDLDQSGRTFDVRLVYLALLNMFKHRGHFLLSTTEDGLDAVQIGLVYEELLLQLNEEYGIGINSKPVEQMIEIIGDKEIGRKLKYEKMIQLFTVEKNNKKANEFLKCMCGLTVNANTFLEPDSEEKITVCFHDFSYADKIPELMEQLGDNKYAVLEQMKTIYDYAVLAGIQKGYDYLSLARVESYEKHYKDLRLLKGLYRKYKTQEEYDRMFRSEEDGTYSAYVNTSNSTDAITGERKSRRNRKGRKADDLYARIKKDFKNYTEDEEVQYVFNQIEKEQFLTKQLTGENGIIPNQVHKKEMAKILENAEKYLPFLQKKDESGLTISERVLRLFSFQIPYYVGPLGKNCKTGWAVRREEGDVLPWNIQDKIDMQATSEAFIRNLIRECTYIAGEKVLPKSSLAYEKYSVLNEINNIKIDGERIEPKLKQQIFQECFCKGKKVSRKQLCNYLVVQGIIQSADQVTGIDITINNSLASYGKMYAIFGEKLKEDRYIKIAEDIIYWGTIFADSKEMFRQHLLGYVKEGTLTEADSKRILGYKFKDWGRFSRALLELQGCDKSTGEVISLGNAMWEYSLNFMELIHSDCFTFKEALAEKRAKIQTLLSEFEYDDLKDYYFSAPVKRMIWQTILVVREIESVMECAPEKVFVEMTRNDDEKGDRGRKASRGSQLLEIYKNIKNTETHNWKEEISAADGNGRLKSKKLYLYYTQMGRDMYTGEEIDLNRLFDDNLYDIDHIYPRHYVKDDSIVNNLVLVNKSANEHLKKDIYPIPEKITSNSKVRELWEMLHGHKLISDEKYSRLVSKTAFTEKQMGDFIARQLVETGQGTKGVAELLQQLMPDTRIVYAKASNVSEFRNKNGFVKSRLVNEFHHANDAYLNIVVGNVYDVKFTQNPWNFIEKEYAKDKKKNHYNLDKMFAWDVVRGEEVAWIAKNGAQEGTIDTVRKMLWKNTPLMTRMSFEQHGEIANATLYSAKKAKAENYIPLKKDSRMADVTKYGGYTSVTITYYFVVEHREGKKKVISIEGLPLYCKEKVEKTENGLEKYCIEQLGYENVRILYRKLKIQSLLEVDGYRMYLSGKTGNQLTMRNAVNLTLPQKDISYIKKIEKYVETTQMDEILCEAENIKLYDTLKEKHVLAIYSKRPNAVGEKLQKAREKFESLCVEDQCKVLYQIVQLSKIGLASADLTLIGESAHTGVALISKNIKQPEKINLIDQSVTGVYERKRALTELEV

SEQ ID NO: 4451 - protein, 1364 aa, unidentified
  REGION 1..1364: note = Description of Unknown: Cas Enzyme sequence
MGKDYYLGLDMGTSSVGWAVTDSQYNLLRRKGKDLWGIREFEEAKTSVDRRTNRVSRRAHQRHKIRMAYVRNYFADAINEVDPSFYQRLDNSKYHIEDKDEEVRYKNALFNDVDFDDKSYYEKYPTIYHLRVDLMDNHNAHDVRLVYLAIANMFKHRGHFLNESVSSEDDGISDGLLYSQFVELADSLLNISFKEDTSEDIMTVLSDRKLTKTAKYEKIKDICGIDKSEKKNLECIKAICGRSFSPKVLFEMEDIELKSITFDDFSYDEKEDEYESEVGSDNFQVIEILKQLYDKGVLSGILKGNRSLSHARVAEYYKHHEDLMLLKKVYRKHLSQEEYDSMFRSEEDGSYSAYVNSDNSSRSGENGKSYRRSYSKRNRDDLYKRINEDLKDYSDDKDVQYILGEIKESVFLPKQLTAGNGIIPNQVHAREMKVILDNASKYLDFLNAKDESGLTVSERILQLFSFHLPYYIGPVSENSKKYGGNGWVVRKEDGPVLPWNIDEKIDVAKTSEGFIKRLIRECTYISGEKVLPKNSLIYEKYRVLNEINNIRVRGERITVGLKQDIYNELFLRGKRVTRKQLLKYINGRMPDQISDNDLTGVDNTIANSLSTYGKFYSIFGEKMKTDEYKSMCEDIVYWSTVYGDARNLLDERIVEINEKHNNVMDSDTIKRIRGFKFKDWGRFSRRFLEMNGCDISTGEIKSVIRALWETNYNLMELINSEEFTYKKELEDKKKRAVSCLNEFKAEDLDEYYFSAPVKRMIWQTLLVIKELEHVMGCPPKRVFIEMTRSEEEKGDKGRKDSRQKQLIELYQNIKDEDAQWISEIKARGESGELRSKKLYLYYLQMGKCVYTGNPIDLDELMSNSNNKYDIDHIYPRHFVKDDNILNNLVLVEKESNAYKSDRYPIEKVEPKAYELWKALRTNNLMSEEKYKRLTCRKEFTEEQKAGFIARQLVETSQGTKGVAELLKSLMPEPYTKVVYAKGSNVSSFRHKFKLLKSRSVNDFHHAQDAYLNIVVGNVYFTKFTQNPMNFIKKEYALDKEKNNYHLGKMFDKKVERNGEIAWIPSKNDDEQSGTIITVKKMMAKNTPLLTRMNFEQTGAIANATLYSAKKASSKNYIPFKSSDEKMRDVTKYGGFGTVKGAYFFLVEHEVKKKRVRTLEIVPLYLKDEIENNKDGLLDYCVKNLKLANPTIKVKKIKYQSLCQINGYRVHITGKSDNNILLRNATSLFLNQDWVNYIHDIDKYVESHIKNNTLNSESNIKLYDVITKRYVSGVFNNRPNNIAKTLVDGRDEFIHLSEEEQVICLSQIIKSSEIGFGITNLTLIKGKSTAGKIRKSKNITKEDEFLLINQSVTGLYENTIDLKTV

SEQ ID NO: 4452 - protein, 1382 aa, unidentified
  REGION 1..1382: note = Description of Unknown: Cas Enzyme sequence
MEYYMGLDMGTNSVGWAVTDQQYNLIRRKGKDMWGIREFDRAEAAAERRLHRVSRRSNQRSRVRIGLLKEIFSEALKSEDENFLPRLDNSFYKVEDKDGCLATVDSIFADRDYRDADYYKDYPTIFHLKYDLIMDRVPDDGRYARKVYLALLNYFKRRGHFLNESLSGSDENGKDVWTAYTELCDSVYEELEISLNHDSSLSEDFRAVFCDASISRSGKRERLMELLGVTKKNVQQYLILSAVCGLKTDLLKLFSIESEQKADLDFSSSGMENRLPEIYSVIGESFIDIIDALKQVYDAGVLAGIMSGTDEEGNTIKWLSQARVSSYVKHKKDLKILKECIRKYCDEAEYDHLFRENEDDSYSAYVGSVNSGRVVRRGENLYASKSGERYTNLKKRIKKDLADYQEDENVKYIFSELDTETFLPKQLTFANGVIPNQLHEREVRKILDNASKYLPFLNEKDESGLTNSEKIVSLFTFRVPYFIGPVSQNYKGNGWAVRKSGMETEAVYPWNIEDVIDYDKTREKFIVNMVRECSYIAGEKVLPKESMEYQAFMVLNTINNIKVRNEKISCALKQDIYHDVFEKNGRVTKNKILRYLNNRGIAVLESELSGIDTVIGCQLSAYRRFYGVLGDELSKDSVRHMVEDIIFKGTVYSDSKEMVREMIVKQYGDILSPEQIKRIMGFKFRDWGNLSKQFLELEGYNKQTGEIMSLIRALWEDEDNLNLMELLHSDKYTFEESLKEKHQKVLKPIMEFTYNDLDEMYFSAPVKRMIWQTLLIIREVTEVMGCPPKKLFVEMTRSEEEIKGDAGRKDSREKELLELYKKIKEDRSWDDEIKEAGLSGRLRSKKLYLYYKQKGRDMYTGLPIDLGELFDDNKYDIDHIYPRHYVKDDSIHNNLVLVDKRKNSRKSDNYPIDADIRGDEKIAAYWRMLHQNGFMNDEKYRRLTGNKPFTEEQQAEFIARQLVETSQATKGVNDLLKEIMPEGTTLVYSKARNVSDFRRDFNFYKSRMINDFHHAHDAYFNIVVGNVYYTKFTLSPMNFVKKERGRYNLGRMFESDVVRNGYTAWDAPVKDKVTGEIIEPGETLAAVQRVMSKNTPLLTRLSTTQHGAISDATIYSASKAKEEGFIPVKSSNDPKLKDVTKYGGFNSIKIAYYFLVEHEVAGKGKDKGKSVRIRTIECLPVYKRSFVESHEDGLHQYCLELGLKNPSVRVKMIKPQSLIKVDGFSLYITGKTNNQYVVRNACNLILNSYWDRYIHLIEKYKKSDRMSEEISTDDNLRLYDELVSKHKAGIYSKRPNPIGTTLENGRDKFIDLEIDKQVNILVQILNLSLICNSASADLKEIGGSSKTGVTLISKKVSGYSEFKLINYSVTGLYKKEVDLLTI

SEQ ID NO: 4453 - protein, 901 aa, unidentified
  REGION 1..901: note = Description of Unknown: Cas Enzyme sequence
YFIGPVSQNYKGNGWAVRKSGMEKQTVYPWNIEDVIDYNDTREAFIKNMVRECSYIAGEKVLPKESLEYQAFMVLNTINNIRVKGEKIPCALKQDIYHDIFEKNGKVTKKKILIYLNQRGIEAEENELDGIDTVIGCQLSTYRRFYGVLGDDLNKDSVRHMVEDIVFKGTVYGDSKKMFESLITEKYGTSLTPEQVKRIMGFKYRDWGNLSKEFLELEGCNKQTGEVMSLIRAMWEDEDNLNLMELLHSDKYTFEESLKEKHQKSLKTITEFTYKDLEDMYFSAPVKRMIWQTLQIIREVMEILGCPPKKVFVEMTRSEEEKKGDAGRKDSREKELLELYKQIKDGGNWDEKIREAGASGKLRSKKMYLYYKQMGRDMYTGLPIDLQELFDDNKYDIDHIYPRHFVKDDSIHNNLVLVDKRKNSRKSDNYPIDESIRANEKIASYWRMLHEKGFINDEKYRRLTGSRPFTEEQKADFIARQLVETSQATKGVNDLLKELLPEETTLVYSKAGNVHKFREDFGFYKSRTINDYHHAHDAYLNIVVGNVYYTKFTLSPMNFIKKEKKDYNLGRMFERDVERNGYFAWRAQKFDKGTKTTAEQGESLATVKKMLAKNTPILTRLSTTQHGAISDATIYSASKAKAEGFLPVKGSNPKLADVTKYGGFNSIKNTYYFLVEHEVEGKGKDKGKMVKVRTLECLPVYKRAYVESHEDGLYQYCLELGLKNPSVRVKKIKPQSLIKVDGFPLYITGKTGNQFVVRNACNLVLEPHWTHYIHTIDKCNLSGQMSKEISAEENVRLYDELQKKHTSGIYAKRPNPIGDVLERGREKFVGLSTERQVYVLTQILNLSLICNSASADLKEIGGSAKTGVTLISKKVSGYKDFKLINNSITGMYEKEVDLLTV

SEQ ID NO: 4454 - protein, 1333 aa, unidentified
  REGION 1..1333: note = Description of Unknown: Cas Enzyme sequence
MEKFYLGMDIGTNSVGMACTDENYRLLRACGKDCWAVRLFDESQTAAERRVSRTARRRLARRKQRLGFLQTLFAPYIADKTFFIRLNNSQFLSEDKDERLKKDINTLFADDGFTDKDYHKKYPTIYHLRKALMTEDISDMRLYYLALHHIVKYRGHFLFEGSMADIRDMTKLIFDLNAACADVFFEDAPSFNVSVCGQAKALLMSVERNKNAKLEDIFGLHDKRAKEIIKGICGYSVKPSTLFSERYKEEKSFSFKDLTDETFDGMQAVYGDDFALLTAIRAIYNYITFEKILEGQADISSAMVNIYEKHKRDLKKLKDFLLENATREEYNRFFKSVEEGANYVNYIGYTKKGGDKKKVKHCKDEEFFAYVKKFILSLKGVKDEIAAAEFISEAENGALLPKILHADNGLFPHQINEDELNKIVANMVRNCPETDEISEKIAPVFLFRIPYYVGPLTGKNSWAVREKDKITPWNFNQVVDLAKSNEAFMRQMTNKCSILHGEDVLPKASIYYQRYNVLNQINKLKKNDVPIDVETKQKIFNELFLTRRKVTDNAIKDVLVRSGLISEAEKKQVTISGKDGELSASMSSYIQLKTILGDFVDQDLLCGGEVCEKIILWHTLNTDKNIVVELINKNYGHIPQIKSNIKALKGLVFKDFGRLSKKLLTGLCFTDNQTGQVYSVLDLLYETNKNLNEILFDKDYGFEDMIREENGENDTKVDYEDVAKLYVSPSVRRGIWQSLKMADEYVERIGKAPDKIFIEVTREEGKKGDAGRTVSRQKQLLEKYKGIEGISELDAELKEKTDLQLRQERLYLYFRQLGKCMYSGERIDLELLNTNRYDVDHILPRTYVKDDSLDNKVLVLRVKNAQKSDQYPIPFSLVTDEARNHWAVLRAKGLISETTLNRLTRTEPLTENDFNDFINRQKTITDQTVKAVAELLSRKYPTAKIVYSKAKNVSDFRQKFDLFKCRETNDLHHARDAYLNVVVGNVFDTCFSTPFATYYKDGDKWREYNLKTMFARNVKGAWVQDNAQSISIVKRTVQKTSMAVTRYAYRNKGGFYDQTVYGKHDASITAPRKENGPLADHTKYGGYKSQKTAYFAIVQSNDKKGRTIKTIEAVPIMIDYQSVNNPDRLSGYFATYLNEPTVIVPKIKVKQLIKFNGTLCFMAGITGSSIILHNAVELFTDNKTDEYLKEVVKLVNSAKSGSIDTTLAEYVMKTNKDGVIKLVIDSERNVSVFNLLIDKLRSSRYTGVGAAITFCKTLIAGAENFKALKTFDQAVVLLQILRFFKCNAELSDLSLIGGPRFIGVLRVNKNITEIDFRIVHQSPCGLFECEQKV

SEQ ID NO: 4455 - protein, 1350 aa, unidentified
  REGION 1..1350: note = Description of Unknown: Cas Enzyme sequence
MANVKYYLGLDMGTNSVGWAVTDENYKILRAKGKDMWGMREFDEAKPADERRTNRISRRRTMRSKARIGLLNNYFEDEIAKIDPSFLQRLANSKYHLEDKDEAVRYKYAIFNDKNYTDKDYFKEYPTIFHLRSELIHNESPHDVRLIYLAVLNMFKHRGHFLANGIDTTNDVRGIEDAYYGFVSNANEICELNFPEENVDLNKFKTILADRKLSRSQKVDELSELLAIGKKEKDFVKAICGLKFDINKIFELGIEDKSVKTSFAFSDSNYDENESEILGLAGDDYSDIILSLKELYNIGTLEVIMRGSSYLSDARIKDYEQHHEDLKILKRVVKTYCPKEYHKMFRSEDSGTYAAYVNSTNSGKKTRRNYKSRTTEELYKSIKAILKSAPADDEDVIYITEHIERENFLPKQLTPSNGVIPNQVHEREMRKILDNAGKYLPFLTQKGESGNTIADEILAIFTFTIPYFVGPTSESSKKYGGNGWVIRKEEGKILPWNINDKIDMDKTNEAFIEKMVRRCTYISGEIVLPKSSLLYEKYCVLNEINNMRIDGERINSELKQDIYTELYEKGSKVTRKKLENYLVSRGIITDKMQISGIDENLNNYLSSYGKMKGVFGEHIKEDKCRDMCENIIFLATIYGDNRKYLRGRLMKEFPELSDEQIKRILGLKFSDWSRLSKEFLLLRACDKSTGEEISLIDAMWNSTHNMIELINSDDYTFRDELENLQKSSMGVLSDFKFEDLDAYYFSAPVKRMVWQAIKIVKEIEGIMGCAPAKLFVEMTRSEGEKKRTVSRKNKFLDLYKSIKDESHDWNDIITKADEDGTLRSKKMYLYLTQQGRCMYTGRHIELDKLFDNNLYDIDHIYPRHFVKDDNIENNLVLVEKEKNAHKSDVYPIEEAIFKSQIGMWKELCNKGFISKTKYSRLISRQPLTDEQKAGFIARQLVETSQATKGVNTILKELLKENTTIVYSKASNVSEFRQKYEIPKSRLVNDFHHANDAYLNIVVGNVYFTKFTQNPIRFIKNEYNKDPDKFNYHLTNMYAHNVERNGETAWVASSDDTKGTISTVKKQLSKNTPILTRMTFENHGGITRKQTIWSSKITKQDVYFPVKSSDKRMADVTKYGGMSDIATAYFFLVEHDVKKKRVRTLETVPVYLSKRIEKDSSLLEQYCMQNLKLVNPDIRVRKINIQSLIKKDGYYLNISGTTGNRITVRNAVGMCLGQKWNGYIKKIEKYVAQEIADDVLTIEKNNELYDEILSKHKNTIFANKPNPSFETIEKGKEKFLHLDLYGQINALYQVLSLTAIGFGRADLTLIGGSKTSGLMLMPSLISGFKELVLIEQSVTGLYERCIDLLTV

SEQ ID NO: 4456 - protein, 1324 aa, unidentified
  REGION 1..1324: note = Description of Unknown: Cas Enzyme sequence
KVEEIMKQNGNNKVKKEYYIGLDVGTNSVGWAVADKDYNVKRFHGKDMWGARLFDEAEDASARRAARTNRRRIARRNWRLRLLEELFAEEITKTDRYFFNRLHESSLVLDDKSEEGSVYSLFADAKFTDKDYMKKYPTIYHLRHELIHSSEPHDARLVFLALHHLIKSRGHFLYESSGDGSGKTLDQALEDLTSELESNDISFCPEDKNALIEVLKNDETLTAKKSEMKQAYGTVLEESEDLDIGVLLEMLTGAKVQLAKLFKDESLKDADTSSLSLKEDFEEKLDELGDTLGTRLDIILAAKSVYDVARLSKILGNNVYISDAKIELYNKNRKDIAFLKKYIKKHNPDKYKDVFNVRKGSKNFAAYMRYKTDEKCTQEDFCSFIKPYIESMKASADENEKRIYQEVSDKSFLTKLKGTDNGLIPYQIQLKELDAILANASSYLLFLNETDEYNQTVKDKIRSIFTFRIPYFVGPLNRKSPNSWVERTDEKIVPWNFKEVVDEEASANAFMENLIGRCTYTGEPVLPLNSLLYSKFMVLNEINPIKINGQPLPVDVKQKMFEDLFVLSKKKVRKKTIINYLLSCGCISKDDEVSGVDDEIKSNLKPYHDFRQILENTKDERMVEDIIKSIIVFSDNKKMLENWLKKNTHDLSSNDIKYIMRLKYTGWARLSRQFLTGIYSVDENGECFSIMDLMWNTNNNLMQLLSDSFSFRTNAEAYKNEHNPSGETIRDRLDDLYIAPAVRRSIWQTVKIVDELVDIEKGAPAKIFIEMARGSAEEMKKKRTESRKMKLLALYQSCKKQEKELYEKLENETDQSLRRDKLFLYYLQMGKCMYSGENIDLDKLLHDNETYDIDHIFPRSRIKDDSLNNRVLVKSELNREKTNKYPIEDNIRNKMHDFWSMLHDKELISDVKYERLIRHYPLTEEELTSFVARQLIITQQSTKALADTLAYLYPNTKIVYSKAGNVSDFRQEFKFIKCREINDLHHAKDAYLNIVVGNVYDTKFTEKFMKNIQSENYSLNRVFDFNTPDAWNKDGSSISTVKKYMKKNTPIVTFMPSEYKGKLSNLTILPKKNGQLQIKKGKEINKYGGYGEVFQAYSCVVEHTDKEKRIRTIEPVYYYCKEDYEKNPTKYCVEILGLKDPSVICSRLLPNCVLEMDGIRFSITARSNDTLWCKHLYQFAVDDEHAKYIKELKKYIERNKNRFTGDEAKEFINKDDNEALYMWFIDRIERSVYRSVKGIVNIQKALEENSEKFKDLSLYDQAFILLEILNAFKCNSTWTNLKLLNNKKSVGIITTTKKISTRKMVYLIHQSVTGLFEKRENLLE

SEQ ID NO: 4457 - protein, 1320 aa, unidentified
  REGION 1..1320: note = Description of Unknown: Cas Enzyme sequence
MKKNGNDKKLGSYYIGLDVGTDSVGWAVTDHEYNVLRFKGKSMWGARLFEAANDASERRAARTSRRRLNRRKQRILILEELFAKEILKNDPNFFVRLHESNLWQEDRTDTGCNYVLFNDPDYTDKDYLRKYPTVYHLREDLIHNAQPHDPRLVFLALHHIFKSRGHFLYEGSENSEEGKTLEESFNDLQLYLSDYDISFAPGDMNSFIQALSDDSPITVKKKKLAAAYGGTEQTEEGIDVASVVELLSGATVKLSKLYGDDSLKNTDVTSVSLKDDIDAKYDQLAEALDDDRLELILSAKELFDIARLRQFLGENRYLSEAKVELYEKNRRDLKILKKYIRKNRPQDYRDIFNVKDGVKNYAAYSRYKTKNRCTQEEFCSFLKGKTEGMKNSDDPDEKRIYEEINAKTFLPRLKGSDNGVIPYQLHLKELKAILNNAETYLPFLKEKDKDGITVKEKLISTYTFRIPYFVGPLNPKAKHSWVVRSDEKIYPWNFTKVVDEEKSAQEFMDNLIGRCTYTKEPVLPMNSLLYSEYKVLNELNPMMINGQPVPADVKNKVYEDLFVNSNRKVTKKSIFKYLLANGYVTEQDQLSGIDDTIKSNLKSYHDFKDILAKTKDYEQTERIIRSMVVFSSDKKMLRKWLDKNTHGLSEEDKKKIVRLNYKEWGNLSKEFLTDIYSQDENGEVMNIIEKLRSSNLNLMKLLSKDFEYRDQVNKYLADHGYVSDSIHTYLDELYIAPAVKRSIWQTLRIVDEIVDIQKCAPEKIFIEMARPDAKTVKKERTESRKDALLKMYKSCGEQVRDLQEKLEHETDQSLRRDKLYLYYTQMGKCMYTGETIDLEKMLKDNTTYDIDHIYPRSRIKDDSLTNRVLVKSSVNREKTNVYPISEEIRSKMYSFWTLLKEKKLISEEKYRRLTRTYELTPDELASFVARQITVTQQSTKALAQTLEHLYGNTRIVYSKAGNVSDFRHKYGFVKMREVNDLHHAKDAYLNVVVGNVYDTKFTARFFDNIAKEIYSLNKVFDFNTPGAWNKDGSTLANVRKYMAKNNPIVTFMPVIVKGAISDLQIMPKGKGQLPVKQGRAVEKYGGYNKISGAYFAVIEHQKGKKTLRTIVPVFIHDEEKYRKDPVAYFESYGFKNPRVIAARIPINSVLAINGERLYITGRSSDQILFKHSYQLAIDDEHVQYLKDVKKYVDRCKAQKKELDITERDGITGEKNVMMYDWFTSKIQMAVYKPLFGSMIADMLKFRDKYMGLKEMSQCNLLLEILKAFKCDRQCPNFKELSGKGTVGIVRYVNNIQGNETVFLINQSVTGLYEYKVDLLK

SEQ ID NO: 4458 - protein, 1363 aa, unidentified
  REGION 1..1363: note = Description of Unknown: Cas Enzyme sequence
  MOD_RES 709..713: note = Any amino acid
MEKQKYYLGLDMGTSSVGWAVTNSSYELIRKKGKDMWGVREFDPANTAAERRFHRADRRRRQRQVAWLGLLKEYFGKEIEKIDENFFVRLENSKYYAEDKDQRLLSKNGIFNDANYKDADYYSQYPTIFHLRKDLLDIDNTGKIFDVRLVYLALANMFKHRGHFLLSTNDDALNMAQVDAIYQDVLEKLSDDYGIRLEVKPIQDVIAIVGDYEIGRKRKQELMMELFDITRAKKSAVEFLKCMCGLSVNVRTIFDEEVKDKVSLCFHDFSYADKIPELMDQLTETEYSIIEQMKRIYDYAILSGTLKGYDYLSCARVDAYDKHCQDLKKLKALYRKYKTKEDYNKMFRSEIEGTYSAYVNSFNSEDTFTESGKYRRNMKGRKADDLYSTIKKGFKDYVEDKDVQYVLDQIDKENFLPKQLTGANGIIPNQIHRKEMEKILENAEMYLPFLKEKDESGLTVSERILRLFTFQIPYYVGPVGKNSKTGWVVRRENGSILPWNIEEKIDMRATSEAFIENLIRSCTYITGEKVMPKSSLAYERYCVLNEINNICIGGERLKPELKQQIYKECFEKGKRITKKQLCTYLVTQGIITSEEQITGIDVSINNALSSYGKMYAIFGERIKEEHIQEIAEDIIYWGTIFSDSKKMFRQHLDKYVEQGILTEKKVKRILGYKFQDWGKFSKALLSLQGREKSTGEMMSLENAMWKYSXXXXXNFMELINSDSFTFKDALVEKKTTVMKSLSEFRYEDMEECYFSMPVKRMIWQTILVVKEIEKIMGYAPARIFVEMTRSDEEKGDNGRKVSRGMQLLERYETIKNTESHDWKTEITEADNSGQLRNRKLFLYYMQMGRDMYTGEEIDRAKLFDNNLYDIDHIYPKHYVKDDSIINNLVLVNKQANEHIKGDLYPIPEQIAFDTKVCALWDILHKQGLISDEKYNRLISRTPFTEKQLGDFLARQLVETSQGTKGVSGLLQQMLKDTEIVYAKATNVSEFRQKNGFPKSRLVNDFHHAQDAYLNIVVGNVYYTKFTKNPWNFIREDYAQDREKNHYNMSRMFDWDVVRGNEIAWIAEGNGKIGTIEMVRKMMSKNSALLTRMNFEQHGKFAKETLYSAKKAKPENYIPLKTVDMQMRDVTKYGGFTAVTIAYYFIVQHVERKKVIVTIEGVPLYCKARIECQPNGLETYCKEELGYEDVQILCHKLKIQSLLEINGYRVHLSGKAGKGQLGLRNAVNLCLQTAWIKYIKNLEKVINEKRLNKMISIEKNIELYDVLVDKHLHTIFAKRPNSYGNKLVKDRENFVRLTIENQCVALLRILQLTKIGITETNLSLIGESPHAGKMTMSKQIKKEDHFCVIYQSPTGLYERKEYFS

SEQ ID NO: 4459 - protein, 1330 aa, unidentified
  REGION 1..1330: note = Description of Unknown: Cas Enzyme sequence
MNKPYYIGLDLGSSSIGWAVIDSEYKLISKSGKKLWGVRLFDSAKTAAERRQFRRQRRTINKRHWRLYLLKQELKDFVLKEDPNFYQRIKDSQLKPEDKKYSKYTLFDNSYTDIQYHREFPTIYHLREALKSEVKVRKYLNEGRYYRLLFLALNDILKNRGHFLLNDINTNINVNSSNIKEDLKAFITNLNDRFEEALIDISEFNEVYKEYEAKNFNTRKNNLSTILLKAVLGYKFNLYAFTQNETKEKLELSFEDTSWEDKLPNNDDLVNIAKSLYDIYSKIKLNEIIGVSNSISEAKISIYEKHKADLAKLKADLKEIDSLLSTDYYNQFFRINNESEKEPYSYTNYVGKLLDGKSKLRVPKKTKYDSFIKKLNSIKEEVHKKGYTTLLSNIGEKGYLEIPSGSMNRVIPYQLHFDELKQILEVFIKITPSNKAKEIADRIQKIMKFKVDYYVGTLSGMNSDNHWIVRNPGYEDVKITPFNYDIVINKQRTNEEFIKRMLRKCTYLVNEDCVQQETILYQTYIFYNIINKLKINDQYLTSDQKKKLYDVMISGKKSSLSQKTIRLVLGLSNTDHISGFSKDTEKPIEMSLSSLNRFIEIFPGYFDNPFYVDFFDAVINSISLIDETEKELRMNRIKELISTQNVVKVTDEQLEKLAKLTSKKWGNLSRKFLQELKFATKDGEVGSMIDLLKNTNYNLMEILYGDEERNFKQIDQENGEADNFDSNHLNEYLKHKYVAPQARRTIIQANHIIDEIVHIMGYKPSAISIEFTRESKDKKEESKSRYTKLKELYKNIKDESFILAKERLLKYENQNDELKAKKIYLYFLQAGKDLYTGKPIDFDRLMLTDSGYDIDHIYPQSKIKDDSFDNLVLTEKVINGEKGNHYPLPEEVRKERALLWKTLQSHKFISDSKYHRLTRATPLTEEELNDFVSRQKTTLDWMNKEFAEILMRKFNESRESGFIIYSKSRHAAAIRQKFDLIKVRELNNLHHAHDAYLNIVSGLIIKHNLNTKYFKDTLNWEKILEVKIEPNIEYIKEIFNYNDVFVTKKHEIKVTGPYWDQQMVKASKNLLNSKNHLDASKYGGFSSAKIAFFSIIKDKKGKKKILPVRTVDCTKYIKDKKVDVYELITDKYPEYEIVYPFVPINQLVEIGEEKHFIRMRVAGKTNNNVTYHNTTEFNVSHDMKEIIRKVFKIKKSNLKTDTDKINEMIQLDLTNDNLLKVFMFIRQKVLYLGSKDLYTANTFKRLENEDLINEFNELNMLKKIDVIVNIFNKLLRSNNSNKGRLFDTTESYNDYAKPLNINYNFRLINESYTGFYTKVIEVHNVSDGSN

SEQ ID NO: 4460 - protein, 1373 aa, unidentified
  REGION 1..1373: note = Description of Unknown: Cas Enzyme sequence
MMGEYYLGLDVGTNSVGYAVTDKKYKLLKFKGEPMWGSHVFEEGKNRDQRRGFRTARRRLARRRQRINWVQEIFAPEIGKIYERFFIRIKESMLWRDDVPVTDRYILFCDTKYTDKEYFRKYPTIHHLLCELMESDAKHDVRLVYLAVAWLVGHRGHFLNELDKDNITAVTDFKSIYTDLCQYMKQNELVAWGMDKADLLQEVLPKKLNVTAKERDLLKILYEGNKPKDSEDDAVSMAMSVKLLAGGTVKVSKLFPQGGYDEGISLCFGDAEEKFAEAAGQIGEEVQWVMALRRLYDWALLKDVLKGEESVSAGKVKIYEQHRRDLRKLKCFIRKYVPHKYANIFRRSGKKEKNYVAYSYNVNSIKGELPEEKSTQDEFCKFLKNELKGIACRPEDADFYQDMMERLELCTFMPKQVNGENRVIPYQLYYHELKLILEKVSSYLSFLKVKDENGWTNADKILSIMSFRIPYFVGPINGNSPYAWLKRNGKEKIRPWNFEKQIDLNRSEEEFIRRMTNKCTYMPGEDVLPFNSLLYQRFMVLNEINSIKVNGELISADAKKQIFKLFEKRRRVTKKAIKECLLSNNYISSGKSEEIIISGVDDNLHSSLKSYHDFRSLMERRLLSQEQVEKIIERLTYTENRRRVHMWLSREFTNLEEQDRKYIAKLKYEEFGRLSHNFLKVLKGINKEDGRCASIIEFMWDYNENLMQLLSESKYTFAEELAKAEQEYLGEGEKSLESLMDDLRIANAVRRPIYRTLDIVKDVCKATGRAPAKIFLEMARGGGERGKRTVSRRDRIKELYSRLDKEYNEDVKHLSELLDSTSDNRLQSEVLYLYFLQLGRSMYSGEYIEIDNLKNDTLYNVDHIYPQSYVKDDSLDNKVLVTSKENGDKGDLYPIRAEIRNRMAGMWGYYKRVGLISEKKYNRLMRSTAFSDDEKMGFIQRQLVETRQSTKALATVFKMRYPKSEIIYVKAGLVSDFRHEFNMIKCRVINDLHHAKDAYLNIVVGNVYDARFNRHWFRIQDKYSLKIKTLFKYPVWAGEELVWHGGDDIGYIKGVLLKNNIHYTRYAFERKGGFFDQTIYKKGAGLIPRKADLETEKYGGFNKATASFYILARYLLQGKKVKPELILVPVTLLAAKNVQENVEKAKVYTRETIAKIIDKDSNMIGEVSFPMGLRHIKINTMFSFDGYKSCLGGKDSGGKNLLLKSMMPMLVSSEDEAYIKKLEAFCRKRLENRNLNIDERYDGINASKNIDIYNMLQNKMKSEDNCRGNKSPYGRVKIISDLYTVLENGRDSFLELELSEQANALLDILMVFQTGRGTSCDLSAVGGAKSAALYRISAKISNWKKQKMKDVRIIEQSASGLFCSKSQNLLEYV

SEQ ID NO: 4461 - protein, 1360 aa, unidentified
  REGION 1..1360: note = Description of Unknown: Cas Enzyme sequence
MGKEYYLGLDVGTNSVGYAVTDRDYRLMKFKGEPMWGSHVFDDGSNSDSRRGFRTARRRLARRKQRVELVREIFAPEIAKVDERFFIRLKEAALWRDDVAATDKHILFCDKDFTDKDYFHQYPTIHHLIYELMSSNAPHDVRLVYLAVAWLVAHRGHFLNEMKKDDVESVLRFDTIYADVRQYMRQNDMSEWQEEKADALQKLLPQRQNITAKEKALIEILYEGKKPKAADEELINLAMSVKLLAGGKVDAVKLFPQSGYDDSIKLSFSDKEENFVSAVAQLNEEAQWVLLLRRMYDWALLKDAIKDGDSVSAGKVKVYEQHRRDLRGLKSFIRKYMPKKYGEIFRRVESNNYVSYSYNVKSVKGDISKIKKATAVDFCDYLRKQVKDIKVEAVDQSFYEDMLARLEAHTFMPKQVNGENRVIPYQLYYHELVCLLNKAESYLPFLQAKDKDGVSNRDKLLSIFTFRIPYFVGPLNEKSAFSWIKRRGEGKIYPWNFAQQVDLDKSEEAFIRRMTNKCTYMPGEDVLPLNSLLYQRYMVLNEINPLKVNGRPIDVTAKQTVYELFVQKRRVTSKAIAKCLHDNGYMQKEDILSGVDKNLNASLKSYHDFRSLLEREVLTTNDVERIIERLTYSEDKRRMYNYLAQEFPQLEETDRKYVAKLKYADFGRFSKKFLMGFKGVNKKTRENATIMDFLWETNDNLMQLLAQDSYTFNAELEALRKEYYASGDQSLTEMLDDMRIANSVRRSIYRTLDIVKDVCKAQGNPPQRIFLEMARGGGEKGVRTVSRREQIQKLYKEVDKEYANDVKILSAKLASVSDNRLQSEVLYLYFLQLGRSMYSGQPINIENLKDSTLYNVDHIYPRCYVKDDSLDNKVLVTSNENGTKGDSYPIKGEIRKKMAGLWKKYLQCGLISEKKYNRLIRSTAFSDDERMGFIQRQLVETRQSTKALAEIFKKWYPDTELIYVKAGLVSDFRHEFNMLKCRSINDLHHAKDAYLNIVVGNVYHSKFNRKWFKPSDTYSLKTSTLFGREVKAAGSQIVWHGGEDIGRVQQVLQKNNIHYTKYAYKKHGELFKQQPLRKNSGLFPRKGGLDTKKYGGYTGVTTTYFLLVRYVINEKKTKPELMLLPVTLIDDFRIKNNLISDIDYVKMSIAQITGRDIGMVSDITYPVGLRPIKINGTLMIDGFRVCIAGKSGDNVILKSFMPLIASKNIENYLKKLDSFKRKWNKNNDLEVNPKYDDITYDKNSELYNWFVDKMTSNPYKKLDILAKFPELMVKNKNKFLSLSLKEQITVLLSIMSLFQIGKTSEFKYDVTLIGGDKSMPKFRKSIKLSNWKKFARDVRIMDISASGLYVSKSPNLLEFL

SEQ ID NO: 4462 - protein, 1356 aa, unidentified
  REGION 1..1356: note = Description of Unknown: Cas Enzyme sequence
MKQQEYYLGLDCGTDSVGYAVTDTEYHPLRFKGEPMMGITTFDAASLSADRRANRTNRRRLHRRQQRVQLLQEVFAQVITEVDPRFFTRLRESALWREDKSDPSDPYALFSDNGFTDKEYHKKYPTIHHLICDLMQSTQKHDVRLVYLACAWLVAHRGHFLSPVKEDNIREAVDIAIPYQTLMDWFDEVKPWDADPAAFGSVLKKRRSVRDKEKEFYALLYEGKKPSDLFSDPDDPDAFAVSRVMMLRLLCGGKVAPKDLFPYKTDKYAELSSFSLGGKEEELEEILLRLEEDGELVIRLKALYDWAVLSDVLRGETSISAAKVKTYEQHKQDLKWLKAFIKKYVPDQYDKVFTAEQEGNYPAYTDHPSDGKTGTKNASKAEFSDFLKKIVKDIPVDETDRQKYDDMIARLDANTFLPKQKDTDNRVIPYQLYAVELRDVLKHASAYLPFLSEKDENGRSAADKIAQIFRFRIPYFVGPLNRNSDRAWLSRKEGRITPWNFTEMVDLDASENAFIRNMTGHCTYLPGEPVVPANALCYAKFTVLNELNTLKINSAPITVAQKQAIYNDVFCKYKKPTVKALRNYCICEGFMPADGILSGIDIEGGIKSTLAPFFSFRNLMESGMLSEEQVERIIERITCTEDQIRLRRWIDAQFPQLSEEDRRYISRLKFKDFGRMSHRFLCELQGVNKQTGEVCTVLQAMWETNDNLMQIVESDQYTFADVIREEQREYYRGQPSSLDKRMDELYLSNAVRRPIYRTLDIVKDVVKATGHAPKKIFVEMARGGTEETKGKRTQSRRSQLLELYKNCSEAEARELAALLESKTDNELQSEKLYLYFMQLGRCMYSGKPIDLEHLNDNKYYDVDHIYPQCRVKDDSVLNNKVLVLSKYNGDKSDTYPVPSEWRQTMYGYWKMLRENNLITEEKFRRLTRATPFTDAEKYGFIDRQLVETRQSTKAITTLLQERYPDTEIVYVKAGLVSEFRHEYDLLKSRTVNDLHHAKDAYLNIVVGNIYHERFNKNYFRIDQEYSLNTRQVFGRPVYVNGTCCWKGESDLGRIKDIVRKNHIHVTRYAFCRRGQFFDQMPLKASGDGELLPRKKDLPAERYGGYRKPTASFFVLAKYFAGKKSDIMIAPVELLREKEFEKDPKVTAKEAVEKVLGKAVDRIELPIGARKLKVNTVFSVDGFRFALAGKSGGGRQLGISPLAALTIDADSEFYLKRLESFTNKKAKNKELKIQQAYDKISAEENIKIYDLFQSKLSTYPFSKRPANIFDAVEKGKERFESLPLEDQVTVLEQILLSFGRSGGGSDLKLIGGVAKAGVPMLSSALSNWKKNYTDVRIIDQSASGLFEKQSVNLSELL

SEQ ID NO: 4463 - protein, 1337 aa, unidentified
  REGION 1..1337: note = Description of Unknown: Cas Enzyme sequence
MVNKEYFVGLDIGTDSVGIAATDCAYNPLKHHGEPMMTVATFETAQTKAERRSNRTARRRSERRKQRVRLVQEIMAPAIAPIDPDFYRRIAESALWRDDKSVDQPYSLFCGDDYTDKEYHSAYPTIHHLIVDLMEDPRPHDPRLVYLACAWLVKHRGHFLSTVSEENVREIFNINVAYDALMETFGDTKPWQCDAESFGKLLKEKMRIKDKEKEMMKLLYDGKKPVNPTPDPDDPDAPALYSVEHLIKLLCGGKAAPKDIFPYKKDAYEDLESVKLSMDDDQMAPILAALDADAELIIRLKALYDWAVLNDVLDGEKMISKAKVKAYHQHERDLRTLKDFIRKYMSRDKYKEVFCDAVTGNYASYTGHADRADRRPEKRVTKEDFCKYLKTLLKDLAVENDDREKYDDMMLRIETCSFLPKQREGDNRVIPYQLYLVELDAILKNACAYVPVLREKDADGITGAEKIRSVFTFRIPYFVGPLNKNSKAAWIERKAEKITPWNFTRVVDLDASEDGFIRRMTNRCTYLPSEDVLPQNSLYYEKFCVLNEINPLKINGIPITVEQKQTIYEELFLRCSRVTVKALKQFCLRNGYMQNGDEISGIDAEGIKSSLKTHHVFRSLREKGMLNTDQIERIVERMATTEDRQRLAGWIRREFPHLPEEDVKYIAKQKLREFGRLSRRFLCEMEGVDSKETGEMFTILDALWTTNNTLMQLLSDRFDDMYVSPSVRRPIIRTLEMVQEYVKAIGCAPKKIFIEMARGATEEQKGKRTKTRREQIIEYYRKFAETEVRELSKLLENVDDNSLQSDKLFLYFLQLGKCMYSGEPIRLSDIGNNKLYDIDHIYPQSKVKDDSVLNNKVLVKTEQNRAKGDVYPIRADIRQNMCGYWKHLHDNGLVNDEKYRRLIRATPFSDNELSGFINRQLVETRQSTKVVATLLKERYPETEIVYVKAGLVSEFRQEFIMLKVRSVNDLHHAKDAYLNIVVGNVYHEKFNKKFFSLQDGYSLKTKELFKRPVFAGTDEIWRGESQIEQIRSIVGKNHIHVTRYAFCRKGALFDLQPLRADSSAELIPRKNGLPVERYGGYRKPTAAFFLPVRYRCGKKTDILITPIDLMAAERFDSDAQYRDVFTREAVEKIIGKPVDAVEYPLGMRKCKVNTVFSCDGFRMCLSGKLSGGSKLLMPPMMQLLLGPATETYVKRIESFMNKKKKNPNLVLNAAYDRITAEENNALFHVLLHKLETTVYAKRPTTAVVVKALRKGTSQFERLSPEEQVQVLCEIVSLFGRNGQGADLRLIGGVPNAGIPTLNSAVSNWKKYYSDVRIIDQSAAGLYEKQSVNLLELL

SEQ ID NO: 4464 - protein, 1353 aa, unidentified
  REGION 1..1353: note = Description of Unknown: Cas Enzyme sequence
MAVFKYYLGLDMGTNSVGWAVTDIQYNILKVKGKDLWGIREFNEASTAVERRTHRVSRRARQRKTVLIGLLKYYFHDEICKKDPYFFQRLDNSKYHLEDKDDEVKYTYNIFNDINYTDADYFKQYPTIFHLRNELIFNPNEHDIRLVYLALLNMFKHRGHFLNDSLIDDDSEMKIDEAYLELANLLSEYTEYYLKTDVNITELENILSDRDESRTKKSEKIVELLEIDSKNKPYKEMIRGLCGLKFNAITIFSDVQLEDGQKLDICLSDASFEEKADEIASILGEDYFQIILSMKRLYDIGSLSEIMKGYSYLSEARVASYKKHKEDLCCLKRVIKKYCNKECYEKIFNSDEDGSYASYVGSFNSNSKQRRVGNKRSIEDLYKEIKKILKAVPQEDADVQRILTSIDNETFLPKQLTASNGVIPNQIHEKEMKKILSNAENYLPFLKEKDEKNQTVSERILMLFTFRIPYYVGPTTENSQKNGGNGWVIRKEAGQVLPWNIEEKIDMKATSEAFISRMIRRCTYISGKPVLPRASLEYQSFCVLNAINNITIDGYRISVELKQDIYNDLFLKGKKVTKKQLCKYLYLRGLITSENQVSGIDIEINNTLSTYKIFKNIFGDDIIYDSTKIMIEDIVFWCTVYGESKKFLRERLCEKYGDKLSQDQIKRILGLKFKDWGNLSKEFLELSGVNKKTNESMSIIKALWENNLNMMELINSDLFDFKEKIVEYQTDLMKTIYNIEVDDLENYYFSAPVKRMVWQTILVVKELVGVLGCEPTRIFIEMTRRHDEITKRTINRKKKFEALYKSVKDEDTDWMNVIADADDTGRIRSKKMYLYLTQKGRCMYTGKHIELSDLFNNNLYDIDHIYPRHFVKDDNIDNNLVLVCKEKNAHKRDIYPLEEQIYSSQKEMWSELKKLGFINEEKYNRLTGRNSFTDEQKAGFIARQLVETSQGTKGVANILQQLLPESKIVYAKASNVSEFRQSRDIPKSRLVNEFHHAHDAYLNIVVGNVYYVKFTQDPLKFIKNDYDKDKINNNYNLSKMFDWDVKRKGEVAWIAQKKNGDVGTIATVKKVLSKNTPLMTRYCFEGRGKISKEERHSAKEAKQVGYLPYKTSDLKIKDVTKYGGFTSITVAYYFVVEHDEKKKRIRTIESVPLYLAAKINSNHEELDKYCKNELGLVNFNIRVRKIRIGSLLKRNGYFFYITGKTGNRLIVRNAVNICFRKEWIKYSSKIEKYQEKKIIDDIITKDKNELFYDEFIKKYENSIFANRPNSILEKLKKAFPVFKESNIEQQCSILYQLLNLSKILGSECDLRLIGESPNCGKMLINKKIGDDDIYLINQSVTGVYENKINLRTV

SEQ ID NO: 4465 - protein, 1370 aa, unidentified
  REGION 1..1370: note = Description of Unknown: Cas Enzyme sequence
MEKQEYYLGLDMGTSSVGWAVTDTKYELLRKKGKDMWGIREFDEAKSATERRTHRINRRRRQRQVVRLGLLKSYFSEEIAKIDPNFFIRLENSKYFLEDKDERVRTKNGVFNDDNYKDVDYYREYLTIFHLRQALLDIDNTGEKYDVRLVYLALANMFKHRGHFLLNAEGDALNTEQVDIVYQEILDRLENDYEIIIEHKPIQQVIDIIANTDNGRKKKHEELQELFGVVKKEKSSNELLKCLCGLSVNAKLIFDTNSEEKVTLCFNDFSYTDKIPELMEQLTEEEYALIEQLKSIYDYAVLAGTLKGYDYLSCARVKLYGKHKKDLKLLKALYRKYKTEEEYNKMFRSNIDGTYSAYVNSLNSEDAIFKSDEVVEGGKYRRNMKERKSEHIYSTIKKAFKDITDDKDVSFVLEQIEKEQFLPKQLTGANGVIPNQVHKKEMERILKNAENYLPFLKEKDESGLTVSERIKQLFTFQLPYYVGPIGENSKTGWVVRKEGGKVLPWNINDKIDMSATSEAFIGNLIRTCTYIHDEKVMPKASLAYERYCVLNEINNLCIDGERMDTKLKQQIYEDCFMKGKRVTKKQLCSYLVAQNAIHSEEQVTGIDKTINNSLSSYGKMYAIFGERLKEDAILAAAEDIIYWGTIFGDSKKMLKQRLKKYVEEGIIDENQLKRILGYKFKDWGRFSKALLTLNGCDKSTGEIISLGQAMWEYSLNFMELINSEEFTFKEELKKNTTDAMKSLSEFTYEDLEDGYFSVPVKRMIWQTLLVVREIEKVMGYAPKRIFVEMTRTEEEKGDKGRKESRGNQLLELYKSIKNTESHNWREEIATADKDGKLRSKKLFLYYMQMGRDMYTGEEIDLGRLYDDNLYDIDHIYPRHYVKDDSIMNNLVLVNKRANQDIKKDFYPIPEQIKANPKVRELWDTLHKQKLITDEKYARLSTNTAFTEKQLGDFIARQLVETGQGTKGIADLLEQLFKDTDIVYAKATNVSDFRRDNGLLKSRLINDFHHAQDAYLNIVVGNVYYTKFTRNPWNFIRKDYEKDKEKNRYNLARMFDWNVVRGSETAWIAGRKDEKGTIATVRKMMQKNTPLMTRMNFEQHGAIANATLYSAKKAKVENYIPLKASDERMKDVTKYGGFTSATIAYYFIVHHNEGKKENVSIEALPLHCKTKVEQDANGLEKYCEEVLGYSEVNILRRKLKIQSLLEFNGYQVHLSGKTGDRLILRNAMNLCLPAKWVTYIKKLEKAVNVQIFEEVITSGENIKLYDMLTDKHANTVYAKRPNAYGQKLLADRETFVALQLKQQCEALLQMLQLTKIGSTETNLLLIGESEHSGKILISKNLKPSDRPAVINQSPCGLYEKKEWIFDKIVEK

SEQ ID NO: 4466 - protein, 1367 aa, unidentified
  REGION 1..1367: note = Description of Unknown: Cas Enzyme sequence
MEKQDYFLGLDMGTSSVGWAVTNTKYELLRKKGKDMWGIREFDEASSAAERRTNRVNRRRRQRQVVRLGLLKSYFSEEIAKIDPDFFTRLENSKYFLEDKDERVRTKNGVFNDDNYKDVDYYRDYPTIFHLRQALLDIDNKGVKFDVRLVYLALANMFKHRGHFLLNAEGDALNTEQVEVVYKEILDSLENDYEIIIDHKPIQQVIDIIGNTDNGRKKKHEELQKLLGVTKKDKRANELLKCLCGLSVNAKLIFDENTEEKVPLCFNDFSYTDKIPELMEQLTEEEYALIEQLKSIYDYAVLAGTMKGHDYLSCVRVELYKKHADDLKLLKTLYRKYKTEEEYNKMFRSNADGTYSAYVNSLNSTDAIFKSDEVVEGSKYRRNMKGRKSEDIYATIKKAFKDITEDKDVSFVLEQIEKEQFLPKQLTGANGVIPNQVHKKEMERILQNAENYLPFLKDKDESGLTVSERIMKLFTFQIPYYVGPLGENSKTGWIVRKEKGSVLPWNINDKVDMSATSEAFIGNLIRTCTYIQGEKVMPKASLAYERYCVLNEINNLCIDGERIDAKLKQQIYKDCFMKGKKVTKKQLCSYLAAQNAIHSEEQVTGIDKNINNSLSSYGKMYAIFGERLKEDAIIAAAEDIIYWGTIFGDSKKMLKQRLKKYVEEGLIDENQLKRILGYKFKDWGRYSKALLTLSGCDKSTGEIITFGQAMWEYSLNFMELINSDEFTFKEELEKHTTVAMKQLSEFTYEDLEDSYFSVPVKRMIWQTLLVVREIEQVMGCAPKRIFVEMTRTEEEKGDKGRKESRGNQLIELYKSIKNTESHNWKEEIAEADKDGKLRSKKLFLYYMQMGRDMYTGEEIDLGRLYDDNLYDIDHIYPRHYVKDDSIMNNLVLVNKRANQDIKKDLYPIPEQIKANPKVRELWDTLHKQKLITDEKYTRLTSNTAFSETQLGDFIARQLVETGQGTKGVADLLEQLFKDTVIVYAKASNVSDFRRDNGFLKSRLVNDFHHAQDAYLNIVVGNVYYTKFTNNPWNFIRKDYEKDKEKNRYNLAKMFEWNVVRGSETAWIAKRKDEEGTISTVRKMMQKNTPLLTRMNFEQHGSIANATLYSAKKAKPENYLPLKTADERMKDVKKYGGYTSMTIAYYFIVRHKEGNKENVTIEALPLYCKDKVEREERGLERYCEEVLGYGEVNIIRRKLKIQSLLEFNGYQVHLSGKTGDRLILRNAMSLCLPTKWVTYIKKLEKAVNVQIFEEVVTTEENTKLYDILADKHANTVYAKRPNAFGQKLLADREKFVTLQLEKQCEALLQMLQLTKIGSTETNLTLIGESEHSGKILISKNLKASDRPAVISQSATGLYEKKEWIFTEM

SEQ ID NO: 4467 - protein, 1369 aa, unidentified
  REGION 1..1369: note = Description of Unknown: Cas Enzyme sequence
MEKQDYFLGLDMGTSSVGWAVTNTKYELLRKKGKDMWGIREFDEANSAAERRTKRVDRRRRQRQVVRLGLLKSYFSEEIAKIDPNFFIRLDNSKYFLEDKDERVRTKNGIFDDDNYNDTNYYKDYPTIFHLRKALLDIDNKGEKFDVRLVYLALANMFKHRGHFLLNAEGDALNTDQVDIVYQEILDRLENDYEMKIEHKPIQQVIDIIGNTDNGRKKRHEELQELFGVAKKEKSSNELLKCLCGLKVNAKLIFDENTEEEVKICFNDFSYTDKIPELMEQLAEEEYALIEQLKSIYDYAVLTGTLKGYDYLSCARVKLYEKHKKDLKLLKALYRKYKTEEEYNKMFRSNIDGTYSAYVNSLNSSDAIFKSDEVVEGSKYRRNMKGRKSEDIYSTIKKAFKDITDDKDVTLVLEQIEKEQFLPKQLTGANGVIPNQVHKKEMERILKNAENYLTFLKDKDESGLTVSERIIRLFTFQIPYYVGPLGENSKTGWIVRKEKGAVLPWNINDKVDMSATSEAFISNLIRTCTYIQGEKVMPKASLAYERYCVLNEINNLCIDGERIDTKLKQQTYKDCFMKGKRITKKQLCSYLAAQNAIHSEEQVTGIDKTINNSLSSYGKMYAIFGERLKEDAILAAAEDIIYWGTIFGDSKKMLKQRLKKYVEEGIIDENQLKRILGYKFKDWGRFSKALLTLNGCDKSTGEIITLGQAMWEYSLNFMELINSEEFTFKEELEKHTKVAMKQLSEFTYEDLEDSYFSVPVKRMIWQTLLVVREIEKVMGYAPKRIFVEMTRTEEEKGDKGRKESRGNQLSELYKSIKNTESHNWKEEIEAADKDGKLRSKKLFLYYMQMGRDMYTGEEIDLGRLYDDNLYDIDHIYPRHYVKDDSMMNNLVLVNRRANQDIKKDLYPIPEQIKANPKVRELWDTLHKQKLITDEKYARLTSNTAFTEKQLGDFIARQLVETGQGTKGVSDLLEQLFKDTVIVYAKATNVSDFRRDNGFLKSRLVNDFHHAQDAYLNIVVGNVYYTKFTKNPWNFIRKDYEKDKEKNRYNLARMFDWNVVRGSETAWIAEIKDEKGTIATVRKMMQKNTPLLTRMNFEQHGGIANATLYSAKKAKAENYIPLKASDERMKDVTKYGGFTSVTIAYYFIVHHKEGKKENVSIEGLPLHCKTKVEQDANGLEKYCEEVLGYREVKILRRKLKIQTLLEFNGYQVHLSGKTGNQLILRNAMNLCLPEKWIIYIKKLEKAVNIQIFEDVVTTEENIKLYDILTDKHINTVYAKRPNAYGEKLLADREKFVVLQFKQQCEALLKMLQLTKIGNTETDLRLIGESEHSGKILISKNLKASDKPAIISQSATGLYEKKEWIFDDIVK

SEQ ID NO: 4468 - protein, 1359 aa, unidentified
  REGION 1..1359: note = Description of Unknown: Cas Enzyme sequence
MLNTPYYLGLDMGTNSVGWAVTDKNYNLLRAKGKDLWGIREFSDSATSVDRRSYRIRRRRRQREQARIGLLKYYFNDSIIAKDPSFFQRLENSKYHLEDKDEAVKYKFNIFNDKTYTDIDYYTQYPTIYHLRKELLESSEPHDVRLVYLALLNMFKHRGHFLNAEIGDVAEERKLKDAYIDFCSCVSELTNESFNLDIDYSAVEEILSSRDISRTKKSEALASILNIDVKNKKYKEYVKAICGLKVNAYTLFSEQLSDEVKRIDICVSDASFDTKREDYISILGEDLFQIILYIKEIYDIGSLAGILKGYSYLSFARVATYEKHKSDLRKLKDCIRKYCSKEDYNQFFNSDAAGFYASYIGSFNSGKKQRRVGKNTTSEDLYKEIKKILKNADKNDPAIIDIFSSIDTESFLPKQLTASNGVIPNQVHYKEMAKILSNAESYLPFLREKNESNLSVSERILQIYKFQIPYYIGPVTEKSHRDGGNGWVIRKSNGRVLPWNINEKIDVKATSEAFISRMVRRCTYMNGAQVLPKASLEYESFRVLNEINNLRIDGERIPVDLKQAIYIDIFQKGKKITADILHKYLFNKGYIQSSEQVTGIDININNSLSTYGKFKVIFGEDIKLDSVQHMIEDIVFWCTVYGDSKKFLQEQIEEKYSDKISKEQLKRILGFKFKDWGSLSKEFFELKATDKSTGENISIIRALWENNLNLMELINSSKFNFKERLEEYRITSLKTLSDFEPEDLREYYFSAPVRKMIWQTMLVIKELVHVLGHEPERIFIEIPRDKDPSIGRTISRKKKFEELYKNVKDESVDWMNVIEHADDSGSLRSKKMYLYLTQKGRCMYTGEHIELSDLFNKSLYDIDHIYPRHFVKDDNIDNNLVLVKREKNAHKSDNYPLEAEIFNNQKKMWAQLRKEDFINEEKYKRLMGRNPFTDEQKAGFIARQLVETQQGTKGVAELLQQLLPNSKIVYTKAGNVSDFRHSREIPKSRLINDFHHAHDAYLSIVVGNVYYVKFTQNPINFIKNAYNKDSSKNNYNLTRMFDWDVKRRDEVAWIAQNKNGTVGTIAIVKKMLKRNTPLMTRLSYEGKGGLTKETLYSAEKAKGEGYIPFKSSDKKMQDVTKYGGFTSVKGAYFFLVEHDEKKKQIRTIESVPLYLADKIEKDPAELERYCQKLGLVNYNIRVRKIKIGTLIKRNGYFAYLTGKTGKQLILRNATNLCLDSKWGTYIKKIEKYKDTGVLDNTLDTDTNIKLYNELLDKFTTGIYGKRPNPIGDKMLSAKNTFTSFTLDNQCNLIYQILQLSKILGFETDLSLLHTNKKSDKPTREGGMQISKKVSNTTSMYLINQSPTGLFEKQIDLLTV

SEQ ID NO: 4469 - protein, 921 aa, unidentified
  REGION 1..921: note = Description of Unknown: Cas Enzyme sequence
MLEKPYYLGLDMGTNSVGWAVTDQQYNLLKAKGKDLWGIREFAEADTSVERRTHRISRRRRQREQARIGLLNDYFHDAIIAIDPSFFQRLENSKYHLEDKDQNVRYKYNIFNDPDYTDADYYTQYPTIYHLRKELLENPKPHDVRLVYLALLNMFKHRGHFLNSGISDGNNERSLKDAYINFAISVSELTEDYFNQDVDYSTIEGILSSRDLNRTKKAEELSTVLGIDFKNKKYKEYLRAICGLKINAYTLFSDQLPDDTTKIDLCVSDASFDEKSEELVSLIGEDLFQIILNIKEIYDIGSLAGILKGYTYLSQARVAAYDKHKHDLKLLKSSIKKYCTKEEYNNFFNSDADGSYASYIGSFNSGNKERRVGSKRTSEDLYKEIKKLLKGANKSDPAINEIFTSIETESFLPKQLTASNGIIPNQVHSKEMARILTNAENYLPFLKETDENNLSISNRILQLYKFQIPYYIGPVTEKSQRDGGNGWVIRKDNGRVFPWNIEEKIDVKATSEAFISRMVRRCTYMNGKQVLPKASLEYESFRVLNEINNLRIDGERIPVTLKQDIYTDLFQKGKKVTKKQLCNYLATRGLIESSEQVTGIDIAINNSLSTYGKFKAIFGEDIKLDHIQHMIEDIVFWCTVYGDSKQFLKEQIEDKYKGKLSPEQMKRILGFKFKDWGNLSKEFFELKGADKSTGEAVSIIRALWENNLNLRLIENEITVLSLEAPSAYQKIMHDLWQQYNGNEGSFILSENGKELKIQKNVECIYNPFTVNLNDKKILTKLYQELSLQGDVLLQEDGIELRGSIIRYFDKLLNTVPYDITYNFEFELSSIIKALDVQTDSTTNTLTEKLCSYMNLLQQLCGISIFVISNLKCLFQNTDLQLLYEYAKYNKINLIIIEPIHTPHIIDEKCWIIDKDLCIIEA

SEQ ID NO: 4470 - protein, 1362 aa, unidentified
  REGION 1..1362: note = Description of Unknown: Cas Enzyme sequence
MGVSSVGWAVTNTKYELLRKKGKDMWGIREFEEADSSAERRTHRVNRRRRQRQVARMGLLKEYFSDAIEKVDPNFFIRMENSKYFFEDKDERLSSKNGIFDDADYKDVDYYTEYPTIFHLRKTLLNIDDTGKEYDVRLVYLALVNMFKHRGHFLLNTEGDALSSEQVNTTYQELLEVLENNYEISLESRDIKDVIDIISSSDNGRKKKHELIMELFGVKKSDKRANELLKCLCGLSVNAKLIFDENYEEKVDLCFHDFSYTDKIPDLMEKLSEEEYSVVEQLKSIYDYSVLVGTLKGYDYLSCARVELYEKHREDLKLLKALYRRYKTKEEYNKMFNGFDSSSEKNGKKEVSYAAYVNSLNSSDSCVGSKKYRRNMNGRKTENLYATIKKAFKDNTDDKDVQLMMESIDKEQFLPKQLTGANGVIPNQVHKKEMERILKKSQNYLPFLKEKDENGLTVSERILRLFTFQIPYYVGPLGENSKTGWVVRREGGRVLPWNIDEKIDMSATSEAFIGNLIRKCTYLSDEKVMPKASLSYERYCVLNEINNICIDGERLDTELKQKIYTECFMKGKRVTRKQICNYLVAQGCIKSDEQVTGIDININSSLSSYGKMFAIFGERLKEDAIRKVAEEIIYWGTIFSDSKKMFRKHLTKYVEQGIIGESQVKRILGYKFKDWGRFSKALLTLQGIDKSTGELLSLENAMWEYSLNFMELINSDDFTFKDELANRRTAAIKSLSEFTYEDLEDTYFSVPVKRMIWQTILVVREIEQIMGYAPKKVFVEMARSEEEKGDKGRKDSRGDKLLELYKNVKNTENHDWKKEISEANESGKLRSKKLYLYYTQMGRDMYTGEEINIDMLYDDSMYDIDHIYPRHYVKDDSIVNNLVLVNRRANQDIKKDLYPIPDKIISNPKVQELWKMLHKQNLITDEKYKRLMSRSPFTEKQLGDFIARQLVETRQGTKGIAELLGQLFKGTEIVYAKATNVSDFRRDNGFVKSRLVNDFHHAQDAYLNIVVGNVYYTKFTKNPWNFIKKDFDKDRNKNGYNLAKMFDRDVVRGDDIAWIASKKDTQGTIETVRKMMRKNTPLMTRMSFEQHGGIAKGTMYSAKIVKEKNYIPVKSSDKKLSDVTKYGGFTAVTVAYYFIVRHKKGKKEITTIEALPLYCKDKVENETNGLSTYCEDVLGYRNVKILFRKLKIQSLLEINGYKAHLSGKTGDQLTLRNAVNLCVPEKWIRYIKKLEKVDTSQIKEEMITAKKNCELYDLLIDKHLNTVYARKPTPNAKKLLDYRDNFLGLGLKQQCEAMLNILKLTSIGLTGTSLKLIGGDNDYGKMRISKNLDCSAKPAIICQSITGLYERKIYIFDDRSNK

SEQ ID NO: 4471 - protein, 1364 aa, unidentified
  REGION 1..1364: note = Description of Unknown: Cas Enzyme sequence
MEKQEYYLGLDMGISSVGWAVTNTKYELLRKKGKDMWGIREFEEADSSAERRTHRVNRRRRQRQVARMGLLKEYFSDAIEKVDPNFFIRMENSKYFYEDKDERLSSKNGIFDDADYKDLDYYKDYPTIFHLRKALLDIEDTGKSYDVRLIYLALVNMFKHRGHFLLNTEGDALSSEQVNTTYQELLEILENNYDLSLESRDIKDVIDIISSADNGRKKKHEQILELFGVKKSDKRANELLKCLCGLSVNAKLIFDENYEEKVDLCFHDFSYTDKIPDLMEKLSEEEYSVVEQLKSIYDYSVLAGTLKGYDYLSCARVELYEKHCEDLKLLKALYRRYKTKEEYKDMFKSDKEGTYSAYVNSFNSSDSSVKIKKYRRNMKGRTVENLYATIKKAFKDNTDDKDVQSMMESIDKEQFLPKQLTGANGVIPNQVHKKEMERILKKAQNYLPFLNEKDESELTVSDRILRLFTFQIPYYVGPLGENSKTGWVVRREGGRVLPWNIDEKIDMSATSEAFIGNLIRKCTYLSDEKVMPKASLSYERYCVLNEINNICIDGERLDTELKQKIYTECFMKGKRVTRKQLCNYLVAQGYIKSDEQVTGIDININSSLSSYGKMFAIFGERLKEDVIRKIAEEIIYWGTIFSDSKKMFRKHLTKYVEQGILGESQVKRILGYKFKDWGRFSKALLTLQGIDKSTGELLSLENAMWEYSLNFMELINSDDFTFKDELENRRTAAIKSLSEFTYEDLEDTYFSVPVKRMIWQTILVVREVEQIMGYAPKKVFVEMARSEEEKGDKGRKDSRGTQLLELYKNIKNTENHDWKKEISEANESGKLRSKKLYLYYTQMGRDMYTGEEINIDMLYDDSMYDIDHIYPRHYVKDDSIVNNLVLVNRRANQDIKKDLYPIPDKIISNPKVQELWKMLHKQNLITDEKYKRLMSRSHFTEKQLGDFIARQLVETRQGTKGIAELLGQLFKDTEIVYAKATNVSDFRRDNGFVKSRLVNDFHHAQDAYLNIVVGNVYYTKFTKNPWNFIKKDFDKDRNKNGYNLAKMFDRDVVRGDDIAWIAAKDDRQGTIETVRKMMRKNTPLMTRMNFEQHGGIANATLYSAKKAKVENYIPLKSSDTKLGDVTKYGGFTSATISYYFVVHHKEGKKEITTIEALPLYCKNKVENEENGLLKYCEEVLGYGDVKILINKLKIQSLLEINGYQFHLSGKTGNQLILRNAMNLCVPEKWTAYIKKLEKLVVGHVKEQAITSEANIELYDLLTDKHLNSVYAKRPNAYGQKLVDDRGNFVNLNLESQCEAILQILQLTKIGNNETNLKLIGESEHSGKMRISKNLKVIDKPAIICQSVTGLYERKIYIFGEQLDK

SEQ ID NO: 4472 - protein, 1373 aa, unidentified
  REGION 1..1373: note = Description of Unknown: Cas Enzyme sequence
MEKQEYYLGLDMGISSVGWAVTNTRYEILRKKGKDMWGIREFEEADSSAERRTHRVNRRRRQRQVARMGLLKEYFSDAIEKVDPNFFIRMENSKYFSEDKDERLSSKNGIFDDADYKDVDYYTEYPTIFHLRKTLLDIEETGKEYDVRLVYLALVNMFKHRGHFLLNTEGDALSSEQVGTTYLELLEVLENNYEIGLESRDIKDVIDIISNRDNGRKKKHEQILELFEVKKSDKRAKELLKCLSGLSVNAKLIFDENPEEKVDLCFHDFSYTDKIPDLMEQLSEEEYLVVEQLKSIYDYAILAGTLKGYDYLSCARVELYEKHCEDLKLLKALYRRYKTKEEYNKMFNGFDSSSEKNGKKEVSYAAYVNSLNSSDSCVESKKYRRNMNGRKTENLYATIKKAFKNNIDDKDVRSMMESIDKEQFLPKQLTGANGVIPNQVHKKEMERILKNAQNYLPFLKEKDESGLTVSERILRLFTFQIPYYVGPLGENSKTGWIVRREEGRVLPWNIDEKIDMSATSEAFIGNLIKKCTYLSDEKVMPKASLSYERYCVLNEINNICIDGERLDTELKQKIYTDCFMKGKRVTRKQLCNYLVAQGCIKSDEQVTGIDININSALSSYGKMFALFGERLKEDAIRKVAEEIIYWGTIFSDSKKMFRKHLTKYVEQDILSESQVKRILGYKFKDWGRFSKAFLTLQGIDKSTGELISLENAMWEYSLNFMELINSEDFTFKDELAYKRTTSIKSLSEFTYEDLEDTYFSAPVKRMIWQTILVVREIEQVMGCAPKRIFVEMARSEEEKGDKGRKDSRGTQLLELYKNIKNTDDHDWKKEISEANASGKLRSKKLYLYYTQMGRDLYTGEEINIDMLYDDSMYDIDHIYPRHYVKDDSIINNLALVNRRANQDIKKDLYPIPNQIVSNAKVQELWKMLHRQNLITDEKYKRLMSRSPFTEKQLGDFIARQLVETRQGTKGIAELLGQLFKDTEIVYAKATNVSDFRRDNGFFKSRLVNDFHHAQDAYLNIVVGNVYYTKFTKNPWNFIKKDLNKDRDKNRYNLAKMFEWDVVRGEDVAWIADKNDNQGTITTVRKMMRKNTPLMTRMSFEQHGGIANATLYSAKKAKVENYIPLKTSDTRLGDVTKYGGFTSATISYYFIVSHKEGKKENTTIEGLPLYCKDKVESEENGLLRYCEEVLRYEDVKILFNKLKIQSLLEINGYQVHLSGKTGNQLILRNAMNLCLPEKWTTYIKKLEKLVIGKIKEQTITAESNIELYDLLTDKHLNAVYAKRPNAYGQKLEDDRSNFINLKLENQCEAILQILQLTKIGNNETNLKLIGESEHSGKMLISKNLKATDKPAIICQSVTGLYERKIYIFGDRLDK

SEQ ID NO: 4473 - protein, 1332 aa, unidentified
  REGION 1..1332: note = Description of Unknown: Cas Enzyme sequence
MKKFYVGTDIGTNSVGVACTDENYKLLRAKGKDCWTVRLFEEAKTAAERRTFRTARRRLARRRQRIAWLQDLFASYIEDKTFFIRLNNSQFLSEDKDELLGGNKNNLFAGEYDDRKYHEEFPTVFHLREALITGGKYDLRLYYLALHHIIKYRGHFLFEGSVEEIRDFSRLLIGLNGVLSDLYGDEISAFSETASDEVKAILLDKTKGIKDKQLLLEKLFAVSDKTSKEIIKGIIGAKISPAVLFGEEYKELKNFSFKETSDDTFEQMRMDYGNNFALLEAMRSIYSYVTFEKLLEGHRDISSAMIAVYDKHNSDLNKLKNFIRTEAKEYYNQIFRNVNEKSNYVNYIGHTIKDGVKKKVKRCKDEEFFAYLKKILSSLNNVNDEACRNAILAELENGTFLPKILHSDNGLFPRQINEAELNRIVTNMVKNYPETAAFADKILPLFRFRIPYYVGPLTGTNSWAVRTSEKVTPWNIEQVVDFAKSNEEFMRRMTNKCTYLRGEDVLPKASVLYQKFDVLNQINKLRVNDMLLPIALKQKIYNELFLVYPRVSDKKIKELLVRENYISAEDVKAIVLKGKDGEFKASMSTYIRLKKILGDFVDKDIESGGGVCENIVLWHTLNTDKKIVENLIRKNYGNIPEIKAAIPQLKGLTFNDFGKLSAKFLNGITAINKTTGEIVTILDVLFDTNENLNEILNDENYNFAEVIESENGLADSKVNYSSVEELYVSPAVRRGIWQTLGIIDEYVEAIGKTPDKIFVEVTREDGQKGAEGRTQPRKRQLLEKYKYISEAYADVIAQLNDEKYSDLKLRQERLFLYFRQLGRCMYSGARIDLENLNTDTYDVDHILPRTYIKDDSLDNKVLVLRSKNAKKSDTYPLPEEFFNQRGFWKMLLEKNLISRTTYDRLTRTEPLGDNDYKDFINRQKVITDQTAKAVIELLGRKYPNTKIVFSKAKNVNDFKNKFNLFKCRETNDLHHARDAYLNVVVGNVYDTVFSTPIAMFRHDGDAWRTYNLKKLFTRDVAGAWSDDIRKTVLDTFAKHSMMVTRYATCNKGMFYDQTVYEKGDSCITAPRKGAGPLADYSKYGGYSSQKTAYFAIVSSIGKKGKRIKTIEAIPVLVDYRSKADPDAIIKYLKTKLNQPEIIIEKIKTKQLVSYNGTLCYLAGVDDPRIFVHNANQLFTENKTDEYVCALLKLLDMDSKNMVSHDETEYVIKTNRNGERKLVITKESNIELYDELRSKLGNTIYSGISAFKTFKENLDDGIEKFVKLSIIDQSKVIIQVLKVFKNNAETANITLIGGGSIVGKTRFSKNITDVDFKIIDLSPAGLTQRIRKV

SEQ ID NO: 4474 - protein, 1335 aa, unidentified
  REGION 1..1335: note = Description of Unknown: Cas Enzyme sequence
MKKFYLGMDIGTDSVGMACTDEEYNLLRAKGKDCWAVRLFNPSSTAEKRRSFRTARRRLERRKQRIGFLQALFEPFIEDENFFLRLNNSAYFPEDKASVLGGDKNSLFADGIYCDKNYHSDYPTIYHLRYDLQSKPVKDIRLYYLALHHIIKYRGHFLLDGGIENVHDIYRLFDELSAVCAEIFTDYERVPQFDSVFAEQAKNILIDGKTGLRDKQNALEALFGKDALTKEIIKGITGGKLSPKNLFGEEYETQKSFTFKDLTDETFDGMEADFGDNFILLEKIKAIYSFALFEKLFEGQPNISAAMINLYNTHKNDLRCLKQFLRGNAGEEVYRKFFKSTKEKANYVNYVGYTKKGGDKIKVKHCSDGDFFAELKKLITGIENVTDTEIRDDILSKINSGTFLPKILHSDNGLFPHQVNQQELEKIVENMVKVHPETHEIADKILKVFLFKIPYYVGPLTGKNSWAVRTDEKITPWNFDTVVDKAQSNENFMRRMTNKCTYLRGEDVLPQASVFYQKFNVLNQLNKLKINDTPISVELKQKLFDDVFKVKNKVTDKTIINFLVREGAISEYQTQEVKITGKDSEIKANMSSYIRLKQILGSFVDDDLMSGGGVCENIILWHTLNTDKNIVEKLIEKNYGKIRVIKDNIKSLKGLTFQKFGRLSMKFLTGLKVNDPPVGENLSILDLMYFTNQNLNEILFNEKYGFEEIIKKENGETDSEIRYKDLENLYVSPAVRRGIWQSLRMADEYILNIGRAPDKIFVEVTREEGTKGAAGRTVSRKNRLLELYKNVAGYDEIRSELTSEGLTDLRLRQERLYLYFRQLGRCMYSGERIDLSQLNTDMYDVDHILPRTYIKDDSLDNKALVLRKKNVEKRDAYPLPQGFTEQQNFWKMLLTKGLISDVTYGRLTRTEPLNEDDYSGFINRQKVITDQTAKAVAELLKRKYSSTKIVYSKAKNVNDFKSKFDLFKCRETNDLHHARDAYLNVVVGNVFDTCFSSPMAMFRNDGDRWRMYNLKTMFFRDVDGAWNGGSLSVVKSVFAKCSMCVTKYSYCVKGEFYNQTVYSNNDSRSKIPRKGSGVLGNIQKYGGYSGLNTAYFAVVQSEDKKGKIIKSIEAVPVLIQQQTKGDLNRLKEYFEEKGLKNAEILVPKIKINQLVSFKGMPVYITGISGIRILVQNAVELFTDNKTDEYVKALTEFYERYKSKIDEESSEVYIIKTNRMGEIKLKISKENNLSLYNFLVGKLDDKIYSGIGYCATYQKILKDGLDKFKCLTTAKQVKVLLQALNFFRCNAMLSDLSLIGGNTLNGKLSFSKYITEDDFKIIYKSNCGLTLKERKV

SEQ ID NO: 4475 - protein, 1490 aa, unidentified
  REGION 1..1490: note = Description of Unknown: Cas Enzyme sequence
MSDETKKDGRKYYLGLDIGTDSVGFAVTDEHYQIIRKQGKHLWGSRLFDKASTAKERRGHRTARRRYVRRRQRILWLQEIFTPAMKQVDPNFFDRLNNSAFLLEDKDEAVRSDYEGMDIHPLLFPFPQKDADVTFSNDAAYHNKFPTIYHLRKAMEEQPEKKFDLRLVYLVLAHMVKYRGNFLMEGEMKQVKADPSILLQSLEELSQAIEAYNSASNEDEVDENDQEVTLPPFSYDLTKAKTLSGYFQDPRMRLSDLEEQGAACLGIAKKSDGSINVMKLFNAICGSTPKMKDVFGLDDREDDPNLAKPVDFSNEEFVDRIEDLSTFSDVLLAAKKIYDYRLMARTLQGKKSLSDAMVKRYNDHKKQLKQLKKIFKDYDAANGTSCFKEFFADPAAKGDNYLKYVGFYRDEEHRIHRYPHGTKKLDDLLKAIRDSAPIVNGSDNPDVQKILREIDTKNYLLLQNSKDNGSLPYQLNLNEMREILSNQKSYYPFLGEKAPEFKNPEKTDYKICSILEYRIPYFVGPLTPKKENDKDTENHWVVRKSDERITPWNFHRVVDEDASAQGFMDNLKNSCTYLIGEPTLPKDSLIYTKYVALNQMNGWRLLFNGKKRRLTFDEREGLFNKVFLKPGKVTTKKVQNYLVQFLNCKPSEITLCTESHDTLDDRDITLSLKPWLDMMDERAFGKDLPQNKKDIEKAEKVIQCQAVFENKELAKKRIDKIDGLTPEQKAYLGNLSYKGWGNLSKKLLDGLKVDVPDPATGEILPKSILDLMWETGKTFQEIYAVNGPDDEGLDTTGFKKQVDELTGEKKFTPYELIDEQWGSPQMKRSLRQSYRIIDELKKILKIDSFDAVFVEVTRTSRDDKKNQRTTSRKDQLNAFYKKVMSQYKELKDEIGKLSEKLNGIQDEGMLRRKPVFLYFAQLGRSVYSGEPIDFENLDKNYDVDHIIPQAKYKDDSFNNTVLVEQGLNRKKSDEYPIPDGVLSAKGREWIKTLARISVDTKIPYMPKEKANRLLRRDPLSEEELAGFVNRQIVMTSQATAGIANLLKWTDPNTRVVFSRADRVSDFRKEFDMLKCREVNDCHHAQDAYLNIVVGNVYDEVFTRSFTVKTLREKKKETDSIRMDVHNMFTHDQYRFGSHKSVMVWEAKDYSKDGMENPMSKGTLYTVRKYMAHNDVMVTKMLTTQVGKQGFFNKISILGKEDGNGLMPLKAKGPYAREDFAKVYGGYNDLTAPYFMLVESKGKKGKDVFTLENIPAVYLAQINTVKDEGERKAKIDDYLVKNGLVDPEVLLPKLLIGTIVERTGENGKTRLLIAGKTGNSIVCRGMMPLSLPKHWYDYFQLIGKFLGLNDSLDKKKGPSDADKIKDEVQIRRGAIISKEKNKELFDYLGSCVLTKPVYALMPASAPVRKDVQSENAKQAFATLNIVDQCNVLENILKYCGSGSETSDLTLIGGSGREGYKTINKAVNPSTDRIIAQSVTGFYETQLWPKKQ

SEQ ID NO: 4476 - protein, 1372 aa, unidentified
  REGION 1..1372: note = Description of Unknown: Cas Enzyme sequence
MQKDYYIGLDMGTNSVGYAVCDTNYEILKSHGKAQWGVRLFDTAQTAAARRFARTNRRRLERRRQRILLLQEIFAPEIVKIDPAFFQRLNDSFFLQEDKEEDQTNTLFNDPDYSDKDYHQQYPTIYHLRYDLMNNPARHDVRLVYLALAHILKTRGHFLYSDTGEFKLGEQYQSVFTELSVSLSEILDIDLPETFAQEWRQILTDSTTKNAEKQSLLLKTLDSKDPISKGLARLLSGYDVNFSAFFDDQYKEAAVTKVNLSKLDEETSGQLETVLTDEHFEFIQTASAYYNLVRLESLLQGADSLSQTKIRIYDKHGQDLRKLKKLFRKHVSKEEYNKFFSTSEKGLNNYVAYSGYHLLRKKKQPVLQKCDQERFLEQLKKTLNKFPETAKREPLFTEIMAEVEKGTFLPKITDKDNSLIPHQLHHAELKKIIQNASAYLPFLNQEGEEGYTKAEMISLISDFRIPYYVGPLNPAHSVQKDPNSSSHHAWVSRLSDKPVRPWNFNRVIDIEQSATDFIANLTNKCTYLIGEDVLPKESPLYAKYSILNLLNSMKIKGERLETGLKQKIFNHFFLEPERKKKATRKNILDFLKAETGLSLTDADIEGIDLEIPGDMKAEKAIERIAPDLLTSQEKENIVRLITVFPDSVQMINSRLTRDLQEKLSPQQINQLARLKFTGWGRLSERFLNGIEAPNEKAEFKTIIDLMWEESLNLQEILSSRYLFQSIVQRINEDLFGSSMSFGYHVVENYPISPPVKRMVWQALRIIKELIKVNHGKLPDKIFLEVAREEGKKERTRSRKQQLLELYKDLKKQEESLYSDLENRSDSELRSKKLFLYFTQMGRCMYSGEKISVENLNSIGADGFDLYDIDHIYPRSVTKDDSLLNNLVLVKSSENKAKSDNYPIIPEKRKARIAFWAQLKASGLITEEKFRRLSRQSPLSEEELAGFINRQLVETRQAAKAAANLIKQLLPETQLVYVKAGHVSDFRNRQSDFKFPKVRGMNDLHHAKDAYLNIVVGNVFDSKFTNNPLNFIRNSEKRSYHLAKMYDFTVKSPDGQIAWEPGEEGSIKMVKKMMARNNILVTHQTHHQHSGRNGGIFNQLILPKGQGNFPIKTSDPRLNDQTGMDKYGAYSDETGATFFLVEHKEKQKRIKTIISLGLGWYLTHPFTEEALLDYCIKDLGLKEPRILIKDIPYNAIITVDGYPLRILGKNGKNQIKVANTIQPIFSLEQELTLKEVFIQCAKESPEEEQSLPEDQSLADAFLSLYDAFIVKLANPPFSNLPTYARQVENLKNGREKFVTLTVKEQAFVLNQALILMLCDHQLSDLSLISPLKKGKPQNSNVGMKIIPRNISNKSFRIVYQSVTGLFEKWVKVS

SEQ ID NO: 4477 - protein, 1097 aa, unidentified
  REGION 1..1097: note = Description of Unknown: Cas Enzyme sequence
MEDKRPYYIGIDLGTNSVGWAVTDEDYNILKFKKKNLWGARLFEKGETAQARREKRSLRRRLKRRVHRIKLLQDIFKDEIAKVDNKFFLRLNESKYYKEDKDESLLTDDTLFADVNYNDKYYHKEYPTIFHLRKDLMESDDKKDIRLIYLALHHIIKNRGNFLHEGSIENITDFKTSFEKLNKYLEDNEYPVFKVEDFDKIEEIISNKELKPSKKEEQFKTFIEDKQLIEILKGIVGLSYNLTKLFDDESILNDQEKSLSIKLGEKEYDILRSEIEPIINERIELIDKIKGLYDWSIINDILKNSSTLSEYRVKLYEEHKDDLSKLKYLIKEYGSSKEYYKAFKDAKEKNNYVAYIGLNKKGKDKEAIDKISTKDNPLKQVNNYFKNVLETIKTNPKNPIKEEDIEIYDNIINKLNKSNCLKKIRTNVNGTIPYQLHKKELEKIIEKASKYYSFLNYKDDNGYITKDKIIKIMEFKIFYYVGPLNPYHKDITGHAWIEKKSNEKILPWNFEEVVDTTKTAEKFIIRMTNKCTYLLGEDVLPKASLLYQKFMLLNELNNMKIRGDYIAKGLKDEFIEELFKKKSRVSIKDLCNYYEYKYQVKLAKKDISGLDITFKSNLNSYVTFSKIFKGHNIELNPYNDMIENIIKYKTIYGDNKDIFEKKIRKDYSQYLTEENIKAIKNLNFSGFGNLSKKLLLEIPGENSDTGESFENIMEALEKTNDNLMEILAPVNNKHGYTFLENINEINKGNDIGKKELTYENIMNERYISPAVKKSTWQAIKIIEEIIKIKGYLPEKVFLETTREEDKVKKRTTSRKEQVKELLKNIQEEYFNQDKQNLETLTEDQLRNEKIYLYYKQLGKSMYSDTLIDFHDLIHNNTMYDIDHIYPYSKSGDDSIVNKVLVTKDENNLKQDNYPLSEEIRIKNTARWKMLLDTNLISEETFRRLTRNTPLTSEELSGFVTRQLVETSQSIKILKDVLEEYYKDIDVNMIKVSVSKKMREALGIKKVRELNNFHHAHDAYLAVLSGDIYTRRFTKNIYKYFKDDNLTSEERKRRREYDLDKFFVNDVIIKKFKKQSNNETIVEETKIWSPLKIPEIRK

SEQ ID NO: 4478 - protein, 1349 aa, unidentified
  REGION 1..1349: note = Description of Unknown: Cas Enzyme sequence
MKKFEDYYLGLDLGTSSIGWAVTNEKYDILRFNKKFMWGTHLFDMGNTASERRIFRTSRRRLKRKKNRIELLQTLFSAEMSKKDFGFFQRLKESQYFIEDKTIKNKNTLFMDENYTDQDYHMEYPTIYHLRKALIDNEESAFEIRKLYLVISHILSHRGHFLFEGELSDNLDFNDIFNEFIKYLNEELNIDFKIKSDVSLQVIKEILTDKMLNRTKKKEKLSELLEEEKNKIYQEIWKLLVGNEAKMSTIFDDKEYEEAKIAFSKGNYDEKEEEYESILGEKILFVQKAKAIYDWMLLQNILKEDKYLSYSKVKLYDEHKNDLKILKEVLKRLDKKAYKEIFSENGLYEEYLRIEKKKIGSKEEKTKDILYNRLKKIFETRDNMAIEDILNKIELDNFLPKQKIKDNGVIPRQVHQKELEIILKNAEKYFFWLTEKDETGLSVSEKIMKIFKFKIPYYIGPLNSKSPFAWIERKEYGKILPWNFESMVNTSKTAEKFIKRMTNKCTYLPEKDVIPKNSLLYTKYMVLNELNNLKIRGEKITVDLKQKIYTELFQKNKKIGMRTLVEFLKSQNIAVTKPEITGIDGTFNTSLGSYIEMKKIFGEENIVKDSYKIMIEDIILWITLYGEEKKLIKSKIKEKYSGKVSDDQMKLILKLKYKDWSRLSKEFLTEIEAMNEETGELISIIEMLWRKNENIMELLSYKYDFANRIKEYNGINKKEKNMTYEDMVKDLQVSPSVKKMIWRALVIVKEIKKVTNKSPKKVFIEMARDTQTEKKRTEKRKDKLLKLYKSIENDNSVKELEKNLKDKTNDDLKSKKLYLYYLQLGRCMYSGEIIRLEDLMNDNLYDIDHIYPQSKIKDDSFDNTVLVKKQINADKTNEYPIDKNIQTKCKALWTSLKEKELMSSIKYERLTRTEEFSDDELAGFISRQIVETRQATKVLADLLKYIFGSETRIIYVKAGLTSDFRQKFGIYKFRELNDYHHAHDGYLNIVTGNIYNTLFTDNPYNFIKDRKKQNRTYNLNKVFERENEVWNPDVMLSKIERYIYKIRPLFTRASYEQKGGFSDQNISSEKDKLRPLKSSGVLSNIKYGGYDKIKNSYFFIVEYTEKKKRVRSIETLPIYIKKSISTKEDLEKYCKEELKLQEPKVLISKLNYKSLVHSNGYEYYLNSRTADSITTQNGIQIILTKENYETYRKIYKNLEYLKLIYKNEELIEEKFLEKLPKILKKNKNDRDLNENEISEKIGKLYKEIIEKIETGIFSKFKSTLPIYIEACNKLKDFITLNNYAKSRFIQEILKCLNSQRGEFDMKYTHDKYSKNYNMKLSKSKILENDFYIINQSPTGLFEKRVFLDK

SEQ ID NO: 4479 - protein, 1344 aa, unidentified
  REGION 1..1344: note = Description of Unknown: Cas Enzyme sequence
MKKFGDYYLGLDLGTSSIGWAVTDEKYDILRFNKKFMWGTHLFDTGNTAAERRIFRTSRRRLKRKKNRIELLQTLFSEEISKKDFGFFQRLKESQYDIEDKTVKNKNTLFMDENYTDKDYHDEYPTIYHLRKALIDNEENAFEIRKLYLAISHILSHRGHFLFEMEPSNNPELDNLEFDDIFDEFIKYLNEELNINFKVKSDVSLEIIKEILTDKMLNRTKKKEKLSELLEEEKNKIYQEIWKLLVGNEAKMSIVFDEKEYEEAKISFSKSNYDEKEEEYESILGEKIVLVQKAKAIYDWMLLQNILKEDKYLSYSKVKLYNEHKKDLKILKDVLKNLDKKIYKEVFSENGLYEEYTKKNKKEEFYKKIKSYFNDENTDEVIKNILNKIELDNFLPKQKIKDNGVIPRQVHQKELEIILKNAEKYFFWLTEKDETGLSVSEKIMKIFKFKIPYYIGPLNSKSPFAWIERKEYGKILPWNFESMVDTSKTAEKFIKRMTNKCTYLPEKDVIPKNSLLYTKYMVLNELNNLKIRGEKITVELKQKIYTELFQKNKKIGMRTLVEFLKSQNIAVTKTEITGIDGTFNTSLGSYIEMKKIFGEENIVKDSYKTIIEDIILWITLYGEEKKLIKSKIKEKYSGKVSDDQMKLILKLKYKDWSRLSKEFLTEIETMNEETGELINIIQMLWKKNENIMGLLSYKYEYSDKIREYNGKNKKEKNMTYEDMVKDLQVSPSVKKMIWRALVIVKEIKKVTNKYPKKVFIEMARDTQTEKKRTEKRKDKLLELYKNIKNDDSVKELEKNLKDKTNDELKSKKLYLYYLQLGRCMYSGEVIRLEDLMNDNLYDIDHIYPQSKIKDDSFDNTVLVKKQINADKTDVYPIDKSIQVKCKALWTSLKEKGLMSNVKYERLTRTEEFSDDELAVFISRQIVETRQATKVLADLLKTIFGSDTRIVYVKAGLTSDFRQKFGIYKFRELNDYHHAHDGYLNIVTGNIYNTLFTDNPYNFIKDRKKDNRAYNLNKVFERENNVWNPDTMITKIERYIYKIRPLFTRDSYEQKGGFSDQNISSEKDKLRPLKSSGVLSNTRYGGYDKIKNSYFFIVEYTEKKKRVRSIETLPIYIKKSIKRKQDLEKYCKENLKLQEPKILISKLNYKSLVYSDGHEYYINGKTGNALLVQNAIQVILTKENYEIYRKIHKNLEYFKLIYKDEKIREEKFLEKLPKVLKKGKNDKDLSENEASKKIETLYKEIFEKIETGVFSKFKSTLPIYIADCNKLKDFTILNNYAKSRFIQEILKCLHSQQGEFDTKYTHNYSKKYNTKLNKSKILENDFYIINQSPTGLFEKKVSLDK

SEQ ID NO: 4480 - protein, 1353 aa, unidentified
  REGION 1..1353: note = Description of Unknown: Cas Enzyme sequence
MQTKKVDEYYVGFDIGTNSVGYAVTDKNYNLIKHGGEPMWGSHVFEAASTAQERRTFRTARRRNDRKKQRIALVSEIFAPEIAKVDPRFFIRRRESALFRDDVDIKDRYVVFNDDDFTDKDYYDIYPTIHHLIYDLMSNKEKHDIRLVYMACAYLVAHRGHFLSEVSKDNIEDVLDFDVVYCNFLNVMDNYAEIPWKCDISKFKEILKKKQTVTNKEREFLQLLNEGKKFKTSEEDDVSREGLVKLLSGGTYELGKLFPKLTFEEKVSVSFNMAEEDFAMVLQQLGDEGDIISSLRNVYDWAILSDVLNGKNSVSEGKITVYEQHKKDLSFLKYFVKKYIPNRYYEVFRDGNIVGNYVSYSYNLKNVQNVSKFKGAKKDVFCDYIKKVVKDIKVDDEDKVEYEDMMFRLDTYSFIPKQVENDNRVIPYQLYYYELKRILDNASSYLEFLDEKDMDGYTSREKLLSIMEFRIPYYVGPLRTDNGQHGWMKRKAEGRIYPWNFEDKVDLDASEQEFINRMTNSCTYLPGETVVPKYSLLYCKFNVLNEINNIKINDCSIPIEHKQGIYKLFERYRKVTPKKIKDFLISNNLLHPEDVISGIDVTIKSSLKSYHDFKKLLESCVLKENQVEAIIERLTYSEDKGRILRWLHMEFPDLSDDDVKYISKLKYSDFGRLSRKLLVGIRGCNKDTGEVDSIMGMLWSTNDNMMKLLSNSYTFIEEIEAIKNEYYVEHPANLDSMLDEMYVSNAVRRPIHRTLDILSDIRKVCGKNPSKIFVEMARGGGEKGVRTKSRRDQISELYKNMDKAEVRELSEQLEGKTDNELQSEVLFLYFMQLGKCAYTQKTIDIDKLKTNIYNVDHIYPQSYVKDDSITNKVLVISEENGQKGDKYPISKDIREKMQPFWYRLLSNKLISEEKYRRLTRCTSFTEEELTGFINRQLVETHQSTKAVTTVFRTLFPDVEIVYSKAGLVSEFRKEFDMLKTRSVNDLHHAKDAYLNIVVGNVYHCRFTKNFYITQKYSLKTKTLFTHSVKLGDDVIWNGQESIGNVRKVLAKNNIHYTKYPFMRKGGLFDQMPVKAAAGLIPRKTGLDTEKYGGYNKSTATAFLLVKYKEKGKQEAMIMPVDYMYSEKVFSDNEYALKYSKENIKKIWGRTEDQVIDVSLPLGLRPIKINTMLSFDGFRACITGKANAGQKIGFTSMMPLVIGNEWENYIKKIDNYIEKKGKNKNITLNEKNDGICGEKNEKLYCILTDKIINNIYSIPFNSQQKILENGYDKFKKLDIERQVYFLQNLVLVLKSGRAGSCDMSAIGGSKNAATFAFGSKLSLWAKKFQKVYLIDNSSSGIYQNMSDNLLDIIK

SEQ ID NO: 4481 - protein, 1279 aa, unidentified
  REGION 1..1279: note = Description of Unknown: Cas Enzyme sequence
EDSKTGKPFALFRDKELNDKLYYKQYPTIYHLRKALLTEKEKFDIRLIYLAIHHILKHRGHFLFNGEFANVTKFSYAFEQLQDCLANELDLELECNDVQRLSVIIKDKHMGKNDKVNAAASLFPNVADKKQLKAIIGLACGAKKKLADIFCDETLNDSELSSISIAEKPYEELRPDLEAVLAEKCCVIDYIKSVYDWGILADMLEGGEWENHSYLSVARVRQYEKHHSDLKNLKQIIRKYCPADYKSFFSKDGTDNYCAYIGDDIETKERKSVKKCKQEDFYKRVKALLKKAVEKGCPEKTVAAISQDIDAQAFLPLQVTKDNGVIPHQVHEMELVQILKNAEKYYPFLQEKDSDGNITSDKILQLFKFRIPYYVGPLNSNVGKNSWIVRRAEGKIYPWNFEEKVDLDKSEEGFIRRMTNPCTYMLGADVLPKYSLLYSEFMVLNELNNVKVCGEKLSVELKQKIVKELFMKIRRVTVRKLCDKLKAEGFIPKNQNRKNVLIQPNDITGIDGDFNASLVSYIEMQKIFGKELEKYSVQQMCERIIFLLTIHHDDKKRLQNRIRSEYTKEQISDEQLQKVIRLSYQGWGRLSAEFLTGLNGADIETGEVFTIIKALRQTNDNLMQLLSGRYTFAEALEEHNNKKRKNISALTYDNIMENIIASPAIKRSAWQSISIAIELRKVMGREPKRIFIEVARGPEEKKRTVSRKNQLLELYKSIKDESRDWKKELENTAESDFRSVKLFLYYTQLGRCMYTGEPIELGQLVNTTVYDRNHITVYDRDHIYPQSLTKDDSLNNLVLVKRVENAKKGNGLISADIQKRMRGFWSILKESGLISNEKFNRLIRTTPLSDEELAGFINRQLVETRQSSKIVADLFQQIYPSTQVVYVKAKTVSDFRHETLDMVKVRSLNDLHHAKDAYLNIVVGNVYHEKFTGNPLTWLKKNQDRNYSLNQMFNFDQIRKTKDGNLYIWKKGNAGSIATVRKTMLRNDILYTRQATENKNGGLFDQNIVSSKNKPFIPVKKGMEVNKYGGYKGVTPAYFALVEYTDKKGNRQRMIEAVPLYLQADIEKDMSVLVDFYKNILGINNPRIILNRIKKNSLVKINGYLIHLRGTTGFSASQLKAQNAVEFCLPKNMEDYVKILENYEKHKKEEGRENTNSQNTISKWDKITKDLNLQLYDLFIDKMETSIYQYRPANQAGKLKENRGVFDSLTVEDQCFVLNQILMLFACKPVTANLSLINGSKNAGSMALPKIISNAKSAYLIHQSVTGLFEQKIDLLTVK

SEQ ID NO: 4482 - protein, 1409 aa, unidentified
  REGION 1..1409: note = Description of Unknown: Cas Enzyme sequence
MTGNDEFYIGIDLGTSSVGWAVTDQNYKILKYKDKNLWGTRLFEEGQTAQSRREKRSLRRRLKRRVHRIKLLQDIFKDEIAKVDNKFFLRLNESKYYKEDKDESLLTDDTLFADINYTDKDFYKEYPTIFHLRKDLMESDDKKDIRLIYLALHHIIKNRGNFLHEGSIENITDFKKSFTELNDYLKDNGYISFEEENFDKIEKTISNKSLKKSEKQKEFKAYIKDTNLIEILNGILGLSTNLAKLFDDEEIVDEKEKAKTIKLGEKEYDILRVEIEPILNERIALIDIIKGLYDWKIINDILKNSSTLSEYRVKLYEEHKEDLSKLKYLIKNYGTSEEYYKAFKDSKEKNNYVAYIGLNKKGKHKEAIDKISTGDDPLKQVNKYFKNILEKYKDNIKEEDIKLYEEILEKLSESNCLKKIRTNINGSIPYQLHKQELEKIIEKASKYYSFLNDKDENEYITKDKIIKIMEFKIPYYVGPLNPYHKDTSGHAWIEKKSNEKIYPWNFEKVVDTSKTAEEFILRMTNKCSYLIGEDVIPKASLLYQKFMLLNELNNMKIRGDYIAKGLKDDFIENLFKKFSKVTIKQLCNYYEAKYNVKLDKKDISGLDISFKSNLSSYITFKNIFKDKNIEINPYNEMIENIIKYKTIYGDNKEIFERKIRKDYSDILTEEDIRKINTLKFSGFGNLSRKLLLEVPGKSPETGESFENIMEALESTNDNLMEILASVNNKRGYTFLENINEINKGNDIDKKELTYENIMNERYISPAVKKSTWQALKIIEEIIKVKGCLPKKVFLETTREEDKVKKRKSSRKEQIKELLKNINEEYFEQDKNNLETLTEDQLRNEKIYLYYKQLGKSMYSDTLINFHDLIHNNTMYDIDHIYPYSKSGDDSIVNKVLVTKDENNLKQDNYPLSEEIRIKNTARWKMLLDKNLISEETFRRLTRNTPLTSEELSSFVARQLVETSQSIKILKDVLEEYYKDIDVNMIKVSVSKKMREALGIKKVRELNNFHHAHDAYLAVLSGDIYTRRFTKNIHKYFKDDNLTSEERKRRRDYDLDKLFVNDVIIKKFKKKSDNNETIVEETKIWSPIRINEIREMMDTSNILVTKKIEESHGNFYDETLYKKTDKNTSMRSLKEGRLSDISKYGGFNSLSTAYFFIVKFKEKNKEKIQIISLPVIDMKKIKNKDDLRNYCINTLGMKDPIILVEKVRQNTKITYNNHKYRITGKDSGGLRFILNNNVELYLENDKVSDLYHILLYLNKYNKISNKYLKDKKLIFASEEEKELFEKTEHKIRKYYEKNDWFILEEDTLNNVYLLFKEKCETIYKNMKYNLKDIFINSEDQFYNLSFYEKSFVIKEALKLLNTTAETPNFENLGFDKKPGRILISCNIDNKKIYIHNESVTGIFENKKRIK

SEQ ID NO: 4483 - protein, 1399 aa, unidentified
  REGION 1..1399: note = Description of Unknown: Cas Enzyme sequence
MGKQQFNDYYLGFDIGTNSVGWAVTDLQYKLLRFNKKDMWGSRLFEEAKTAKDRRVYRNSRRRLERRKRRLKLLEELFMDEISKVDSTFFKRLEESNLYNEDKSTKFNYPLFNDKNYTDIDFYNEYKTIYHLRKDLIFEDRQFDIRLIYLALHHILKYRGHFIFEGQSFEDIKSFDSIFAELQAWILENFELDINSNTKEKLEEIILSNKNKSNKKTDLKELFEDKRVQAIFNLGIGSKVDLKDVFNNEELKDQKICFAEIDYENEKRDEFYQLLGENIFIVDLAKKIYDFMVLKKILKNSDSFSESKVALYDEHKKDLDSLKYIFKKYLKHSDYYKFFRSNSEKINYPSYIGLSKIKSKQILKENRCSISDLNKELKKYLNNLEIEPADEKILKNILLKIDENKFLEKLKSGENSTVPYQVHEIELIKILENQSKYYPFLKENRDGKTIYEKIIMLFKFRIPYYVGPLNTDKNVKGSNTWVVRKDENNKSPITPWNFEEKVDTQKSAEEFIKRMTNRCTYLKGEDVIPKNSLVYEEFILLNELNKVTVDNAHLHFSLKNELIEELFKTTTKVTKKKFLEFLKKKQAVNDVESITGIGLEFNGKLQGYNTFRKILGDKIENANVKNFVERCIELKCLYGTDKKLFKNAVGNEYKNYNITEEEFSKINKLSYNQWGRISKKLLLDISFEKNDNTEKFESVMEALRSTNYNLMELLSEKFNLQEKINEINGEEDFSNFDIEKYVNELYVSPSVKRSIIQSYKIAMEIKKITGKNPKKIFIEVAKGGGEKGKTTEKRKDKIKELYKTMKNPLAEYCSNLQDLSSEIDKYDDNRLRQKKLFLYFMQMGKSMYTGKEIDLDNLFNSNIYDIDHIYPQSKVKDDSFDNTVLVEKEINHNKDNELLKPEIQSKMKNYWIFLRENKFISKEKYNRLTRNYDFTDDELGDFVARQLVTTRQSTKEVAKLFEKLFEGSKVVYSKASLVSEFREKYNIVKVREVNDAHHAQDAYLNIVVGNVFNTKFTENYWKFIKENKKKNKENPNKKEGYNFKNIYESDVFRNEDVAWVFSKTNTKYNTINTIEKMVYRKTVNITEMLVEGKGQLFNLTIKDKTQLKKNVGNIVAITPKALKNRNISFNSVELAKKYGYFDSLNNAYFVLFKYDNKGKEKIGFDSITIVDKEKLKNNSDIEKFLENKGNKNVKLIRKIFRNQKVLINGHPYLVKSFNKNGVIKFDNCKVLYLEEDYIKYTNNAIKFEKNNLNINTNNQRYIVNFLKKKNKNEINETYEECIERLHNEFNLLFLKLYEILKSPIYKNYKLQEFLSNKNRVEIVDKYDVFKNLTLYNKSKLIKEFLNYFKIENNELNLTLIEIDKKANCLQKTLQEDLIRDFIILDESVTGLFVKSERLE

SEQ ID NO: 4484 - protein, 1405 aa, unidentified
  REGION 1..1405: note = Description of Unknown: Cas Enzyme sequence
MGKQQFNDYYLGFDIGTNSVGWAVTDLQYNLLRFNKKDMWGSRLFEEAKTAKDRRIYRNSRRRLERRKRRLKLLEELFLEEVSKVDSTFFKRLEESNLYNEDKSVQFNYPLFNDKNYTDVDFYNQYKTIYHLRKALLLEDKKFDIRLLYLALHHILKYRGHFIFEGQSFEEINTFDSIFAELQAWILENLESENIKSDIDSNKKEEIEKIILSDNNKTYKKTAFKNLFADKRLIAIFNMGIGSKVDLKDVFDNEELKDQKICFAEIDYENEKRDELYQLLGENIFIVDLAKKTYDFMVLKKILKNSDSFSESKVALYCEHKKDLDTLKYIFKKYLKPSDYYRFFRSNSEKNNYSSYIGLSKIKSKQVIKENRCSLAELYKELKKTYLKDLKVEIEDEELFNNVLLKIDENKFLEKLKSGENSTVPYQVHEIELIKILENQSKYYPFLKENRDGKTIYEKIIMLFKFRIPYYVGPLNTDKNVKGSNTWVVRKDENNKSPITPWNFEEKVDTQKSAEEFIKRMTNRCTYLKGEDVIPKNSLVYEEFILLNELNKVTVDNAHLHFSLKNELIEELFKTTTKVTKKKFLEFLKKKQAVNDVESITGIGLEFNGKLQGYNTFRKILGDKIENANVKNFVERCIELKCLYGTDKKLFKNAVGNEYKNYNITEEEFSKINKLSYNQWGRISKKLLLDISFEKNDNTEKFESVMEALRSTNYNLMELLSEKFNLQEKINEINGEEDFSNFDIEKYVNELYVSPSVKRSIIQSYKIAMEIKKITGKNPKKIFIEVAKGGGEKGKTTEKRKDKIKELYKTMKNPLAEYCSNLQDLSSEIDKYDDNRLRQKKLFLYFMQMGKSMYTGKEIDLDNLFNSNIYDIDHIYPQSKVKDDSFDNTVLVEKEINHNKDNELLKPEIQSKMKNYWIFLRENKFISKEKYNRLTRNYDFTDDELGDFVARQLVTTRQSTKEVAKLFEKLFEGSKVVYSKASLVSEFREKYNIVKVREVNDAHHAQDAYLNIVVGNVFNTKFTENYWKFIKENKRRNEENPNKKEGYNFKNIYESDVFRNEDVAWVFSKTDTKYNTINTIENMVYRKTVNITEMITEGKGQLFNLTIKDKTQLKKNVGNIVAITPKALKNRNISFNSVELAKKYGYFDSLNNAYFVLFKYEEKGKEKIGFDSITIVDKEKLKNNSDIEKFLENKGNKNVKLIRKIFKNQKVLIDGHPYLVKSYNKQKQIKFYNYKMLYLDKTNLKFASNAIKFEKNNLDINTNNQRYIVNFLKKKNKNEINETYEECIERLHNEFNLLFLKLYEILKSPIYKNYKLQEFLSNKNRVEIVDKYDVFKNLTLYNKSKLIKEFLNYFKIENNELNFSLIEIDKKANCLQKTLQEDLIRDFVILDESVTGLFVKLERLE

SEQ ID NO: 4485 - protein, 1346 aa, unidentified
  REGION 1..1346: note = Description of Unknown: Cas Enzyme sequence
MKKCNREEYYVGLDIGTNSVGWAVATPDYRIPKFRGHKMWGSRLFAEGKRAAERRQFRTNRRRLARRRDRLQILEELFAEEMAKVDNTFFMRLKESKFFLEDKTIKEKHILFSTDKFDADRFYKDNPTIYHVRKRLMEEEPQDIRELFLAVHHILKYRGHFLFAGSLEQNGDSIEELVRTLLGKQGLAILDDTIDSNEMVNILKNNEKTKSDRKKAVQELWNPLKDKAKKAQAAEMAGLVLGLNSDISKLFDNSDYKDLKINFSSGDYDEKRDDYANSIGDDIVLLDTMKALYDTLILSQILQGKRSISAAKVEDYNTHKEQLRALKAILKPHKRLYNEMFRENNKEKLLNYVAYISSYSEGKRVNREGFYKYVQAVLKQVDDSDSKQDILEAIRLETFLPLLRVKDNAVIPHQIHQKELEVILEKACKKYKFLNDVSEGVSVKDKIIQLFTFRIPYYVGPLNPHSGETVADRKQGTGWVVRKQRGKVYPWNFADMVDVKASAEAFITNLTNKCTYLIGEDVLPKRSLLYSEFMLLNELNMIKYDGHELPVAIKQLYIEQVFKQEHKKQTKGRVLDFLKRNGLITGSATAVITGMDDAIKGDLQSYRDMVRIFGTGFDHSMAERIIRWVTLFGEAKDILQDKIREVYGDRISARQMQAVKKLKYTDWGRLSQTFLIAVKGCDKSGLERNIITCLRESNQNLMEILSDRGTYMQQIKDWNRQHAMNSTDTLTYQLVDDLYVAPSVKRAIWQSLCIVEELVKIMGQAPKKIFVEVTRTKQAEKTKKDSRQDRLKALYAAIGKEGAAWKKEIEKHQAGDFRRKKLYLYYTQMGRCMYSNEPIPMDALFTSAYDIDHIYPQSLTKDDSWDNLALVKSQLNKEKSDQYPLRSEIREKNKAHWQYLCRAGFISEKKYERLIRTTELTAEELSGFIARQLVETSQATKAVTGLLERIYTNTEICFVKAETVSQFRHQNNFIKIRELNNYHHAKDAYLNIVVGNVYHEKFTKNPWEFIARSTERRPYNLNRMYDFDLLKQGRVIWQVPKSLETVQAMMKSNDVRITKKLLVQKGELYNATITKAHKAKEGEHFPLKGADARLRDVHRYGGYEKIKIAYYSVFSCRKKASNTIHTLIIPIPVYKAGLLQTEADLTAYAWQTKQKTKPIKDIYSAITPIYKKLCINTVMKINGFKYFLGGRTEDYICLYPAIPVVLDEQAAAYLKAVSKVGRADDVENTAQAIDLITAEANEAFYEVLLKKMEEKIFAKSYQSRMEKLASEPVRARFRELSVGAQCSCLLEILNLLANNKTTSNLKKWLGVTMSRRKQPMDLTKLEECIVYETSITGLYEKAVSLL

SEQ ID NO: 4486 - protein, 1351 aa, unidentified
  REGION 1..1351: note = Description of Unknown: Cas Enzyme sequence
MKKRNREEYYVGLDIGTSSVGWAVATPDYRIPKFRGHKMWGSRLFAEGKRAAERRQFRTNRRRLARRRDRLQILEELFAEEMAKVDNTFFMRLKESKFFLEDKTVKEKHILFSTDKFDADRFYKDNPTIYHVRKRLMEEEPQDIRELFLAVHHILKYRGHFLFAGSLEQNGASIEELVRTLLGKQGLAILDDTIDSNEMVKILKNTGETKSDRKKAVQKLWNPLKDKVKKAQAAEMAGLVLGLKSDISKLFANSDYKDLDSSIKNINFSSGDYEEKRNDYANSIGDDIVLLDTMKALYDTLILSHILQGKRSISAAKVEDYNTHRQQLRALKAILKPHKHLYNEMFRENNKEKLSNYVAYISSYSEGKRVNREGFYKYVQAVLKQVDDSPSKAAILEAIRLETFLPLLRVKDNAVIPHQIHQAELEAILETARKKYKFLNDVSDGVSVKDKIIQLFTFRIPYYVGPLNPHSGETVAGRKQGTGWVVRKQQGKVYPWNFADMVDVKASAEAFITNLTNKCTYLIGEDVLPKCSLLYSEFMLLNELNMIKYDGHELPVAIKRLYIEQVFKQEHKKQTKGRVLDFLKRNGLITGSARAVITGMDDSIKGDLQSYRDMVRIFGAGFDHSMAERIIRWVTLFGEAKDILENKIREVYGNSISDSQMRAIKKLKYADWGRLSQAFFIKIIGCDKSGVERNIITCLRESSQNLMEILSDQGTYIKQIKVWNHQHTTNMMDTLDYQLVDDLYVAPSVKRSIWQSLCIVEELVKIMGQAPKKIFVEVTRTNQAEKSKKDSRKKRLVELYTAIGKEGAAWKKEIEKHQAGDFKRKKLYLYYTQMGRCMYSHEPIAMDALFTSAYDIDHIYPQSLTKDDSWDNLVLVKSQLNKEKSDQYPLRPAIREKNKAHWQYLCRAGFISEKKYERLMRTTELTAEELSGFIARQLVETSQATKAVIGLLERIYKHTDICFVKAETVSQFRHQHNFIKIRELNNYHHAKDAYLNIVVGNVYHEKFTKNPREFIARSTERKPYNLNRMYDFDLLKQGRVIWQVPKSLETVQAMMKSNDVRITKKLLVQKGELYDATITKAHKAGEGKNFPLKGADARLRDVHRYGGYEKIKIAYYSVFSCCKKASDSIHTLIIPIPVYAAGLLQTEADLTAYVWQTKQKTKPIKDIYSTITPIYKKLCINTVMKIDGFKYFLGGRTEDYICLYPAIPVVLDEQAAAYLKAVSKVGRADDVENTAQAIDLITAEANEAFYDVLLKKMEAKIFVKAYQERVEKLASETARARFRELSVGAQCSCLLEILNLLANNKTTSNLKKWLGVTMSRRKQPMDLTKLEECIVYETSITGLYEKAVSLL

SEQ ID NO: 4487 - protein, 1363 aa, unidentified
  REGION 1..1363: note = Description of Unknown: Cas Enzyme sequence
MRKNKYGDYYLGLDMGTSSVGWAVTDTNYNILKFNAKALWGIRLFEEAKSAAGTRLYRSQRRRIDRVSWRISILQELFSEVIAKVDPGFFMRLKESRLRLEDKKVPLKYNLFIDKNYTDIDFYKQYPTMYHLRYALATREECFDVRLLYLAIQHIAKHRGHFLFAGLDASPITDFRNIYDKLEEYIKEELELADWSCQNIDKMEEVLSNSNLNVTAKKKELEKLLPRDNKKCKALISFLSGGKAKMSELFDDENLKLCEKDSFGFRDDDFETIMPIIEADLGDRIEGIFLLKSIYDWSILAKILGINGQIQNQKYKFISSSKVDVYNQHREDLVTLKKILKGSVQYNKIFRMKKEGSYAYYISGKQSQEDFCKTLQKIVTNDQLLKRKSEQVTSFEQVKDAEDGLLYRIANGLAFPKQVTKENGIIPIQVNLVELDAILQNAEKYLPFLSEVDADGLTISDKIKAIVKFRIPYYVGPLAGSKYSKEKGRCWVVRKNEKIYPWNFDKVVDLEACAEKFIINMTAKCTYLLGEDVLPKNSLLYSEFMMRNELNSLTIDGERVSSELLNKIYNHFTTKNKITKKNIKEYLKTENIYCEDIGGIDDVVKSNLKSFKDFSRIFGQDYVVCHTKQIEDIIRWITLFCDEKDLLRKKIISEYPEISAEKLEEIKKLKYKDWGRLSAALLNGEKIAYIDDSTGEVITIISALRHTNKNFMELLSNSCEYKFIDKIQKFNKSDVNTSENITYKDVEKLYVSPAVKRSIWQTLSIIKELQLILGHAPKKVFLEMAREKQESQRTISRLNRLKELYKECKDEEIFLSSSLEEKTDEDLRRDKLYLYYTQLGRCMYTGERIEISDLFNDNLYDIDHIYPRSKTKDDSIDNRVLVRKNMNSKKSDKYPLNENIRSKMRAFWKDLYERGYISQKKYERLIRVNPLTDDELAGFINRQIVETRQSTKAVAELLQSYFGSDNVIFSKAGNVSDFRQKYGFIKSRDVNDLHHAKDAYLNIVVGNAYYTKFTKSPINYIKNNHDFKYSLNPDKFYNFPIERAGVIAWVPGEDGTIAIVKKMMSKNNILFTRMAVQGKGQIFDQNPVAKAKDKWPLKQGLPTEVYGGYNSLTTSYFALVESLGKKGKKQRSLEAVPIIFADKQKNVIEKYLSTNSNLVNPKIILPKIRKFSLLYVNGYPMHIASCTGKQITFYSARQLILPDDEVTYVKSIFNCEEKIQYNESIIYDLQKDETSKQIAKKRLQYYEDRFGISRVRNLKLYQLLVAKCADKSFYNRPASQYENLKNNEDVFASLKLFEQIKVLEQIFKLFKCGSASANLKLLGLGAYCGIPKIGMTLKDKTQIILVNQSVTGVFEQAIDLLSV

SEQ ID NO: 4488 - protein, 1357 aa, unidentified
  REGION 1..1357: note = Description of Unknown: Cas Enzyme sequence
MNNKEYFLGLDIGTGSVGWAVTDTQYNLIKINRKYAWGAVLFDTAKGAEERRVNRCARRRYQREKQRINLLQELFEEEIYKVDSGFFHRLNESRYVYADKRDEKGEKPELPYSLFVDENYTDVDYHREFPTVYHLRKALMTEDRAFDVRLLYLAIAHIIRNRGHFLSNMGMDEVNLDFSKIFGDLMNCWKENMEDESRNSVLELENETIENIEKIMKNSELTKTAKKQKILEELSGFSKEFKELIALITGGKVSLAKLFDKKEYDTLEIDKICFDEASFEENEEIYATNLDDYFEIITKAKAVYDWMILSNIFKDDKSGYLSCAKVADYEKHKRDLKNLKEAIRNDSIGDEEDKRNLYKQTFGVPKKGEENYSKYIGMTASKGSKFVIDGAKCSKYDFYKFVKKNIIPKLKDGELKEYIEKEISLESFMPKTRVKENAIIPYQIHAKELKKILECAEAYMPFLKERDDSGKTVSEKIMMLLTFRVPYYVGPLNTASSQAWVKRNGTGRVTPWNFETMINVDLSAEKFIERMTSKCTYLKNEKVLPKSSLVYEEYMVLNELNKLQIKSEPISVELKNDIYHDLFERKLKVTLKKLVDYLKREKGYTDITKEDISGIDIDFKSSLKSYHAFKREFTDVNLSESEKEDIIKDMTLFGAEPKLLKKRLYAKFPDYESQLNSLIKSLNCNGWGRLSYKLLNGIAVEIPGQGMVGTVLYQLRNTNNNLMEILEKSGSPYAKLIEEENKTDDSHKINYELVKELYVSPATKRQIWKAIQVVEEISHAMGHPPKRLFVEMAREHMESKRSITRKNKLLDLYKSIKNEKELYEELKGQPEDKLRSDKLYLYYTQFGTCAYTGKKIELSELFNNNLYDIDHIYPQSKTADDSLDNRVLVCKDSNGYKSDVYPIDSDIQKKMWNIWYLWYSKGLISKEKYKRLTRTSELTNDELTGFINRQLVETRQSTKEIMKLMRQLLPDTELVYSKAGNVSRFRQKYKILKVRELNDYHHARDAYLNIVVGNAYHLRFTKDIRNYFMKYGTYRTYNLKKMFEKDITFQEEVAWRAGERGTIQTVLRFMNCDKVLVTRQTFERKGALFDVQPKKKGEGQVPIKSGINNERLAVIEKYGGYNGATISYFTLIEGLKNNKNKKRYIIPVPLYLCHKIEKDELYAKQFFEKESKLSNIRIIRKILIQTLMIDEGFKMRLAGKSGTQLIFHNSNELSLNKKHFKCLKEIEKFILDRKDKPDATINEKSELAGNQMLDIYNIFIDKLMNSVYSKELGKHGEFLNNGLEQFNKLSLEDQAIQLHELLKFFQCTPEMPDLSRVGGSKSIGAIRSSMDVTKRSKLAIIHQSVTGIYEKIERINE

SEQ ID NO: 4489 - protein, 1367 aa, unidentified
  REGION 1..1367: note = Description of Unknown: Cas Enzyme sequence
MKKQQFSDYYLGFDIGTNSVGWCVTDLNYNVLRFNKKDMWGSRLFDEAKTAAERRVQRNSRRRLKRRKWRLNLLEEIFSDEILKIDSNFFRRLKESSLWLEDKSSKEKFTLFNDDNYKDYDFYKQYPTIFHLRNELIKNPEKKDIRLVYLALHSIFKSRGHFLFEGQNLKDIKNFETLYNNLMAFLEDNDIYKNIDSSYIGNLENIICDSKKGLKDKEKEFKEIFNSDKQLVGFFKLSVGSSVSLNDLFDTDEYKKGEVEKEKISFREQIYEDDKPIYYSILGEKIEFLDIAKSFYDFMVLNNILADSQYISEAKVKLYDEHKRDLKNLKYIIRKYNKENYDKLFKDKNESNYSAYIGLNKEKGKKEVIEKSRLKIDDFAKIIKGYLPKAEKIDEKDRSIFNEILDKIELKTILPKQRISDNGTLPYQIHEAELEKILENQAKYYDFLNHEENGISTKDKLLMTFKFRIPYYVGPLNSYHKNKGGNSWIVRKEEGKILPWNFEQKVDIEKSAEEFIKRMTNKCTYLNGEDVIPKDSFLYSEYIILNELNKVQVNDEFLNKEIKKKIIEDLFKKSKKISEKNFREYLLVNQITNKTVELKGVKDAFNSNYVSYIKFKDIFGDKLNLDIYKEISEKSILWKCLYGDDKKIFEKKIKSVYGDILTKDEIKKINSFKFNTWGRLSEKLLTEIEFIDLETGECYSSVMDALRRTNYNLMELLSSKFTLQENIDNENKEVSEFSYRDLVEESYVSPSLKRAILQTLKIYEEIRKITGRIPKKVFIEMARGGDETMKNKKIPARQEQLKKLYDSCGKDISNFSIDIKEMKNSLNSYDNNSLRQKKLYLYYLQFGKCMYTGKEIDLNRLLQNNDTYDIDHIYPRSKVIKDDSFDNLVLVLKNENAEKSNEYPLKKEIQEKMKSFWKFLKEKNFISDEKYKRLTGKDEFELRGFMARQLVNVRQTTKEVGKILQQIEPEIKIVYSKAEISSSFREMFDFIKVRELNDTHHAKDAYLNIVAGNVYNTKFTEKPYRYLQEIKENYDVKKIYNYDIKNAWDKEKSLEIVKKNMEKNTVNITRFIKEEKGQLFDLNPIRKGETSNEIIAIKPKFYEGSTEKLNEKYGYYKSLNPAYFIYVEHKEKNKIIRSFERVNLVDVNKIKDEKSLIKYLIENKGLIEPKVIKKVYKRQVILINNFPYSIVALDSNKLMDFENLKPLFLERKYEKILKNAIKFLEDNQGKTEEYYKFLYLKKKDRNEKNETIDSVKERYNIEFNEMYDKFLEKLDSKDYKNYINNKKYSELVNVKEKFIKLNLFDKAFTLKSFLDLFNRKTMADFSKVGLTKYLGKIQKISSNVLSKNELHLLEESVTGLFVKKIKL

SEQ ID NO: 4490 - protein, 1373 aa, unidentified
  REGION 1..1373: note = Description of Unknown: Cas Enzyme sequence
MKKQQFSDYYLGFDIGTNSVGWCVTDLNYNVLRFNKKDMWGSRLFSEAKTAAERRVQRNSRRRLKRRKWRLNLLEEIFSDEILKIDSNFFRRLKESTLWFEDKSSKEKFTLFNDDNYKDYDFYRQYPTIFHLRNELIKNPEKKDIRLVYLALHSIFKSRGHFLFEGQNLEEVENFEILYNNLIAFLEDNDIYKNIDSSYIGNLENIICDSKKGLKDKEKEFKEIFNSDKQLVAFFKLSVGSSVSLNDLFDTDEYKKGEVEKEKISFREQIYEDDKPIYYSILGEKIEFLDIAKSFYDFMVLNNILADSQYISEAKVKLYDEHKRDLKNLKYIIRKYNKENYDKLFKDKNESNYSAYIGLNKEKGKKEVIEKSRLKIDDFAKIIKGYLPKAEKIDEKDRSIFNEILDKIELKTILPKQRISDNGTLPYQIHEAELEKILENQAKYYDFLNHEENGISTKDKLIMTFKFRIPYYVGPLNSYHKNKGGNSWIVRKEEGKILPWNFEQKVDIEKSAEEFIKRMTNKCTYLNGEDVIPKDSFLYSEYIILNELNKVQVNNEFLNKEIKNKIIEDLFKKSKKISEKNLKEYLLVNQITNKIVELDGIKDAFNCSYVSYIKFKDIFGDKLNLDIYKEISEKSILWKCLYGDDKKIFEKKIKSVYGDILTKDEIKKINSFKFNTWGRLSEKLLTEIEFIDLETGECYSSVMDALRRTNYNLMELLSLKFTLQENIDNENKEVSEFSYRDLVEESYVSPSLKRAILQTLKIYEEIRKITGRIPKKVFIEMARGGDETMKNKKIPARQEQLKKLYDSCGKDISNFSIDIKEMKNSLNSYDNNSLRQKKLYLYYLQFGKCMYTGKEIDLNRLLQNNDTYDIDHIYPRSKIVKDDSFDNLALVLKDENAKKGNEYPIDKDIQANMKGFWKFLKEKNFISDEKYKRLTGKDELELRGFMKRQLVNVRQTTKEVGKILQQIEPEIKIVYSKAEIASSFREMFDFIKVRELNDTHHAKDAYLNIVAGNVYNTKFTEKFFNKKEKNKENYDVKKIYNYDIKNAWDKEKSLEIVKKNMEKNTVNITKFIKEEKGELFDVTILKKGNSKEIVAIKPKLYNGELDNLSQKYGYYTSLKAAYFIYVEHEKKNKKVKTFERLTKIDTALIKNETDLIKYLVSQKKLVNPKIIKKIYKEQTLIIDNYPYTFTGVDSNKKVELKNKKQLYLEKKYEQILKNALKFVEDNQGETEENYKFIYLKKRNSTEKNETIDAVKERYNIEFDEMYDKFLEKLNSKDYKNYINSKLYTNFLDSKEKFKKLKLWEKSLILREFLKIFNKNTYGKYEIKDSQTEEKLFSFPEDTGRIRLGQSSLGNNKELLEESITGLFVKKIKL

SEQ ID NO: 4491 - protein, 162 aa, unidentified
  REGION 1..162: note = Description of Unknown: Cas Enzyme sequence
  MOD_RES 140..144: note = Any amino acid
MEKKSKKIYLGLDIGTDSVGYAVTDDQYNLLRVHGDDAWGSVIFDAASLSDERRSHRSARRRLDRRQQRINLLQEIFAKEISKVDDRFFIRLSESYRWREDVQDRYVFFNDEEYTDVQYMGEYPTIHHLICELMNNKNPXXXXXASGISGLRMVDNTQRTFP

SEQ ID NO: 4492 - protein, 1216 aa, unidentified
  REGION 1..1216: note = Description of Unknown: Cas Enzyme sequence
VRLVYLACAWLITHRGHFLNNLNVEKLDEIMDISSVYQNFINYFTENGYRRPWGEIDVSALSEALKQKTGVTVKNKELQNILLEGKKPEKSGTEEFPFSQDSIIRLLAGGQCKLKDVFCKEEYLDLGSISLGMDEEKFDEISGNIGEDYDLLIALRGLYDWSVLADILNGHFETISMAKVQIYEQHGKDLQILKYFVRKYVPDKYNEIFRKAKADNYVAYTGHMDKDTASQIKKKAKPEDFSKYVLKLMSPIKPEKTDLQSYEDMCERLKLNSFLPKQKNTDNRVIPHQLYEYELIRILKNASLYLPFLNEVRDGVSEMDKVVSIFRYKLPYYVGPLNKKSDFAWISRKAGKITPWNYKDMIDEDASENAFIKSMTNKCTYLPGEDVLPKDSLCYQKFMVLNELNNLKIDGRKVPVEVKQGIYHELFEKKKKVRRKDIEEYLISNNYLAEGSTELISGIDEQVHSCLSSYYAFRNLLSREILSENDVEKIIERASYAEDKSRVKKWLRKEYPDLSQDDVHYITKIKIKEFGKLSRTFLTELKGCNKQDGEMTTILRIMWETNDNLMEILSDKYTFRKAVEIFTQEYYTGKNQSLKERLDEMRVSNSVRRPVYRTLAVVKDIEKAFGKPDKIFVEMTRGGWADQKGKRTKSRKQQILELYTKCREEDVRDLKQQLESMGERVDSRLQGEHLFLYFMQFGKCAYSGMSIELEKLMSGSKEYDIDHIYPQAYVKDDSIINNKVLVLSKINGTKDNVYPISPEIRNRMQGQWNWWHHIGVISDEKYKRLIRSTPFTDDEKYGFINRQLTETSQSTKLIAGLLKERFPNIDIVYVKAGLVSDFRHEFDLPKSRTYNDLHHAVDAYLNVVTGNVYDMRFSKRWFSVDSEYSIKTKTVFSHPVNCQGILVWDGASMLAKVKKIAKKNTAHFVKFATFKTGGLFDQNPVKKGSGLIPLKVGLPTEKYGGYNSARIMFFIPVKYKLGKKNETIVMSVELLYGKHFLEDETFAQKYSLNRLESILGKKVDEVNFPLGMRPWKVNTMLSFQGFRACITGTQNNGKILLLQTMQQFMASEEWKLYIKKLDNFVEKNTINPNYLYDQDYDLINVDANIKLYDLYISKLQTTVYKNRMNIPIKTLLEGQKKFENLNILQQSQILLNIHSLFGRLSGGCDLMAIGGSKNCAKTTLNSAISNWKKLYSDVRIIDQSPSGIWEKCSENILELL

SEQ ID NO: 4493 - protein, 1362 aa, unidentified
  REGION 1..1362: note = Description of Unknown: Cas Enzyme sequence
  MOD_RES 284: note = Any amino acid
  MOD_RES 298: note = Any amino acid
LFAGIQGLSDKTFYQKYPTIYHPRKALMESQGKADIRLLYLAMHHMVKYRGNFLHYGEEINVQSSQELMQNFAKIDSALEGMGKKPLGLDEKKAASYVSLALSLRGISDSKRGLTDFFGSDDLFVKNVLCPLLAGGKVATSKIFDLDDDDEPDPKALCVRDASFDDDFAKISASYPDRDETNLILAVKAISDFVLLKRILGSSSSISAAMVNRYEMHKKDLVFLKKYVKSHCPDKFDAVFVDYEPEVANYVRYIGMGKIKGKRIRCEHCHREDFYAFLKKEVFXIDKKNLPSDPLIVXILARMDNGDYLPRQNSTDNGVFPYQLNLLEMKTILAQQKAFYPFLTQKDEEGYSGEEKIESILTYHIPYYVGPLMSPKEGDTRSSHAWVARSEAKITPWNFHKEGVIDFDQSAQNFIQRMLNKCTYLPDCYCLPKSSLLFSRYEVISFLNDIVINGKAIPAHEDATGDVSKDELLRKLFVKGNVTKASFISYLRNRYGKFDGSLLTFRSGKPIDTIDVSMKSQADFNAILTEDYVKTHEEQVESIIRDLTIFTEKGIIERRLRTLYGFKDEKTIRQIKGLNYAGFGRLSKELLRLKSDWLNPDTGEIMPIALIDAMLETGENLMEIINDPKFSFAQQINERQEAYVPELKQGAPKLDQVKAAVDDLYVSPSLKRPLIQAYEIVDEVNRILPMPVSEYYVECTRGEDFKQKGKKKPSRLENLLHLYAEARSQATKLLNEIDGKEETTFGDQELKKQIIENKDNLERCYQELVHDNTQGETMKFRSDKLFFYYTQLGRCMYSLKPIDLAELFADQQMYDIDHIIPQSLAKDDSIENRVLVLQDYNRKKTDKYPLPSDFLAPGAKSFYLYLRRIGLIGDKKLASLTRASGDYLSDEELASFTNRQLVSTNQAVSGLINVLQKFEKVNGKAPEVVYSKAGLVSDFRSEFELLKSRDANDFHHAHDAYLNIVVGRANHEYFRYMKGKGWFDAMHQKGQTTNPDHIFDTLSSEAKAKGKSKAPIKDLAGNVCWDYEHSLPQIEKDIYHRFDVMVTVRQFVQPGLFNKISIHKKSDWKDGNLFPLKKGMDPSVYGGYCDLTNGFFSLLNVQDKKGSFVATLLPIPNIYADKDHPGKILKYAQDIAGLKAVSVLIPCLRINTIVQKGKVSLLLSGKHTNTDTICKNFTEMRFSKDEIRSIRSISKLTEAIKNNRKFGLDPSKEDFDERIARLFGVSSDKKVIVISPAANEKRNKPVVLSFEDEQHLFEAILSKLTSEFLAKMSGGPANTGIYLRRDDVQGTFRALSIAKRAIVLNELLKETSANSAELGSLKLLGGPAIISIRHLGNVLEKGTRIIAQSVTGFYDKVLWEVK

SEQ ID NO: 4494 - protein, 1352 aa, unidentified
  REGION 1..1352: note = Description of Unknown: Cas Enzyme sequence
MKKDYFLGLDIGTDSVGYAVTDENYKLQRFHGSDAWGVTLFDAASLSDSRRTFRSARRRLDRRQQRVQLVQELFAKEIAKVDSRFFIRIKESRLFREDAGDQYPLFNENGFTDKNYYASYPTIHHLIADLMNNADPHDVRLVYLACAWLVAHRGHFLSNIDKTNIDNVKDFAVVYDTFMDYFRQNESAAPWGNIDRAAFENVLRTKQTVTKKKKALIEVLYAGQKPEKNATEDFIYSRDAIVTLLAGGKAAVKDLFCDEQYAEAGSFSLGMDEEKYTELETILAEDFELISQLRSLYDWTVLIDVLGENRTISEAKVAVYEQHKNDLDLLKKIVRKYMPDKYKEIFRNSGKANYVAYTNHGDGISADSIKKCGVEEFSKYILGTIEKIEPDEKDISVIEDIKNRLILRTFMPKQKTTDNRVIPHQLYWYELNKILLNAARYLPFLNEKDEDGISITEKLESIFLFRIPYYVGPLNSHSDFSWIVRKAEKIYPWNFERVVDLDASEQAFIEKLTNTCTYLPGETVLPKDSLSYHMYMVLNELNNLRINGEKISVELKQGIYNDLFMKMRKVTRKRLVEYLVANGIIEKSETDSISGIDIEIKSNLAPQIAFRRLLESGIITEEDAERIIERSAYAEDKTRLARWLSHEYKQLPEEDIKYITGLKIKDFGRLSMKFLRGLECPDPETGEAMTILQAMWTTQNNLMELLSDKYYFKRAVDDYRENYYASNKLTLEKRLDEMYISNAVRRPVFRTLAIVNDVVKAFGLPKKIFIEMARGGSKDQKGKRTKTRKQQILDLYAMCCEEDVKAMKEQLEAMGEAADSKLQGDKLFLYYMQLGKCMYSGEPIELEKLGTKTYDIDHIYPQAYVKDDSIINNKVLVLSSINGEKQDKYPLGNDIRQKMHGYWGYLNKIGLLGDEKYKRLTRNTPFTDDERYGFINRQLTETTQSTKAVAELLKGKYPDTEIVYVKARLTSEFRQEFDLLKSRTYNDLHHAVDAYLNIVTGNVYNMRFSKRWFDIHSNYSVKTKTLFTHPVICGRQQVWNGEESLKTVKNTAVKNTAHFTKYAFFKTGGLFDQMPVKASEGLVPLKKELPTEKYGGYNKSSIMFYIPTRYRAGKKSETLILSVEMAVGNKFLKDNDFAKEYAFFRLKAILGKDVDEVAFPMGIRPWKVNTVLSLDGFRTCITGIGSYGRCLAIQSFMPFSSDPFWQYYIKKIEVLAEKFSKNPKYVYDPEYDKVTFEQNLRLYDLYIEKLENSIYKKRINSPIQVVKKGREKFLLLDIQQQVICLSNLHQVFGRMAGGCDLQMIGGSKKTGATVNFSSTVSNWKKSYTDVRIIDSSVSGLWERKSENLLEIL

SEQ ID NO: 4495 - protein, 1352 aa, unidentified
  REGION 1..1352: note = Description of Unknown: Cas Enzyme sequence
VKENYYLGLDIGTNSVGYAVTDGGFNLLKYKGEPMWGSHVFEEGKQCSDRRMHRTARRRLDRRQQRVHLTQEIFAKAISEVDERFFVRLKESALFREDTSGRDTYIFFQDENYTDKEYHRDYPTIHHLIKELMEDTTPHDVRLVYLAVAWLMAHRGHFLSEVNKDNITELLDFDSIYGNLMELFTTPPWICSDKEEFKNILLLHQTIKNKERKFWGLLYEGKKPKTDEEDYINKEGMIRLLSGGTVEAGKLFNQKEFQEKISISLKKSEEDFQLLLDEMDEEDSEYLIRLRALYDWALLVDSLHGCSSISEAKVQDYAQHEADLKMLKNFVRKYCPNEYAAIFKNAEKENYASYVYNIPKGKRTKEYKKKITQEEFCDYLKKKLKDIQIEEEDQEIYQDMMFRLETYTFMPKQVTGDNRVIPYQLYYDELKKILENAENYLPFLKKVDEQGISNKTKLLSIFEFRIPYYVGPLCSASKYAWLKRKAEGKIYPWNFEEKVDLDQSEKAFINRMTNNCSYLPGETVLPQNSLLYCKFTVLNEINNIKINGIPISVECKQEIYRLFEENKKVTVDKIKKYLISNNYMEKEDVLGGIDITIKSSLKPQHDFKRLLHSKILNEKEVEQIIECITYSEEKSRVLRRLEREFPKLSDEDRRYLSKLKYSGFGRLSREFFTGIHGANKETGESFSIIQALWDTNDNLMQLLSDRYTFKDSIEEEQRQYYEEHPMTVESLLEEMYVSNAVKRPIYRTLDVIKDIQSVCKAAPKKIYIEMARGQEEGSNRKRSRKDQILELYKNMDKGEVRELSKQLEDCSDRELRSEVLFLYFMQLGRSMYSGKPIDIEKLKTNAYDVDHIYPQCRVKDDSLSNKVLVLSEENRAKGDKYPISAVIRQNMGEMWRVYHEKGLISDEKYRRLTRVSAFSNAEKMEFINRQLVETRQSTKALTRIFRYIFPETEIVFVKAGLVSDFRNEVLKCAKSRIVNDLHHAKDAYLNIVAGEVYHARFTSKFFKIDQDEYSVKTKAIFGNKVWNGKELVWDGEKDIARVKKILTKNSVHYTRYAFERKGGLFDQQPLRAASGLIERKAGLDTEKYGGYNKSTASYFLLVKYAEAGKKPKQDVMFVPIDLMESEQIIKSESYAKYYVRNAIAHIIGKSREIVQEVSFPLGMRKMKVNTLLTLDGFEAILASKSNGGKTLVFGSMMPLFVNNKKEIYIKRLESFSKKKKQNNFLFVDEVYDKITKEENRELFLFLTNKVEEEPYCLIFGSQLQVLHDKENEFENLNLEQQVETLLNLLSIFKTGRTTGCDLKLLGGAGQAGIFTESSKLSNWKKSYKDVRIVDISAAGLHRKTSQNLLELL

SEQ ID NO: 4496 - protein, 1375 aa, unidentified
  REGION 1..1375: note = Description of Unknown: Cas Enzyme sequence
MGNKKNYFVGLDIGTDSVGYAVTDEDYALCKHLSQPMWGATLFDSAKQCDERRGFRSARRRLNRREDRIRLLQELFCGEISKTDPHFFKRIAESALFSEDRTVLPSEAFGKEYHKKYPTIHHLITHLMASHEKEDIRYIYAACAWLTAHRGHFLNDIDADDAEQLSDITPLYDEFMQWFADNGYDTPWECDVDKFSEIISKKARIAEKEKEVYALAFGGKKPSDDAEEYPFSKAALIKLLCGGSVKPKNLLLADESAAEAEGSIKLSDAEGLETIMGELGDNAELLQKLSRIYDCAVLSKILSGYSSVSEEKVDEYNIHKKDLAELKRLIKKYRSDKYDDMFRSSAGKGYCAYSANYKSDIKPVKLTEHRNITRDDFYTAVKAVLKGIEPDGEKDAKSIEDILLRMELGTYMPKQVNPDNRVIPHQLYYSELKRILKNAEAHYPFLSEKDSDGITVSDKIKSVFLFRIPYFVGPLNRHSKNAWIERKAEGKIYPWNFKNVVDFDKSEQGFIDRMTNNCSYLPGEDVIPKNSVLYCKFSVLNEINNIKIDERPITAELKQRIFNELFMPNGKNKAKVTFRRLADFFVTEGLIAKGEESRISGIDTVIKSSMKPLFDFYRFTSSGTLSAADVEEIVKHSTYTEDKRRFREWLRGRYNLNDADLRYVSSKNYSDFGRLSEKLLNGIEGVNRETGEIGTVMHFLWETNDNLMQIIADNDKYNFRSTIEEMTKEYYSENPVSVTERLDEMGVSNAVKRPIMRVIDIMSDITKVMKCEPKKIFIEMTRGDLQGKKVGRTVSRKDALLEVYKGIKTGEAKEIIEEINSLGDEADNRLQSEKLFLYFQQMGKCAYCGRELHISQLGGEDYNIDHIWPQAYIKDDSIHNNKVLVHSEENGAKGDNYPIDEQIRTKMHDFWKYLRNANLINEEKYKRLTRNTPFSDTEKMGFINRQLVETSQSTKAVAEILKEMYPNTRIVYVKAGYVSEFRHDYGEIKERASGVKLTNEQKREMQLVKCRSINDIHHAKDAYLNIVVGNVIDERFTSRFFSVKKDKYSLKSKILFGNPIKSSPEVWDPKVHLPAVDKAMRNNYVHLTKYQTEQKGGFFDQMPLRAGNGSLIPRKNGLDPLKYGGYNKTSASFFALVKYKKGKKNELTLLPVDLLIAEKFKSDKEFAAEYARQKLGEKAENIEFPLGDRILKINTVFSLDGFKVCLAGKANGGALILLRSLETAFFTEDYTAYIKRIDTILEKKKKNPKYTVSEKFDRVSTEENELIFNYLKEKINGDKFLKMPGAHLTLGEEELEKFKNADIFGQMECISNLVLYLKTNRAGTCNMQIIGSSKGSGSLYLSASIGNWKYSDVRIVDRSASGLYETVSQNLKELL

SEQ ID NO: 4497 - protein, 1373 aa, unidentified
  REGION 1..1373: note = Description of Unknown: Cas Enzyme sequence
MYISHIKEIVNMRIAEDFYVGLDIGTDSVGYAVTDQSYKLLKFKGEPLWGVTIFDAAKQSAERRSFRTARRRIKRTQQRVALVGEIFAKEIGDVDPRFFIRRMESALYRDDVSPQDPYPVFSDEKYTDVNFYGEHPTIHHLLTELMTDCKPHDIRLVYIACAWLVAHRGHFLSEVDRDNVENVCDFNAVYDELMDHFTQNGMNKPWQCGALDFAGVMQQKEGVTQKEKDFYNLLFNGKKPKDDGQEACMCSRSRLIKLLCGGKVTADNLFCTDAYSDVPSFSLGMGDDELSVVLRELGDDAELVVRAKAVFDWAALVDVLAGKSTISEAKVFVYEQHKRDLKALKAFIRKYRADRYSEVFRVAGKDKKNYAAYSHNFKSVNLKDLKDSKLPSASKEDFSKYLISVVKGIKCDECDQPFYEDMMSRLELRSFLPKQVETDNRVIPYQLYWHELCQVLRNAEVYLPFLSERDEDGLTASDKIKSIFTFRVPYYVGPLNRQSEHAWLERKAEKIYPWNFDEVVDADMSEQAFIRRMTNTCTYLPDQPVLAKNSILNCRFNVLNEINNLKIDDVPISVNAKQGIYHDLFEKRARVTPKMIRQYCLSNGYMQEGQTLGGIDIAIKSTLRPQLDFAYLLNAGTLSEQDAERIIERITYSEDWMRLSRWLSREYPVLSEDDVRRISRQKYNDFGRLSRALLDGLEGMCERTGECGTIIHFLWDTNCNLMQLLSSDYTFTALIEQAKAEYYRSKPKNLSERLDDLYISNAVKRPIIRAMEIIKELTKALGAKPAKIFVEMARDAGDDKKGKRTQTRLNQLKELYKRIDSDDTRLLDAQLNEMGGDADNRLQSEALFLYYLQLGRCMYTGKPIQVDRLKENLYNIEHIYPQSYVKDDSILNNKVLVFSDINGQKSNQYPIDSNIRQNMRSYWDMLHKNGLINDEKHMRLTRGTSFTSDEKLGFINRQLVETRQSTKVVAMLLKEMYPEPDTKVVYVKAGLVSDFRHEFDMVKSRGVNDLHHAKDAYLNIVVGNVYYERFSKRWFSIDSEYSIKTKTIFGRPVRCGENIVWNGASSLNMIRSSLQKNNIHLTQYAFMRKGGLFDQMPQRRQEGLVPRKAGLDTEKYGGYAKPTATFYIVVRYICKQKRDVMLMPVELMFADRFLQDEGYARRYVQDTVSKILNKPISNIDFPLGMRPLKINTVLSFDGFLTCLSGKSSGGRYILLSHIMPLTVGTQWERYIKRIESFEEKRKKNSNIVANSKYDMITSKQNVELYDLFSDKIQNRPYNIMFGGLTQCLIDGREKFIGLPVEQQTSCLLQILLLFKTCRAGSCDLRAVGGSANTGIQYVSATLSNWQRYQKVCIVDASPAGLFMKTSVNLLELL

SEQ ID NO: 4498 - protein, 1371 aa, unidentified
  REGION 1..1371: note = Description of Unknown: Cas Enzyme sequence
MELKKSNKIYGDYYIGLDIGTNSVGIAATDPNYNLIKYKGEPVWCSHLFEEGHQCADRRGFRTARRRLDRRQQRVQLIDELFASEVGKVDKNFYIRKKESALWREDKTDSSTGNMYFNDEDYKDVDYHKEYPTIHHLIVALMEQDKAFDIRLVNIAIDWLVAHRGHFLSEISVKNVDKITDFETVYNKFIDFFNMEGLQDSYNAWIEADCKELEKIIKSKSGITTKKRELKQVIYGGKVPKEESVPYKYESMINFLAGGKIKAKDLFQQSEYESDFSFSISDDMEEILPQLGDDAEFVSKMTAIYEWSVLTDVLNGEKYISKAKVEVYDQHKKDLEQLKKFVRKYVPKEYYKIFKESGKELKNYTAYSYNLKSVDTTKDKVELPKQKANQKEFNDFLKKTLKLDKIEEQIEEEDLDFYEDMVSRIENAGFMPKQVNSDNRVIPHQLYQIELERILDKAENYLPFLKEKDADGLTVTEKIKSVFTFRVPYYVGPLHRDNSENAWIKRKAEGKILPWNFDQMVDKDASEKEFIRRMTNTCTYLPSESVLPKWSLLYSSFMVLNEINNIKVNGQSISVEAKQRIYHELFEKKAKVTVKMIRGFLESNNYMQKEDVLEGIDVTIKSSLKAHYEFRNLLAAGTLDKKDVERIIEHNTYVEDRGRYRNWINREFPNLSAEDKKYIGKLKYNDFGRISKKMLNDLQGDDKTTGEMGSIMHFLWTTNDNFMQLLSNDRYTFAERIEEERKKYYESKEFSVEDQLDEMYVSNAVKRPILRTLDVVDDVVSTLGHAPKKFFVEMARGADPDQKGRTTTRKQQLLELYKNVEEDTRILEKELEDMGDMANNRLQSEAIFLYYLQLGRCAYSGQAIDLSQIKSGKYNIDHIYPQCYVKDDSIVNNKVLVLSGINGDKKDIYPISEEIRTSQKAFWSKLRKANLMSDEKYKRLTRNTPFSDEEKQGFINRQLVETRQSMKAVTQILKQKYKDTEIVYVKARLASQFRQEFLTQKSRLINDLHHAKDAYLNAVVGNVYHERFTRKWFNISDKYTVNPKSLFKRTVQHGEEVIWDPDVHMDKVKSIYKKNNIKMTRYSFCQKGGLFDQMPLKKKADLVPLKKGMDPVKYGGYNKSGATFFIVAAYDKGTKKEVSFVPIELMFSEQFLKDEDFAKQYVQEQLQKLSAKTVSNVWFPLGMRKIKFKTVLSLDGYEVWVNGKANKGAIILLSSAESLIVSKEMEIYIKSLENYKAKQEKQLKVQLDEKYDGITREANEKLYYCFCDKLTKTIYSKMPGCQGEIVEQGVQEFKEKTVEAQINVLLSIIMLMKAGRAGSVDLTEIGGKKSGGTVYMGANLSSSPYDDIRIVDYSPAGLHRKESVNLKDFLK

SEQ ID NO: 4499 - protein, 1346 aa, unidentified
  REGION 1..1346: note = Description of Unknown: Cas Enzyme sequence
MKKFGDYYLGLDLGTSSIGWAVTDEKYDILRFNKKFMWGTHLFDTGNTATERRIFRTSRRRLKRKKNRIELLQTLFSEEISKKDFGFFQRLKESQYDIEDKTVKNKNTLFMDENYTDKDYHDEYPTIYHLRKALIDNEENAFEIRKLYLAISHILSHRGHFLFEGELSDNFEFDDIFNEFIKYLNEELDINFKVKSDVSLEIIKEILTDKMLNRTKKKEKLSELLEEEKNKIYQEIWKLLVGNEAKMATIFDNKEYEEAKISFSKGNYDEKEEEYESILGEKIVLVQKAKAIYDWMLLQNILKEDKYLSYSKVKLYNEHKNDLKILKDVLKNLDKKIYKEIFSENGLYEKYVKKNEKEEFYKKIKLYFNEENTDEIIKNILNKIELDNFLPKQKIKDNGVIPRQVHQKELEIILKNAEKYFSWLTGKDETGLSISEKIMKIFKFKIPYYVGPLNSKSPFAWIERKEYGKILPWNFEKMVDVSKTAEKFIKRMTNKCTYLPEKDVIPKNSLLYTKYMVLNELNNLKIRGEKIEVALKQKIYTELFQKNKKIGMKTLIEFLKSQNIVATKTEITGIDGTFNTSLGSYIDMKKIFGEEKIVRDSYKKMIEDIILWITLYGEEKSLIKSKIKEKYPDKVTPEEMKLILKLKYKDWSRLSKEFLTEIETMDEETGELISIIEMLWRKNENIMELLSYKYDFSNKIKEYNGINEEEKNITYGDLVKDLQVSPSVKKMIWRALVIVKEIKKVTNKSPKKVFIEMARDTQTEKKRTEKRKDKLLELYKNIKNDDSIKELEKNLKDKTNDDLKSKKLYLYYLQLGRCMYSGEIIRLEDLMNDNLYDIDHIYPQSKIKDDSFDNTVLVKKQINADKTDVYPIDKSIQVKCKALWTSLKEKGLMSNTKYERLTRTEEFSDDELAGFISRQIVETRQATKVLADLLKTIFGSDTRIVYVKAGLTSDFRQKFGIYKFRELNDYHHAHDGYLNIVTGNIYNTLFTDNPYNFIKDRNKENRTYNLNKVFERENDVWNPNTMISKIERYIYKIRPLFTRALYEQKGGFSDQNISSEKDKLRPLKSSGILSNTRYGGYDKIKNCYFFIVEYTEKKKRIRSIETLPIYIKKSITTKEDLEKYCKEDLKLKEPKILISKLNYKSLVYSDGHKYYINGKTGNALLVQNAIQVILTKENYEIYRKIHKNLEYFKLIYKDEKIREEKFLEKLPKILKKNKNDKELSENEISEKLEKLYKEIFTKIEIGIFSKFKSTLIDYTRECDEKISFTSLNNYNKSCLIQEILKCLKSQQGKFNMKYSHDYLKSYNIRLNKSKILENDFYIINQSPTGLFKKKVYLNKQVKELLK

SEQ ID NO: 4500 - protein, 1339 aa, unidentified
  REGION 1..1339: note = Description of Unknown: Cas Enzyme sequence
MKKFEDYYLGIDLGTSSIGWAVTNEKYDILRFNKKFMWGTHIFDTGNTAAERRIFRTSRRRLKRKKKRIELLQTLFSEEISKKDFGFFQRLKESQYFIEDKTIKNKNTLFMDKNYTDQDYHMEYPTIYHLRKALIDNEESAFEIRKLYLAISHILSHRGHFLFEGELSDNLDFDDIFNEFVKYLNEELNIDFKIKSDVSLQAIKEILTDKMLNRTKKKEKLSELLEEEKNKIYQEIWKLLVGNEAKMSTIFDDKEYEEAKIAFSKGNYDEKEEEYESILGEKILFVQKAKAIYDWMLLQNILKEDKYLSYSKVKLYNEHKNDLRILKEVLKKLDKKAYKEIFSENGLYENYVKKNRKEELYKKIKSYFNDENTDEIIKNILNKIELDSFLPKQKIKDNGVIPRQVHQKELEIILKNAEKYFSWLTKKDETGLSVSEKIMKIFKFKIPYYVGPLNSKSPFAWIERKEYGKILPWNFENMVDISKTAEKFIKRMTNKCTYLPEKDVIPKNSLLYTKYMVLNELNNLKIRGEKIKVELKQKIYTELFQKNKKIGMKILIEFLKSQNIVVTKAEITGIDGTFNTSLGSYIDMKKIFGEEKIVKDSYKKMIEDIILWITLYGEEKKLIKSKIEEKYPEKVTPEEIKLILKLKYKDWSRLSKEFLTEIETIDEETGEFVNIIEMLWRKNENIMELLSYKYDFSDRIKEYNGINKEEKNITYEDLIKDLQVSPSVKKMIWRALVIVKEIKKVTKKSPKKVFIEMARDNQTEKKRTEKRKDKLLELYKNIKNDDSIKELEKNLKEKTNDELKSKKLYLYYLQLGRCMYSGEVIRLEDLMNDNLYDIDHIYTQSKIKDDSFDNTVLVKKQINADKTDEYPIDKNIQNKCKAFWTSLKERGLMSNTKYERLTRTEGFSDDELAGFISRQLVETRQATKILANLLKVIFGSDTRVIYVKAGLTSDFRQKFGIYKFRELNDYHHAHDGYLNIITGNIYNTLFTDNPYNFIKNRKKDNRTYNLNKVFERENDVWNPNTMIPKVEKYIYKIRPLFTRASYEQKGGFSDQNISSKKDKLRPLKLSGVLSNTKYGGYDKIKNSYFFIVEYTEKKKRIRSIETLPIYIKNFIKNKNDLEKYCKENLKLQEPKILISKLNYKSLIYSNGHKYYINSKTANSVTVQNGIQITLIKENYETYRKIYKNLEYLKLIYKDQEIIEEKFLEKLPKLLKKSKNAKDLSEREISEKIEKVYEEISEKIEKGIFSKFKSTLIDYMKECDKKISFTLLNNFNKSCLIQEVLKCLKSQQGKFDMKYSHNYLKSYSIRLNKSKILENDFYIINQSPTGLFEKKVYLDK

SEQ ID NO: 4501 - protein, 1323 aa, unidentified
  REGION 1..1323: note = Description of Unknown: Cas Enzyme sequence
LKKNGNNKVMSDYYIGLDVGTNSVGWAVTDTDYQVLRFKGNSMWGARLFEEAVPAADRRAKRTSRRLLWRKQQRLQLLEMLFNNEICKVDPLFFIRMHNSNLKGTDRQSAWGDYTLFSDKTKEKEFHKKYPTFYHLRYELIKSKEPHDPRLIFLALHHILKNRGHFLFGMDDSSNYKKTGDLLDDLNQYLLDQHGKELQFLDKPKFQQIICNSKLSITEKKKLLKSTVQAVLPQEDDDIDISLISDALTGAKVKFSDLFNDESLKKAEPASFSLKDDLDEKYDEYYAVIGERIDLLLLLKSIFDAALLEQILGKHEYICEAKIEQYNLNKQDLKLLKRYVRELAPKKYKSIFDEKKDKLNNYAAYAGRTIGSGEYRCKKEDFCKYLKKELADMKNEPAYEELYKKIENDSLLPKLRGSENSVIPNQLQRRELTKILDNAESYLHFLQDKDENGLTIKEKIISIFDFRIPYYVGPLNKKSAHHWVERSDEKIYPWNFEKVVDLETSAERFIVNLTNRCTYTGDDVLPKDSLLYSKYMVLNELNPLKINGNPATVEQKKYVYDYLFVKNNNKVTKKGIKKCLLTAGLIAENDEITGVDDTIKSKLKSLHDFRTILDRHKDESMVEEIIQRVLVFGEDKKMLRNWLKRNYPCLSEEEIRSVCRMKYKDWGRLSKTFLTEIYSSDKNGEAKSIMDLLYNSNCNLNQLLSSEYSFKDNAEAYRQDKYGVKNSIRDMMDDMYLSPAVKRSIIQTLRIVDEIVDIKKSAPKKIFIEVAREHKDDEKGKRTKSRKDKLMELYHNCGQECNELFEQLRDHTDDSALRKDKLYLYYTQFGKCMYSGESISLDELDRGYDIDHIFPQSRVKDDSIDNRVLVKRQLNENKGNRYPIQEDIRTKMYTFWSMLKERAMISDKKYERLIRNYPLTDGELAAFVERQLVETRQSTRALAQILKNLYGEAGTKLVYSKAGNVSDFRQEFKFVKCRDINDLHHAKDAYLNIVVGNVYDTKFTENFFRNIHKENYSLNKVFSYVVPGAWEPERSAAVVRKMMDKNNILITRKAHMAKGQLSDQQLMPAGKGQLPIKQGMDVNLYGGYNKISGAYFCVVAHKDKKGNELRTIEPVYIYQQKLYERDPIRYCKEILGLNNPQIISPCILMDALLEIDGKKVNITGRFNDYILFKHAYQLIIGKSEEQYVKNIIKYVQRCEKSKKELPATTYDGINSEQNQVLWTHLLQKMSQKVYYQFFDDIHQECSIKSDVFSKLGLLDQCKQIQEILKLFKCDSRLANLSYIGGKNSKGKIYENKKLSMVKSAFLIHQSVTGLFEVKEDLLR

SEQ ID NO: 4502 - protein, 1326 aa, unidentified
  REGION 1..1326: note = Description of Unknown: Cas Enzyme sequence
MKSNGNQKRISDYYIGLDVGTDSVGWAVTDPEYNVPRFRGNAMWGVRLFESANTAAERRQYRTARRLNARKRQRLGLLELLFAEEISKTDPAFFIRMKESSLFGEDKTEISEYPLFNDENYDDRNYFKAYPTAYHLRNELISSDKPHDVRRVYLAIHHILKSRGHFLFDMELSDEYRTVGDLLDDFTERFRDEYGAEVKFKDKAAFVSVITDRNTGITEKKKLIKGLASVKSETEQLDQLDPMKALDMLTGAAVRLSDLFCDEDLKSAKSLTLDSDINEAADDLTETLGEGRFDLIMQLKQIFDAAKLAQMLGSHQYICEAKVEQFNTSKSDLRRLKVFVKENAPDEYNEIFCQKKDKLNNYAAYSGRTRRSGEYSCKREDFCKYLLKKLPGIEIADGYGDIFRKIKNNDFLPKLKGSENSVIPNQLHLKELRKILDNAEHYLEFLSAKDSEGISVKEKIISVFGFRIPYYVGPLNTKSPNSWVVRTDEKIYPWNFENNVDTEKSAEEFIKKLINKCPYTGDDVLPRESLLYSEFCVLNEINPLTVNGKPIPLEQKNEIFDELFLKSHSKVTKKSIGKFLLRKGYIKEGDEISGIDDTVKSKLKSYHDFSRIMDVRENREMVEKIIKAVTIFGDDRKMLKRWLKKNCGDLEKSQVDSICRLSYSDWGNLSETLLAGIYTPDENGEARSVIQMLHETNDNLMQLLSDRYYFRKNADEYRNENYAPSGSMIDMMDGMYLSPTVKRSLLQSIKIVDEIVDAEKSAPRKIFIEVARDRENDNAKERTVSRKAKLTELYKSCGKEYTELYNELLSRDESELRKDALYLYYTQLGICLYSGEKIELEKLSTDYDIDHIFPQSRIKDDSLDNRVLVKRKYNEEKGNNYPLNEEWQNKNKPLWRMLRDKHLISDKKYERLVRIEKLTEEELSSFVARQLVETRQSTKALCAILKTFYGDAGTKIVYSKAGNVSDFRHDNNIVKCRDVNDLHHAKDAYLNIVVGNVYDTKYTENFFRNIKKYADSDIYSLNAVFRFDVNGAWDKKRSMAKVKSVLQKNNILVSRRSYEAKGALFDLQIVPAGKGQLRIKEDKPIEKYGGYNKITGAYYCVVEHTVKGKRSRSIEPVFLYKKALYERDPVAYCREILSLEEPEIIYPKLLTGALLEIDGKRLYICGRGDSRLLYKHDYQLTVSASDEKYIKALSKHVSRCNAEKNDDVPLSLNSDISKENNMKLYELLLAKLQAPVYFRLFSNYLEKLQNKTERFSALSLTEQCRLLLEILKLFKCDRQKADLSLIDGPANVGDIKFTKSLDKVKSAFLINSSVTGLYRYKTDLLK

SEQ ID NO: 4503 - protein, 1355 aa, unidentified
  REGION 1..1355: note = Description of Unknown: Cas Enzyme sequence
MKSRREQDYYLGLDIGTESVGYAVTDENYNILKFNGKNMWGSRLFDEAQTAAERRTFRSGRRRLQRRAWRIQLLQELFSEEISKVDQSFFVKMKESPLILTDKTNGQKYTLFNDDDYSDIDYYSEFPTIYHLRKALLMEDRKFDVRLLYLAVHHIVKHRGHFLFQGSVNNATSFHSVFDNLKICLRDEFEIELVCHSEEKIAEILKDKKKSKRDKCNEIFNELNVDKSNKQIKSIVTLITGMKAKVADIFDDESLLEIDKPSISFSESSYETLRVELEDVLGERCGVIDIIKCVYDWAILADILDDGEINGKSYLSVAKVNLYDKHKEDLRILKQLFKENHKVYKEFFVDEGKSNYCAYVGFVNSNGNKKNIKRCNREDFIKNLKGQLGKIEKTVSNQSEYEFIEQEIQADTILPIQVSKDNGVIPYQVQEIELKDILAKAEKYMPFLSVKDADGLSVSDKIIKIFEFRVPYYVGPLNSYNNTNSWMVRKSDGKITPWNFDNKVDKDASAEKFIRKMTNKCTYLIGEDVLPKHALLYEEFNVLNELNNVKIGANKMNVELKKDIIENLFKKKKKVTGRNLREYLKSEGLINDDEEITGFDINFKSSMSSYLDFKKILGDKIDNYSVKIMVEQIILWITVYGDEISILKRVIRKQYDDNQISDEEIKKVSRLKYQGWGRLSRKFLGEIEGADKETGEIRTVIGALRDTQDNLMQLLGQKYTFSETIENINNKNMKEIATISYKDIVEDIAASPSIKRAVWQVILISEEIRKIMGKEPAKIFVEVARGAGEKKRTVSRKDRLISLYESCKDESKDWKKELEQRPEDDFHSIKLYLYYTQMGRCMYSGEPIDLSRLSDANVYDRDHIYPQSKTKDDSLDNLVLVKRELNAKKSNGMISSEIQKDRHGFWKELLNKGFISQEKYYRLMRKDSLTDEELASFINRQLVEARQSSKIVIGLFNRMYPDSKVAYVKANLVSDFKNMDNVKITKVRSLNDYHHAKDAYLNIVVGNVYFEKFTNNPLQWLKKNRNAEYSLNQMFNYDLIKNDKVIWKRGNNGTLRDVLKNINKRDIQYTQQVTTIKRGQNGGLFNQQLVGKDENASMPVKKGRDVNIYGGYKSITPAFFTLIESEDKKGNKQRSIESVPLFMKNQFLNDSNSCMEYFENVYGLKNPKVVISQIRKNTYLIIDDFPVLLRGSTGKQLILQCAVQLMVSQEQERYLKKLEKYIQKNSQRKDKKQNLPVTEYDGLTQESNIRIYDTFIDKLTNTIYSKRPANPVDKLKNKREIFEQLSVECQCIVLNEILHLFQCKPIMGADLSMLGEAKATGIITKNKIISTCNNVIIVNQSVTGLFKQETDLLNI

SEQ ID NO: 4504 - protein, 1367 aa, unidentified
  REGION 1..1367: note = Description of Unknown: Cas Enzyme sequence
MKKVFTEDFYLGVDIGTDSVGWAVTNSNYELMKFNGKTMWGVRLFDEAQPAEERRTFRTSRRRIQRRNDRIKLLQEIFAIEIGKIDNSFFQRLNDSRLLPEDKNSKQIYSIFNEKDYTDIEYYKEYPTIYHLRKDLILNQNKHDVRLVYLAIHNIMKYRGHFLFDGNLESATDFKQVFAKFVGVMKDELEIEFDFSKENVEEIEVLLKNRKINNSSKKTKMRELLGVESDNKQKMAVVALISGLAGDLAQIFPDSESVKELEKSSVKFSESSYDDKRLEFESSIPEECSTIDVIKSLYDWSILAEILAGGESEDGEGKAYISVAKVKQYEKHSEDLKLLKSVVKKYIPQEFRSVFSSQEEQHNYANYIGHTKRNGKKYSVKKCTRDDFYKFLNNKIKTIKEIDDEKIEYIKEGIEEGSFLKLQVNKDNGVIPYQVHKAELIKILDHAQGYLPFLHQCDAEGISNRKKIEMIFEFRVPYYVGPLNTYHKGTGGNSWMIRKEEGAIRPWNFKQKVDEDASAIEFISRMTNKCTYLLGEDVLPRNSLIYSEYSVLNELNNLQIKGEKASNALKKKIYDDLFKNKSKVTGKVLLEYLKSEGYEVVQEDLSGFDKDFKSALTAYLDFKKKVFKDAPEQMELYNTKIMVEDIIKWICIYGDDKKMLKRVIENNYPTGLTEEQLKATCSLKYTGWGRFSRKLLENVYGTEDEAGTGEAFSIIEAMRETTNNFMQLLSNKFTFKKAIDETNAERENKITKITYENITDDLYVSPAIKRAIWQVVTITEEIRKIMGKQPKKIFVEMARGDKDALKGDAGRKQSRKNNLIGLYENIKDEAHDWKTELEKTEDSRFNSRQLYLYYTQKGRCMYSGDRIELSELANTNMYDRDHIYPQSKTKDDSLNNLVLVKKGLNSDKGDRIVSTDIQKKMILFWKELLRQKLISEEKYKRLTRTTPLTEDELAGFINRQLVETRQSSKAVAELFKKLYTDAEVVYVKSELVSSFRHENEFVKARSINDYHHAKDAYLNIVVGNVYNEKFTANPARWLKENRDTQYSLNQVFNHDVEKKGKIVWQKGNQGTIATVKRIMAKNNILYTRHATVNKGGLFNQQPIGKDKNSTIPLKQGMDPSKYGGYSGVTPAYFALVESDDKKGKKLTIEAVPLYLVGGFEKEPAKFIEYCEQKYELINPVVKISKIKKNTLLVVNGFPMHLRGIGGKNLILQGAVQLCLDDTFYKNYKNIEKYIDKNTSRADKRQNLAIREKYDGISKEENLNLYDELLKKHKDTIYSKRPANQTITLLNGREIFIALTVEEQCIVLGEIISLFICRPVTANLTLIKGSAYSGSVSLKQNLMLRDSVILKNQSSTGLFEQSIDLLKL

SEQ ID NO: 4505 - protein, 1384 aa, unidentified
  REGION 1..1384: note = Description of Unknown: Cas Enzyme sequence
MSFKENSKIYYGLDIGTDSVGWSTTNEKYELLRYKNNLMWGVSLFEAASLAEERRGHRTQRRRYDRRQQRVALLGELFAKEILKTDPDFFLRLKESSLYPEDRTSKNVNTYFDDADFKDSDYFKMYPTVHHLIKELSESNKPHDVRLVYLACAFIVAHRGHFLNGADENNVQAVLDFDSSYCEFTDWFKSNDIEDNPFSESVKNEFSVIIRKKIGITAKEREIKNLLFGTTKTPDCYKDEEYPIDIDVLIKFISGGKTNLAKLFRNPSYDELDIQTVEVGKADFADTIDLLASSMEDTDVPLLSAVKAMYDWSLLIDVLKGQKTISDAKVCEYEQHKSDLKALKYIVRKYLDRAQYDEIFRTAGEKPNYVSYSYNVTDVKLKQLPSNFKKKNSEEFCKYIKSKLEKIKPESDDEAVYNELIEKCNSKTLCPKQVTDENRVIPYQLYYHELSMILDKASAYLDFLNKTEDGISVKQKILTLMKFRIPYFVGPLVKRNETDNVWIVRKAEGRIYPWNFENMVDFDKSEDGFIRRMTCKCTYLAGEDVLPKYSLLYSKYTVLNEINNIKVNGEKISPELKQDIFNELFMKTSRVTVKKITELLKRKGAFSEEKGDSLSGVDINIKSSLKSYLDFRRLLENGFLSENDVERIIERITVTTDKPRLVSWLKAEYSDLPAEDIRYISRLSYKDYGRLSAKLLTGCYELDTNTGEIGGRSIIDFMWAENINLMQILSDSYGYKSFIEEENKKYYMINPTGSIAQTLREMYVSPSVSRAIIRTMEIVKELRKITKKDPDKIFVEMARGGKPEEKGKRTSSRREQIEKLYDSAKAFVSDEDISHLRSQLGSLSDEQLRSEKYYLYFIQFGKCMYSGEAIDFSRLGDNHCYDIDHIFPQSKINDDSLHNKVLVKSQLNGEKSDDYPIKAEIRNKMHPLWKNLFYRDPKNPTDKVKYERLTRSTPFTEDELAGFIERQLVETRQSTKAVATLLKEMFPDSKIVYVKAGQVSEFRHDFDMLKCREINDLHHAKDAYLNIVIGNVHDVKFTSNPMNFVKNADKHYTIKVKETLKHKVSRNGETAWNPETDFDTVKRMMSKNSVRYVRYCYKRKGGFFNQNPDRAGNPDLARLKKDLDPVKYGGYNSKSISCFSLIKCTGVGAVIIPVELLCEKRYFSDDSFASEYAYSVLKNALPAKNIAKISIDDISFPLKRRPIKINTLFEFDGYRVNIRSKDSYHYFTISSAMAAIYSKDTSDYIKAVSSYIDKSDKGSKFKPGEAFDVLSNLKVYDEIAKKCISEPFSKINKLAEAGKKMEEGRDKFAELSIIEQMKTLLLLVDVLKTGRINTCNLKPVGGVESYHTERMSAILKNTKYSDIRIIDQSPTGLYEKKSDNLLEL

SEQ ID NO: 4506 - protein, 1343 aa, unidentified
  REGION 1..1343: note = Description of Unknown: Cas Enzyme sequence
MKVSSKEDLKQVKDYFVGLDIGTSSVGWAVTNELYEVLRAKGHRMWGSRLFEEGQTAAERRNYRAGRRRLDRRNDRLAILEELFASEIYKVDPAFYQRLHESQYHHEDKNTDGQYFLFNDVDYTDKTYHKEYPTIYHLRSSLMKEPAKDIRLLFLAVHHIIKYRGNFLLEGEPIKTSGGVMDILHQVLSCMEFSRLHDQIDEQVFVDLLTSTGRTCSDIAKLVSDSIADKGLKKQAKAFTSLVLGLKGNLDELFNEPEYKELDADVRSVEFSGKDYWEEREKYESILGESILALDGCKALYDSRLLSTIKPDGKYLSEAKVEVFNEHQEHLVKLKKLLKGEKALYNSVFRDDTKDSANYIAYIGKSQSGKNCSREDFYKFLKKVLEVLPESILKSEILQLIDLDVFLPLLRVRENGVIHYQIHEEELEQILAVASKKYEFLNSCDESGFTVAKKILKLLTFRIPYFVGPLNPAHKDSNGFAWVVRKEAGKVYPWDFEKKVDINASAQAFIENLTNKCTYLIGEDVLPKYSLAYSKFMLLNELNNLKYNGHPLSYEVKMAFITECFQAEHKKMTEKAIKSFLKLKGFTDGTGELTGLDIDIKSDLKSYRDMVRILGEGFDEQLAERIIRYVTLFGDAKKILADVLKKEFKDTISEVQVKQIQKLKYKEWGRLSEAFLKKIVGVAGDGPECNILTCMETQSLTLMEVLSSHNSYLAAIEEFNAKRTEVVERGSYDLVDELYISPAVKRSVWQTLRILEEITQLRRGIPKKIFVEVARTNRAEKKRTNSRQAKLLYLYKNIKDEARNWSKEIKETEAGKIQSKKLYLYYTQQGRCMYSGEPIDLGDLFTSKYDIDHIYPQSVTKDNSWDNLVLVKSILNREKTDNYPIEIETQKKCEGLWSRLLKYNLISEKKYERLIRTTPLTADELADFVSRQLVETNQAVKAVTNLLKRLYPDTTICYVKAENVSDFRQKNEFVKLRSLNAHHHAKDAYLNIVVGNVYHEKFTNNPRNFIKKARAEKKRPYNLSKMFDFLLKVGQRVIWNPDNSYPVVKKMMANNDVQVTKKLIEQKGALYDATIYKASVAKINSYEPLKRNNSVLADVKKYGGFTSIKIAYYSIFELYNKKNKEHEFQLLAMPILKINQLKSVDDYIAYASSVIDSNKYDVVRLVYRKLCIDSLVKINGFLYYIGGKTNNKVYINSATSLVLNAEIVKKLKVIETYLNRVQNDNKYEPNLEYINEENNIEIYNSLIEKMGKKAFSTMKMNKKDELSKLETLNAFKKIDLRKQCYILFELLNLLTHQKTTFDIKMIGLSASRCTINMNITKLQEFSIVTKSITGLYSKEIKII

SEQ ID NO: 4507 - protein, 1343 aa, unidentified
  REGION 1..1343: note = Description of Unknown: Cas Enzyme sequence
METKNNTTNPNAYYIGLDVGTSSVGWAVTDTNYNILRFHGKHMWGSRLFPEAKTAAERRTQRTMRRRLQRRKQRLIILEALFADEISKVDKCFFERLHESDLWQDDKKTGSKFSVFNDPSYTDKDYHKTYETIYHLRRELANSSEPHDVRLVFLAIHHLMKYRGHFLNQGESPEEILTVEQAWDALVRYLGDQYGLAFAPANPAKLIEAIKSDALISVKKKWVKEAAGPIKTEEGQPSPNAILELLAGAKIQLIKLFPDLEELMGENGKTALLLKEDLNENEDALFDLLGRENAGLLFALKDVFDAARLSSILGAGQEECRYISEVKVRQHDANRADLRVLKRFVKEFCPEIKNRLFNERKDKLDNFPAYSRYKSSSGDYHCNQENFCKFLEKELPKQKAEVEIPNVWQKIKDRTFFPKLRGTENGLIPYQLQMRELKAILRNAAVYLPFLGEADPDGFTVAEKIVKTFEFRVPYYVGPVKRDNGQKKYENHWCVRFAGKEQTKIEPWNFEEVVDLEKCAAAFMANLVGCCKYTGAPVLPKDSLCYSEYMLRNELNPLRVNGHFLPHELREQLIDELFVHSERAKTVTKKDIFNFLRRNGYPIHSKEEITGIDDKIKTVLKSHHDFARLLDRTGDYGLAEEMIHSILAFGDDKKLLKRRLKALAPDLDEGDLRYFCQRNYKEWGNLSEYLLTGLKAEVNGEQKTVMDMLREKDLVLMQILSQEYPFGKLAQAYLDETLGNKTSLSDKLDALYVSPAVERAIRQTLKIVDEIVGIRKAPPKKIFIEVARDVNGKNPKQRTSSRKEQLQALYNSCKEQGDALSLELEQRLATETDDSLRNDRLFLYYRQNGKDMYTGLPMELEHVLAGKLYDRDHIYPRSKIKDDSLDNLVLVNSNDNREKTNDYPLKDEIRTRMLPLWTAMRKRGQISEKTYTRLTRVEPLTEKELSDFVQRQLVETRQSTKALAEILKERYPMPDTKLVYSKAQNVSEFRRAYQLIKCREVNDLHHAKDAYLNIVVGNVYDTHFTERFFANILNENYSIAVDTLFGELNTRGAWNKKTSIGTVKDMLRRNDPIVTKMCFETKGALFNLQPLSAGGGQLERKRSLAIDRYGGYKDVTGAYFCVIESTERNRRIRSIEAVSIVEKEAYEGDPVAFWVSRGKKDPSILVKKLHTNSLLEVNGIRLYITGRSGSTNVYQLGEELYLDDKQQKLVVDMLKYIDWCSVNKEERCPKFTKADLVSLYSVLQKKSARYNDTFEGAPLEKVLESGKDIFESMKLLDQCKTLEELLKVFQCNALKANLTAIGGKKGEGAIRKNKNITLMRSLTLIHQSVTGLYEYQIKLRETT

SEQ ID NO: 4508 - protein, 1324 aa, unidentified
  REGION 1..1324: note = Description of Unknown: Cas Enzyme sequence
MEEKKTIRPHSPYYIGLDVGTNSVGWAVTDPEYNVLRFKGNSMWGARLFEEAKPAADRRAARIARRRLERRKQRLLYLEEFFSAEIGKSDPLFFRRLHESALFPDDKTAGTGKYTLFNDPDFTDRDYLRRYPTVYHLRSELVHSSEPHDPRLVFLALHHIIKHRGHFLYETSENGDECPTVDAAMQELTEYLSAEMNVELGLEPEYFTILTDRNMRISQKKAALRAALGRSMQTEESGADIQALSDLLAGAKVKLAALYDDESLKNAEPASVALSDDLDAVFDALSSALGERVELLLAAKKVFDAARLSEMRGGEAYLCDAKVCQYEKNHADLRALKDYVREAAPDKYRSIFYKNAKFPNNYAAYSRYRSESGDKTCKQEDFCAFLKSVLPKPAAEHPFAPQYAQIEEKTFLPRLTGSENGIIPYQLHRQELRKILDNASAYLPFLLEEDEDSISVREKIEAVFSFRVPYYVGPLKGRWAERTEEAKRTGEKVYPWNFEKVVDLDASAAAFLKDLIGKCTYTGAPVLPKDSLLYSEFMLLNELNPLRLNGNELPVSVKQQLIEDLFKKENRRVTKKRILDYLVMHGYAAKTDEISGIDDPVKTRLRSYHDFAPLIPALGEEAVEKIIEGTLVYSDDKRMLRRWLKKNFPALNEDDVRKICRLKYADWGRLSKEFLTELYSGADEQGEAQNIMYFLRNTNLNLMQLLNDPEHANLPAAAEERRLARFGSNSLRSQLDEMYISPAVRRSIWQTLKIAEEIAHIRGGAPAKIFVEVARGEDKEKKGTRTKSRKEQLLELYKACERDSGELYEKLAATEESALRRDKLFLYYTQFGKCMYSGEPIDLETALRDDTTYDIDHIFPRSRIKDDSIENRVLVKSVLNREKTNTYPISQDIRSRMLPFWSMLHDKKMIGDKKYDRLKRNTELTDDELAAFVQRQLTETQQSTKALAQLLQEIYPEAEIVYSKAGNVSEFRQEFGLLKCREVNDLHHAKDAYLNIVVGNVYKTKFTDRFFLNIRKENYSLKKVFDWDTPGAWKADGTSIATVKKYMAKNNPIITRMPREEKGQLFNLNIMPAGLGQLPIKAGKPIEKYGGYNKLTGSYYCVVEHTEKKKRVRSIETVLLYARGLYESDPVKYCREILGLVDPVVVAPKIRINSLLQLDGFRLYPSGRTGNRIIYKHAYQLAIDAERERYIRNLTKYIERCAKIEYPATAFDGISAEENVALYNWFVERLESSAYGKLMQALLANLKASNETFKNMDILSQAKTLMEVLKAFKCDAQSSNLKDLCGKGSVGTILKNASLQGVQSAYLIHQSPTGLYEYRTDLLH

SEQ ID NO: 4509 - protein, 1330 aa, unidentified
  REGION 1..1330: note = Description of Unknown: Cas Enzyme sequence
MEEKKTIRPHSPYYIGLDVGTNSVGWAVTDPEYNVLRFKGNSMWGARLFEEAKPAADRRAARIARRRLERRKQRLLYLEEFFSAEIGKSDPLFFRRLHESALFPDDKTAGTGKYTLFNDPDFTDRDYLRRYPTVYHLRSELVHSSEPHDPRLVFLALHHIIKHRGHFLYETSENGDECPTVDAAMQELTEYLSAEMNVELGLEPEYFTILTDRNMRISQKKAALRAALGRSVQTEESGADIQALSDLLAGAKVKLAALYDDESLKNAEPASVALSDDLDAAFDALSSALGERVELLLAAKKVFDAARLSEMRGGEAYLCDAKVRQYEKNHADLRALKDYVREAAPNKYRSIFYKNAKFPNNYAAYSRYRSESGDKTCKQEDFCAFLKSVLPKPAAEHPFAPQYAQIEEKTFLPRLTGSENGIIPYQLHRQELRKILDNASAYLPFLLEEDEDGISVREKIEAVFSFRVPYYVGPLKGPWAKRTEEAKRTGEKAYPWNFEKVVDLDASAAAFLKDLIEKCTYTGAPVLPKDSLLYSEFMLLNELNPLRLNGNELPVSVKQQLIEDLFKKENRRVTKKRILDYLVMHGYAAKTDEISGIDDPVKTRLRSYHDFAPLIPVLGEEAVEKIIEGTLVYSDDKRMLRRWLKKNFPALNEDDVRKICRLKYADWGRLSKEFLTELYSGADEQGEAQNILYFLRNTNLNLMQLFNDPEHANLPAAAEERRRARFGRDSLRSQLDEMYISPAVRRSIWQTLKIAEEIAHIRGGAPAKIFVEVARGEDKEKKGKRTKSRKEQLLELYKACEEDSGKLYDQLAATDESNLRKDKLFLYYTQFGKCMYSGEPIDLEAALRNDETYDIDHIFPRSRIKDDSIDNRVLVKRVLNREKTNTYPISQDIRSRMLPFWSMLHDKKMIGDKKYDRLKRNTELTEDELASFVQRQLTETQQSTKALAQLLKERYPESEIVYSKAGNISEFRQKFEMLKCREVNDLHHAKDAYLNIVVGNVYKTKFTDRFFLNIRKENYSLKEVFDWDTPGAWKADGTSIATVKKYMAKNNPIITRMPRETKGALFGLMPVSRENAKIPLKANKPAEKYGGYTGRVAAYFIVVEHAKGKKRIRTIEPVYIYAKEYFEKNPEEYCTGFLKLIAPKVICYKIYAGSIIEINGCRLELTGGSESTGDGRDIYNHTYQLVISGKESDYVKQVLKYLKRCQERRTEIPITPYDGVNREENIDLYKCFCNKLATSSYGQLFSDERKVLENNAEGFALLSVPAQCRVLSEILKIFICDAQKADLKELCGKAVGKRVRRSANISSCNSVFLIHQSPTGLYEYRTDVLH

SEQ ID NO: 4510 - protein, 910 aa, unidentified
  REGION 1..910: note = Description of Unknown: Cas Enzyme sequence
  MOD_RES 872..876: note = Any amino acid
QKKAALRAALGRSVQTEESGADIQALSDLLAGAKVKLAALYDDESLKNAEPASVALSDDLDAVFDALSSALGERVELLLAAKKVFDAARLSEMRGGEAYLCDAKVRQYEKNHADLRALKDYVREAAPDKYRSIFYKNAKFPNNYAAYSRYRSESGDKTCKQEDFCAFLKSVLPKPAAEHPFAPQYAQIEEKTFLPRLTGSENGIIPYQLHRQELRKILDNASAYLPFLLEEDEDGISVREKIEAVFSFRVPYYVGPLKGRWAERTEEAKRTGEKAYPWNFEKVVDLDASAAAFLKDLIGKCTYTGAPVLPKDSLLYSEFMLLNELNPLRLNGNELPVSVKQQLIEDLFKKENRRVTKKRILDYLVMHGYAAKTDEISGIDDPVKTRLRSYHDFAPLIPVLGEEAVEKIIEGTLVYSDDKRMLRRWLKKNFPVLNEDDVRKICCLKYADWGRLSKEFLTELYSGADEQGEAQNILYFLRNTNLNLMQLLNDPEHANLPAAAEERRRARFGSNSLRSQLDEMYISPAVRRSIWQTLKIAEEIAHIRGGAPAKIFVEVARGEDKEKKGTRTKSRKEQLLELYKACEEDSGKLYDQLAATDESNLRKDKLFLYYTQFGKCMYSGEPIDLETALRDDTTYDIDHIFPRSRIKDDSIENRVLVKSVLNREKTNTYPISQDIRSRMLPFWSMLHDKKMIGDKKFDRLKRNTELTDDELAAFVQRQLTETQQSTKALAQLLQEIYPGAEIVYSKAGNVSEFRQEFGLLKCREVNDLHHAKDAYLNIVVGNVYKTKFTDRFFLNIRKENYSLKKVFDWDTPGAWKADGTSIATVKKYMAKNNPIITRMPREEKGQLFNLNIMPAGLGQLPIKAGKPIEKYXXXXXQQAGRLVLLRCGAYGKEETRSFHRNGTALRTGTV

SEQ ID NO: 4511 - protein, 998 aa, unidentified
  REGION 1..998: note = Description of Unknown: Cas Enzyme sequence
  MOD_RES 481..484: note = Any amino acid
KNHADLRALKDYVREAAPDKYRSIFYKNAKFPNNYAAYSRYRSESGDKTCKQEDFCAFLKSVLPKPAAEHPFAPQYAQIEEKTFLPRLTGSENGIIPYQLHRQELRKILDNASAYLPFLLEEDEDGISVREKIEAVFSFRVPYYVGPLKGRWAKRTEEAKRTGEKAYPWNFEKVVDLDASAAAFLKDLIGKCTYTGAPVLPKDSLLYSEFMLLNELNPLRLNGNELPVSVKQQLIEDLFKKENRRVTKKRILDYLVMHGYAAKTDEISGIDDPVKTRLRSYHDFAPLIPVLGEEAVEKIIEGTLVYSDDKRMLRRWLKKNFPALNEDDVRKICRLKYADWGRLSKEFLTELYSGADEQGEAQNILYFLRNTNLNLMQLLNDPEHANLPAAAEERRLARFGRDSLRSQLDEMYISPAVRRSIWQTLKIAEEIAHIRGGAPAKIFVEVARGEDKEKKGTRTKSRKEQLLELYKACEEDSGKLXXXXLAATDESNLRKDKLFLYYTQFGKCMYSGEPIDLEAALRNDETYDIDHIFPRSHIKDDSIDNRVLVKRVLNREKTNTYPISQDIRSRMLPFWSMLHDKKMIGDKKYDRLKRNTELTEDELASFVQRQLTETQQSTKALAQLLKERYPESEIVYSKAGNISEFRQKFEMLKCREVNDLHHAKDAYLNIVVGNVYKTKFTDRFFLNIRKENYSLKKVFDWDTPGAWKADGTSIATVKKYMAKNNPIITRMPREEKGQLFNLNIMPAGLGQLPIKAGKPIEKYGGYNKLAGSYYCVVEHTEKKKRVRSIETVLLYARGLYESDPVKYCCEILGLVDPVVVAPKICIDALLELDGFRLYPSGRTGDMIVYKHGYPLAIDAERERYVRNLTKYIERCAKIEYPATAFDGISAEENVALYNWFVERLESSVYGKLMPALLSNLKSSAEAFEKMGILSQAKTLMEILKAFKCDAQNPNLKELCGKGLVGRIQKKAALQGFQSAYLINQSPTGLYEYRTDLLH

SEQ ID NO: 4512 - protein, 1331 aa, unidentified
  REGION 1..1331: note = Description of Unknown: Cas Enzyme sequence
MKENGNDSRQGDYYVGIDAGTNSIGWAVTDENYRVKKFKGNAMWGVRLFDEAQGADERRTNRTARRRLVRKKQRLMLLELLFAEEIAKVDPNFYLRMQESGLWRDDKTGDSQFALFNDEGFTDREYFQKYPTAYHLRCELLHSEDPHDIRLVYLALHHIMKTRGHFLLDGVEDVEQMTTLDGALDELAAFLQEEYELYFVPKNRAEFIAALETRDIGINARKKALKDAYGKAEDAEDLSIPALLDLLAGAAVKPEVLFEDNSLKDGDVSSISFKNFEDEQENYSELLGDRMETLLKVKNLFDTAQLALILNDKTYISEAKVAQYEQNGHELHLLKEYVRKRIPDKYKLIFDEKKEKLDNYVAYSGDKRRSGAYTCTQEAFCKFLRGKNVELPEPDASDTEMCTIYAKIKDNIFLPKLRSSENGVIPYQLNKQELERILELAAQYLPFLNVVDDDGLSVREKIVKTFEFRVPYYVGPVSDKAKHRWAVRFDEKAKTKVLPWNFEHVIDTEGSAIAFMEQLIGRCTYTGEKVLPKDSLLYSEFALLNELNLLKINGKSLPINVKKQLVQDLFYSSKKNVTKKTISRYLRAEGLMTEEDEVSGIDDKIKSKLRSYHDFRDILVRTGDTAMVEDIIRSILVFGNDKKMLRRWLEHNTHDLTEAEIKHICHLNYQDWGRLSEIFLTKIYSPDENGEAKTIMDYLRETNCNLMQLMSDQYLFAENAKKHYDELFGNGQTLTARLDSMYIAPAVRRCIRQTLRIVDEIVDIEKSVPKKIFIEMARDRAQDVKKGRTESRKDKLIALYRSCKETGNELFKRLENEDENRLRSDKLYLYYTQLGRCMYSGEPIDLESLLRGELYDIDHIFPQSRVKDNSLENRVLVKNTLNREKTNEYPIKSEIRKKMQGFWYGLRQKGLIGQKKLERLTRATPLAEAELSSFVARQLVETQQSTKAMATLLQDIYGDKVRIVYSKAGNVSEFRQKFEFIKCRDVNDLHHAKDAYLNIVVGNVYDTKFTQRFFVNIKNEKYSLRRIFEFDTDGAWKVGETIRTVKKYMAKNNVLVTRMPREVRGALFDLQLMPATKGQLARKQGMDIGRYGGYNKLTGAYFCVVEHTEKKKRIRTIEPVYLYQKSAYESDPVAYCKDILGLCEPVIIVPEVRIDSLLEINGSRFMISGRTGNRIVVKHTYQLLLSNAEEQYVKNLGKYNDRCAAKKEELPVTEHDGISAEENLNLYRLLVKKCNEKVYSTCFTTFIIMGNEMKEYENKFIAMSIWEQTKILLEALKAFRCNAVYGNFKELSGKGTRGLILMNKKISELSSAYMINQSITGLYEHRVDLLK

SEQ ID NO: 4513 - protein, 1351 aa, unidentified
  REGION 1..1351: note = Description of Unknown: Cas Enzyme sequence
MKKQFGEYYLAFDIGTDSIGWAVTDLNYNLERLNGKYMWGTRLFEAGKTAAKRRSFRAARRRLQRRTQRIRLLQEIFAEEISKADMGFFHRLAESKYRPEDKNNQTNTLFNDANFKDKDYHAKFPTIFHLRKTLIESKEKFDVRLVYLALQHILKNRGHFLFEGQRMENVTSFDAAFSPLNNYLEDEYQFAFADDSLDKVQNILKDSSLGVKDKNKYLNDLLGADTKQKKEMVNLICGGTAKIKNILDIAEDADLEIDKLCFKTMDYADIHDKLLDTIGDLSKIECLDRLKSIFDWSLLAEIKKGNDYLSFAKVDVYEKHKQDIKLLKSLIKKYYDNAAYNEIFNDVNTTNNYVAYVGMTKKNNKKQVVLSRKCTQEEFCKFVKGYLDRIKSMDADVEQLKSKCANVSFAPKQINRDNGVIPYQMHLLELEKILENAKRYLPFLNEKDASGYTAAEKIVKIMTFRIPYYVGPLNDHHKIVDGQKGHCWIVKNSDEKIRPWNFERVVDQEACAEAFIRRMTNKCTYMHDADVLPKDSLLYSKFVVLNELNNVCVNGDRLPTDLKQHIYRELFMQQKKVKAKNFRDFMINNGYMRETDSLSGFDGDFKGSLGSLIDFRKIIGVKAGDNKMVEEIIKWIVLFGDTKKLLKDRINKFYGDKLSENEIKAIVNLKYTGWGRLSREFLEQITSQIPGFANELGIITAMYETPNNLMELLSGQYQYLDKLQAYNNTMHEATGSLTYETVADLYVSPAVKRSIWQTLVLAEEIKNVMGHEPKKVFIEMTRSDVKNKKRTVSRKNSLISLYKACKGETRNWLAELENRTDGDLRGDKLFLYYTQMGRCMYTGERIEIGELFSTGADGRALYDIEHIFPQSKIKDDSIDNRVLVKAGANRAKGDQYPVPQEYRNKCGGIWKMLLERGFISQKKYDRLVRNTPFSEDELAGFIARQIVETSQSTKAVAEILKREYKNTEVVYVKAGNVSAFRQQNDFVKCRDINDYHHAKDAYLNIVVGNVYNTKFTHSPINFIKSKDNKYSLNKMYDFQVERNGSVAWEPGDNGTIATVKQTMHNNRVLFTRYASQAKGGFFKQMLLKKGKGQHPIKGNMNDPISKIENYGGYDKVAGAYFFLVEHTLKNKRVKTIEYVPILKAVMLQDNPAALFQYCLDDLILHEPRILLAGIKINTLFKVDGFKMHLSGRTGNRLIYKGAEQLVLAVNDEKYIKKIAKYIQRNKEAKGQLPVTVFDKFDKDANIALYDKLLDKLQNTVYRVRLSAQIKNLEKGRETFINLGIKEQVITLFEILHLFQCNSVNGDLTAIGGAKDTGTLKIGKNISELSKISIINQSPTGLFEQEIDLLKL

SEQ ID NO: 4514 - protein, 1336 aa, unidentified
  REGION 1..1336: note = Description of Unknown: Cas Enzyme sequence
MKNNGNDRIKGNYYIGLDVGTNSVGWAVTDHDYNLHKFKGNAMWGARLFDEAQDASLRRTSRTNRRRLARRNQRLLLLELLFTEEISKVDPAFFLRMEESALWLDDKTNKMCRFSLFNDADFTDKDYHRKYPTIYHLRHELMTSSEPHDIRLVYLALHHIMKSRGHFLYETTSRDDSIRPIEEVFKDLENLLESEYYIALEPDDLNGFLNTLTRKDLGINAKQKLLKAAWGGKENKETLVNLSAAIDLLAGKSGIKLSTLYNDESLAGVDPEKISLANGFEENLDDLSAILGDRISLLIQLKELYDTALLGQMLQGYDSISAAKIALYDKNKKDLRALKHYVRQNAPEKYKEVFVLKKSKLNNYSAYSGYKTRSGDHSCSQEEFCKYLISCKLPAPKADDEIMNRIFDEIKEGTFLTKLRGTENGVIPYQIQRMELRAILKNASKYHTFLNGKDEDGNTVSEKIEKIFEFRLPYYVGPLNKQAGSYWAVRFPDKEGEKVYPWNFEKIVDTEASAKKFMTNLIGRCSYTGERVLPKDSLLYSEYMLLNELSPLNINGKPVSVEIKQAIVNDLFKKEKRAVTKNSIRNYLLSRGYIDKSVGKDDIGGIDDRIKTSLRSYHDFQAILDRTGDQEMVEDIILHILVFGNDRVMLKKWLRNNTHGLNEEEYDHICRLKYTDWGRLSKTFLTDILSVDPEEGTGELHNIIYMLRNTNKNLMQLLSDRYSFSAQAEEHRKELVGEKQSLAERLNDMYIAPAVRRSIRQTLRIVDEIVDIEKSVPEKIFIEMARDSSKAMKGKRTESRKEKLLALYANSKEEAAELLPKLKNEDDNRLRSDKLYLYYTQFGKCMYSGEPIDLDALMSGQGFDIDHIFPQSRVKDNSLDNRVVVKNTLNREKTNNYPIEKNIQRSMRSYWDMLRACDMISSKKYDRLIRATPLTDEELSAFVARQLTETQQATKALTVLLQETYGDLTRIVFSKAGNVSDFRHDFDMIKCREVNDLHHAKDAYLNVVVGNVYCTRFTDRFFANIHNENYSLNKVFAFDVPGAWKKEETIKTVKKTMSKSNPVVTRMPREVKGQLFDLQLMPAGKGQLEKKRSLRIEQYGGYNKITGSYYFVAEHTVKEKRIRSIEPVYLYAQKQYEADPKAYAVSVLGLVAPEIICKEIRADALLEIDGSRMYISGRTGDNYVCEHAYQLAIDVDKEKYIKLLTKYAERCAARRAPVAITKYDGITAEDNEELYNYFLKKIEGGVYAKLLKNMKKDLEESKNTFLSKSLYEQALILLEILKPFRSNAQNANLKDLCGKGTVGRIIVNKKLNMHASAKLVHQSVTGLFEVSENLLG

SEQ ID NO: 4515 - protein, 1390 aa, unidentified
  REGION 1..1390: note = Description of Unknown: Cas Enzyme sequence
MSKKYYLGLDIGTNSVGWAVTDEEYNLCRFRGKDMWGIRLFEAANTASDRRLKRSSRRRLKRRRQRIKLLQEIFKEEISKIDESFFVRLNESRLHFEDKLIKEKHPLFAGKDYSDVNYYAQFPTIYHLRKELIENKEPHDPRLVYLAIHHIIKNRGHFLIEGNLGKAKDFNVVFDKLSEALKEDLEWQVEPNEDAKAEIKDILTDKNKTKKEKVDEIIEITNGSLEAKSEQEKGVLVKINSLLSKEEIGRQKDITKIIFNFIVGIKGDVEKLFKLEKKSLTKGSFSFAESNYEENVRPEMENEIPDLIHIIDLIKGVYDWRVLAGILQGEEYISNAKVKQYEKHKNNLKKLKSIIYKNFGKEVWKSFFVDESEESYSSYIGVSKVKAKKSESNEKKDKDFVTSIKKKLEHIKEDGYGYDIALEFIKTENIEDLLPLQRSKANGVLPNQVHKFELIKILENAEKYMPFLSEKDSDGISNKEKIISIFEFRIPYFVGPLSDRHKKQGSNCWMVRKEGENGRIYPWNIEDIVDYEKSNEAFIRRMTNKCTYLIGEDVLPKNSLLYLKYMVLNELNNLRVKGNKVDIKTKQGIYTELFQRKVKVTGKAVLEYLKTKVPGLKIEDLSGFDKDFYTSLKPYIDFKKIFGEKMENDDVQNIVENIIKWITIYGDDAKMIKDVIEKEYPKRLTEKQLKEVCGLRYSGWGNFSKKFLKSIEGIDRETGETFSLIQAMWQTNNNLMQLLSGKFTFTEEIEKENNKLTEKVERVSYEELVDNMYVSPATKRAIWQAIQISEEIKKVMGCPPEKIFIEMARGGGKKGKRTVSRKTALQKLYKNCEKDVRHLSEKLENLEERDLNSMKLYLYFTQWGRCMYTDKEIDLDELMKKNSKWDRDHIYPKSKIKDDSIDNLVLVDKTVNSRKGKDVLKEEIQKKMIGKWKSLLKGGFISKKKYDRLTRKGDFTEEELAGFINRQIVETRQSSKAVAELLKRINEDTEIVYVKGPLVSDFRKRPLNELKSRRINDYHHGKDAYLNIVVGDVYNAKFTANPITWFKKNKNEEYSLNKIFNFDVKRGDKVIWEKCVEDEDQSHVGYGGTIDRVRKIMKQDNLLYTEYTYCDKGELFGANPISKSNENLNIKLKSGLDTKRYGGYSGANTSYFAQIEFDDKKGKRVKNIIGVPIYIANRLKRNTNAFKDYCENVKGLKDKNVEIIVPKIKKNTLMLVNGFPMRIRGENNEKLSFKGAIQLKLDEENAKTLRAIEKYLEKYEVKNKKNYDKEEPRISEKFDKLSHEKVDKLYDVLLYKLSNIYKKRPANPKETLSSNCDIFRKSDNLYEKIKTVNEILNFLRCDGKISGNLEFINGKKNAGNMAINKNTVGKREIIIINQSVTGLFENRAKI

SEQ ID NO: 4516 - protein, 1473 aa, unidentified
  REGION 1..1473: note = Description of Unknown: Cas Enzyme sequence
MNTENEKKFYIGLDIGTESVGFAATDENYRVLQKRGKPLMGVRLFEEANTADERRGKRANKVRMKRRAFRIELLQELLAEEVNKVDPLFFIRLGASSLWKDDKLHKNAGLTSADSLFADSDFSDKDFFKGFIDNSEWSSKPKTARNKLFPSAYHLRNALMNPKEKPDIRFVYLACHHILKARGHFLYDDESMGGGNTSSVLDMSAVGKDCFVRLNKVLKDIAEAEELPYKVSFCTENFSAIEEIAKNDTLYLKDRKSKLLETLFPNPIHNKDAKKQVDAMLSALLGKKAKLAELFPYIEWDEESKDFSFGGKWEDETKPKLAGVLADDNQMLLIDILKEVYDWYILMQLLKGKSSVSAAMVERYQKHHEQLAALKKFVKEFAKDKYFSIFRSVKEKNNYPAYIGSNLSNGKTIIKKCSTEDFYAFLRKELGDVLPKEILDDITAGTFLQKLRSKDNATIPHQLHKAELSVILNNAQAHGLLSADTAKKILDIISFRVPYYVGRLNPHYKNTKGRHVWIEKLVEGRTRITPWNFNEIVDKKNSNKAFIGRMLSKCTYLRDETVFVLPKNSLLYARFSVLNELNNLKYKDVPISVELKQKIFNDLFKTKAKVSFSALLTLLKHHLGSDVEKSDITGVDMQKNGFNSSYSAYVQAEKIFKEEMDNHKTLEIVEDVLLWHALHTDKKLVVESIRQKYPHLSESVVKELKGLNFSGFGRLSKKFLTTERVIDKSTGQCKSVIDILWETNYNLMELRKEDGVYNITDWLNEENSVKEGNVDYDLVAESYASPSVKRSVWQAMKIVDELIELNAGKKPDRIFIEVTRTNREDKKATKTRKDKLSELYSEAKKLDKQIFAELEKDGIKNQLEDIQDNNALRGEKLFLYFLQCGKCAYSGETIKIADLDKLYDVDHIIPQALKKDDGISNKVLSKRNLNGKKGMHYPFRHILGITDTVVRMWEGWHRCNLISDEKLARLKRTTPLKDKELEGFIARQLVFTGQSTTAVAELLKLRYPNAQLIYSKAENVSDFRQKFNMLKCREANDLHHAHDAYLNIVVGNCFYQRFNKAYITGYEKDNEAWTKYTQNHLFEKDIKGAWKAGEWERGEQKTIGETEKTVAKALSLKYLPISKLTTEYKGSLFKLTVLSAESHQKSKFTKSKTTATIPLKGNSNNPLSKLERYGGFAGIVAAYCMIIEYTDKKGKIQREFDFVSILNKKQWEKLTHTEKEDKLSQERGFPVKIVLPKIYFYTLFKIENMEFRLSGCSKFGIKLQNAKQPYYGTPIDDDELGIKNMCIINYMRILAKYNDIKNKLKTEDYEQANEIVLSGKPNGKQTEYKITKCENQALWNALLKKICKLYGNMHSGLKGCNLGLPDIYEKIAIHDSAFSNLPITRQVNVLSAIISGLGCNAHAFNLSGFYEKNKNDKPLNTGLGQPQPSLKIKYPLTLIHQSVTGIKEHSIVISEFDKDGNLVFPDINTGVKH

SEQ ID NO: 4517 - protein, 1010 aa, unidentified
  REGION 1..1010: note = Description of Unknown: Cas Enzyme sequence
LSKCTRLRFETVMAKNSLVYAKFSVLNELNKLKINDIPITVELKQEIFNNLFKVRKNVSTNNLLDFLNNHKNYANNEGRKLTKDDLWGFDVKKGFTTSLSPFMQASLIFGEEVFTNEYFYQTKNGKLFDQVIEWHAVFSEKKLVGNAIRKEYHAYLQDTFGEQAETIIKQLKALNFSGFGNMSKKFLTTLVQHGSDENNTIIHSTGLVNPKMSILDILWETNENLNEIIWNDAYGFKTFMDTENATGDKDGGEDFKQRIQESYASPSVKRSVWQAVKIVDELIELSGRKPDKIFIEVTRSGREQKGDKGRTKSRKQKIEEIYKNAKSLAKEIKEKGLIEELLGKSDAELRSDRIFLYFMQAGKCAYSGNPIRFADVLNAKSSSYDIDHIIPQVLIKDNSFNNLVLVERNLNDAKGSKYPLSQTPLIAAKFATTKALWKQWLKNGLISPEKYERLARTAELKEKELEGFIARQLVFTGQATTIVAELLKSRYEAEGNPQVVLYSKAENVSAFRQKFDILKCREVNDYHHAHDAYLNIVVGNVWHKRFNKHFYKTKFQDEKQKRLNANKLFEYDVDGVWVKPQFKIEERLKLDGTPYQKQTQEVIERTGTLAIVDAELANKFLPISKKLKSKGKDGSLYDATVYGVDVHQKEVLNKNAEISNDKSVLIPLKGLQHVLSDTTKYGGYKSAKTAYFIIYQYSNAKGVRITYFDQLAQKDRKEWEEKAKTLEQKTMIIAEKIKQNELPELQKQIQKQEKALAKQYAKSKPKQQKIDEMLAKLEDIKAYNPQIKIIREKVYLNSLFEIGTMRVRLAADDGSNVAFHNALQWVADKEIAEYIRIISEFNEIFAKATKGKNAEEKEKITQEFVKDEKIILSGKAKHLTRIKELTQEKNDKLWHAILSKLKILYPTNEGGKMEKLQGKSLGLPDVYAQLKNAEAKFLSLDITKKIEVLSGLIQGMGCNASSFDLSALLGKKTGRIRPTRKVGKEIPLTLVLQSVTGLKEKRIEIKKAGE

SEQ ID NO: 4518 - protein, 1447 aa, unidentified
  REGION 1..1447: note = Description of Unknown: Cas Enzyme sequence
MNTIIKNAKEVFIGLDIGTESVGFSLTDENYQVPQIGGKPLMGVRLFDEAKTAAERRVFRASKVRQERTKFRTTLLQELFNENINKIDELFFLRLEASGFWAEDKLKTNAGLDSLDSLFADNLYSDITYFSEFPTIYHLRKFLCEGSNWQNNIPDIRLVYLACHHILKARGHFLYDGDVSGSGCGSNFSYTDEGKRKIKSLKELLLNEDDEEITPLDLSIDNFDKIESIAKDDKIGMGKNKMKEAFFNVVFENISKENKTRAGKITSAIIGAKFKLSDIINNLDEESLDDEISKSISFSNNWENLEPKIASELGDKYILIESLKNVYDWLILMKLLKGKKSVSIAMVDKFDEHNKQLQQLKALVKEKAKNKYQKIFRSIKETHNYAAYIGSNLSNGKTIVKKCTRDKFYDFLKKELTGILTEELIASIESGQFLPKLRTKDNATIPHQLHKAELVNILDNAVKYGLINEDISSKVISIMTYRVPYYVGRTNSFFKENAARHVWIEKKKNEKIRPWNYKDVIDLDKSGENFITRMLSQCTYLKNEKVLPKSSLLYSEFMVLNEINNLRINEQRIDSNLKLRIFNELFKKIKKVSVKALLEYLNSVLGLKNAFGESLERVDISGIDVQKDWLTQSLSSYHEAKKIFGDDIEKIEVRKIIEDVLKWHALHTDKNIVSNSIKKNYPELSEEIVKNLKGLNLSSKFGSLSQKFLYGLNVICYDTGLVTSIIDLLREGSQNLMEILHDPKYNIQEVLQKENYGDDVQICYEQIRSSYASPSVKRAVWQAMLVVDELTELIERKPNKIFIEVIRSGKAEKKRTKSRKDALKEIIKDKEILKELENASDDNLRGEKLYLYFLQNGKCAYSGESINISDMKDYDVDHIIPQALKKDDSISNKVLAKKVLNGLKDKNYPLNKTSAIWNNSSKLIKMWDSWEKCGLISNEKLQKLKRTAPLGGKELEGFIARQLVATSQSATVAADLFKHKYLDTEIVYSKAENVSDFRKKFDLLKCREINDLHHAHDAYLNIVVGNTFKTKFAFWKEKHEKTGEQKNWSQSRIFEHDVEGAWKKPTKVKNENFEDVFKRDGTLATVDKILKLMYLSISKKTLENKGSFYKQTVFSARAKQKEIKDGRKNKDSLNEESKLIPRKGDHHILNDTSKYGGYSGLRPAYFLIVEYKDKKGETQREFISVSLLDKKRWEKLNEQEKLTELADKFKITDKKGNVFIPDVKIVVPKILIRTLFEIGTMHCRLAGWNGSVVKFHNAKQLFIDKESLKYVRLISKYNQMIKDKKIKADDYAGKTEIEIAGKKKEHTEIQKLTKNDNEKLWDALLSKINDLYGNSMSILIGKNLGLPDVYKKIFQCSEKFSKLSIEKQITVLTSLIIGLSCNANSFAMKELGLGDTGIIQPSVKIKYPLILINQSVTGIKENRVVISKLDEDGNIAYPPVVQKKKED

SEQ ID NO: 4519 - protein, 1409 aa, unidentified
  REGION 1..1409: note = Description of Unknown: Cas Enzyme sequence
MSIINFQRRGLMETQASNQLISSHLKGYPIKDYFVGLDIGTSSVGWAVTNKSYELLKFRSHKMWGSRLFDEGESAVARRGFRSMRRRLERRKLRLKLLEELFADAMAQVDPTFFMRLRESKYHYEDKTTGHSSKHILFIDENYTDQDYFKEYPTIYHLRAELMKDGTDDIRKLFLAVHYILKYRGNFLYEGATFDSNASTLDDVLKQAIENITFNCFDAKAAISSIGEILMEQGKTKSDKAKAIERLVDTYIITDEVNTSGKTQKEQVKEDKKRLKSFANLVLGLSASLTDLFGSVEDLDEDLKKLQIVGDTYDEKRDDLAKAWGDEIHIIDDCKSVYDAIILMSIKEPGITISESKVKAFNKHKDDLAILKSLLKADKSIYNTMFKADEKGLHNYVHYIKQGRTEETSCNREDFYKYTKKIVEELSDSKDKEYILSQIELQTLLPLQRIKDNGVIPYQLHLEELKAILAKCGPKFPFLNEVADGFSVAEKLIKMLEFRIPYYVGPLNTHHNVDNGGFAWAVRKASGRVTPWNFDDKIDREKSAAAFIKNITNKCTYLLGEDVLPKSSLLYSEFMLLNELNNVRIDGKPLEKAVKEHLIEAVFKQDHKKMTKNRIEQFLKDNNYIPEKHKPEITGLDGEIKNDLASYRDMVRILGNNFDLSMAEEIIMDITIFGESKKMLRETLRKKFASCLDDEAIKKLTKLRYRDWGRLSQKLLNGIEGCDKAGDGTPETIIILMRNFSYNLMELLGDKFSFMERIQEINAKLTEGQIVNPHDIIDDLALSPAVKRAVWQALRIVDEVAHIKKALPARIFVEVTRSNKNEKKKKDSRQKRLSDLYAAIKKDDVLLNGLNNEIFGELKSSLAKYDDAALRSKKLYLYYTQMGRCAYTGEIIELSLLNTDNYDIDHIYPRSLTKDDSFDNLVLCKRTANAQKSDAYPISEEIQKTQKPFWTFLKQQGLISERKYERLTRITPLTADDLSGFIARQLVETNQSVKAATTLLRRLYPGVDVVFVKAENVTDFRHDNNFIKVRSLNHHHHAKDAYLNIVVGNVYHERFTRNFRAFFKKNGANRTYNLAKMFNYDVNCTNAKDGKAWDVKTSMDTVKKMMDSNDVRVTKRLLEQTGALADATIYKATVAGKAKDGAYIGMKTKSSVFADVSKYGGMTKIKNAYSIIVQYTGKKGEVIKEIVPLPIYLTNRNTTDQDLINYVASIIPQAKDISIIYGKLCINQLVKVNGFYYYLGGKTNSKFCIDNAIQVIVSNEWIPYLKVLEKFNNMRKDNKDLKANVVSTRALDNKHTIEVRIVEEKNIEFFDYLVSKLKMPIYQKMKGNKAAELSEKGYSLFKKMSLEEQSIHLIELLNLLTNQKTTFEVKPLGITASRSTVGSKISNQDEFKVINESITGLYSNEVTIV

SEQ ID NO: 4520 - protein, 1409 aa, unidentified
  REGION 1..1409: note = Description of Unknown: Cas Enzyme sequence
MSIINFPRRGLMEMQTSKQLISSHLKEYPIKDYFVGLDIGTSSVGWAVTNKLYELLKFRSHKMWGSRLFDEGESAVGRRSFRSIRRRLERRKLRLKLLEELFADAMAQVDPTFFMRLRESKYHYEDKTTGHSSKHILFIDKDYTDQDYFKEYPTIYHLRAELMKSGTDDIRKLFLAVHHILKYRGNFLYEGATFDSNASTLDDVLKQALENITFNCFDCNSAISSIGQILMDAGKTKSDKAKAIERLVDTYIATDTEDISSKTQKEQVKEDKKRLKAFANLVLGLSASLTDLFGSVEELDDDLKKLQITGDTYDDKRDELAKAWGDEVHIIDDCKSVYDAIILMSIKEPGLTISESKVKAFNKHKEDLVILKSLLKTDRSIYNAMFKADEKGLHNYVHYIKQGRTEETSCNREDFYKYTKKVVEGLPDSKDKEYILSEIELQTLLPLQRIKDNGVIPYQLHLEELKTILKTCGAKFPFLNEVADGYSVAEKLIKMLEFRIPYYVGPLNTHHNVNNGGFAWAVRKASGRVTPWNFDDKIDREKSAAAFIKNLTNKCTYLLGEDVLPKSSLLYSEFMLLNELNNIRIDGKPLETAVKEHLIEAVFKQDHKKMTKNRIEQFLKDNNYIPKKHKPDITGLDGEVKNDLTSYRDMVRILGTNFDRSMAEEIIMDITIFGESKKMLQETLRNKFASHLDDETIKKLSKLRYRDWGRLSKKLLHGIEGCDKAGDGTPETIIELMRNFSYNLMELLGDKFSFMERIEEINDKLTEGRVVVPQDIIDELALSPAVKRAVWQALRIVDEVIHIKKALPSRIFVEVTRSNKTEKKKKDSRQKRLSDLYTAIKKEEALMSGLKETEFSGLKSGLANYDDAALRSKKLYLYYTQMGRCAYTGNIIDLNLLNTDNYDIDHIYPRSLTKDDSFDNLVLCERTANAKKSDTYPIDNTIQTNQKAFWSFLKHQGLISERKYERLTRNTPLTADDLSGFIARQLVETNQSVKAATTLLRRLYPGIDVVFVKAENVTDFRHDNNFIKVRSLNHHHHAKDAYLNIVVGNVYHEKFTRNFRAFFKKNGANRTYNLAKMFNYDVKCTNTKDGKAWDVKTSMNIVKKMMGSNDVRVTKRLLEQSGALADATVYKATVAGKAKDGAYIGMKTKDSVFADVSKYGGMTNIKNAYSIIVQYVGKKGEIVKEIVPLPIYFTNRNTTDQDLINYVASIIPEAKNISIIYRKLCINQLVKVNGFYYYLGGKTNNNIYIYNAIELVAPTNITAYIKVLEKFDLLRKDNKDIKVDTVTTRIYNEGSAAIVSINDKDGLIVYDYLMEKLRTPLYMKMKGNKVDGLSTIGRGKFTNMTLEDQSIYLLEVLNLLTNSKTKFDVKPLGITASRSTIGVKIHTLDEFKIINESVTGLYSNEITIV

SEQ ID NO: 4521 - protein, 1374 aa, unidentified
  REGION 1..1374: note = Description of Unknown: Cas Enzyme sequence
MKNVNSYYMGLDIGTDSVGWAVTNKKYEVLKFHSKGMWGVRKYDSANTAAGRRKFRSNRRRNDRVKQRIKLLQELFAEEISKVDPSFFIRLKESKYYLEDKNKAVRQPYSLFADENFTDKQFYKQYPTIYHLRKTLIESKKKYDIRFYYLAIHNIIKNRGHFLFEGMKLSEVKDFQYVYNNWKKLMEDIYDIQISCDSITELARVIKDTSIGFKDKKNKFKNLFHDNSKMFKAVYIALAGGKFALSDLYDDENLIEIDENKISFSDHKYEERFEILQNVLLDRIQLLEYLKAIYDWGILARVLGDEKYLSYAKTKVYDKHKNDLFLLRKILKKYYQKSVYDEVLKDVSKKIRNYCSYIGYTRINGQKIQAVKKVGQEEFCKYLENKLKLKELSNTDSDLQYIIKEITARTFLPKQVSKINGIIPYQVHQMELNAILDNMELYYPFLKEKDENDKTVREKIERIFDFKIPYYVGPLNDMHANKEDWTKGNCWIVKKSPGKVLPWNFDQMVDVDATAERFIRRMTNKCTYLVGEDVLPKDSLLYSEFMVLNEINKLKINGQGISVELKQKIFNDVFKNKCIKGKITRKKLIDYLIIENVIGKNDTLSGIDKEIKSNFKSYQEMKDILGDKVNQQREMVEDIIQSSVIFGGDKKLLEKRLYSNYVEKNMLSEAELKSILKKRYSGWGRLSRVFLEEIKSVNEETGEETNIINALRNTNQNLMELLSRGWGFTEKIEKENKLEMGEASSIDDIVNKLQVSAPVKRSIWQTLRIVQEVRKITNKDPEKIFIEMAREKRKKKRTTSRKDMLIGLYKKCKDEERDWYDEISKIEEGKFSSNKLFLYYTQMGRCMYSGEPITLDSLYNSNIYDKDHIFPQSKTKDDSLDNIVLVKRTINSNKSDQYPIDIEIRKKQHNFWKMLKEKKLISDEKYNRLTRNTPLTNEELSDFINRQIVETRQSTKAVASILSMILPNSKIVYVKAKAVSDFRHDYGIPKVRELNDLHHAKDAYLNIVVGNVYNTKFTNNPMVFLKDKDNKYNLNRMYDFDVVRNNNVAWIKGRNGTIKTVRKYMNKNNIQVTKYAAPVKGGLFDQLLLRKGKGQVPIKESDKRLSIEKYGGYNKATGSYFMLVDSDGKKGRKRTLEFVPLYMAKRLEESLNAKLNYCKNIGLKNPIIIKECIKMNSLLIIDGFPMYISGRTNDYIIMKGAVQLILNTEEELYLKKIIKCNDKIQEAKKKTGKKDEKNDEKNKDEKNDEKDDTSYKIRESDNISCEMNIKVYSSLINKIKYGIYSKAPGFPKKILFSSIDTFTNLKLEEQIYVILELLKLYQGRNMKADLRLINGKKGSGSKQISKNISKYDSVILRNQSVTGLFSNDIDLLKI

SEQ ID NO: 4522 - protein, 1407 aa, unidentified
  REGION 1..1407: note = Description of Unknown: Cas Enzyme sequence
MSIINFQRSRLMETQTSNQLITSHLKDYPKQDYFVGLDIGTNSVGWAVTNTSYELLKFHSHKMWGSRLFEEGESAVTRRGFRSMRRRLERRKLRLKLLEELFADAMAQVDSTFFIRLHESKYHYEDKTTGHNSKHILFIDEDYTDQDYFTEYPTIYHLRKDLMENGTDDIRKLFLAVHHILKYRGNFLYEGATFNSNAFTFEDVLKQALVNITFNCFDTNSAISSISNILMESGKTKSDKAKAIERLVDTYTVFDEVNTPDKPQKEQVKEDKKTLKAFANLVLGLSANLIDLFGSVEDIDDDLKKLQIVGDTYDEKRDELAKVWGDEIHIIDDCKSVYDAIILMSIKEPGLTISQSKVKAFDKHKDDLVILKSLLKLDRNVYNEMFKSDKKGLHNYVHYIKQGRTEETSCSREDFYKYTKKIVEGLADSKDKEYILNEIELQTLLPLQRIKDNGVIPYQLHLEELKVILDKCGPKFPFLHTVSDGFSVTEKLIKMLEFRIPYYVGPLNTHHNIDNGGFSWAVRKQAGRVTPWNFEEKIDREKSAAAFIKNLTNKCTYLFGEDVLPKSSLLYSEFMLLNELNNVRIDGKALAQGVKQHLIDSIFKQDHKKMTKNRIELFLKDNNYITKKHKPEITGLDGEIKNDLTSYRDMVRILGNNFDVSMAEDIIIDITIFGESKKMLRQTLRNKFGSQLNDETIKKLSKLRYRDWGRLSKKLLKGIDGYDKAGNGAPKTIIELMRNDSYNLMEILGDKFSFMECIEEENAKLTQGQVVNPHDIIDELALSPAVKRAVWQALRIVDEVAHIKKALPSRIFVEVARTNKSEKKKKDSRQKRLSDLYSAIKKDDVLQSGLQDKEFGALKSGLANYDDAALRSKKLYLYYTQMGRCAYTGNIIDFNQLNTDNYDIDHIYPRSLTKDDSFDNLVLCERTANAKKSDIYPIDNTIQMKQRSFWAFLKHQGLISERKYERLTRIAPLTADDLSGFIARQLVETNQSVKATTTLLRRLYPDIDVVFVKAENVTDFRHDNNFIKVRSLNHHHHAKDAYLNIVVGNVYHEKFTRNFRLFFKKNGANRTYNLAKMFNYDVICTNAQDGKAWNKDTSMDTVKKMMASNDVRVTRRLLEQSGALADATIYKASVAAKAKDGAYIGMKTKSSVFADVTKYGGMTKIKNAYSIIVQYTGKKDEKIKEIVPLPIYLINRNTTDVDLIDYVKSVIPQAKDISIKYRKLCINQLVKINGFYYYLGGKTSNSICIDNGIQVLFSPEFEVYIKLIDKFYIMQKSNLNIDIKNVSTFNPQNNQQVFITVEDNIKLYDYFIDKLNSNIYQKMKGNKVNDLISIGRDRFIELPINIQCVLLLEILNMLTNMKTTYDIKLLGFSTSRTKIALKISNLNEFKIINESITGLYSNEVTIV

SEQ ID NO: 4523 - protein, 1407 aa, unidentified
  REGION 1..1407: note = Description of Unknown: Cas Enzyme sequence
MSIINFQRSRLMETQTSNQLITSHLKEYPKQDYFVGLDIGAGSVGWAVTNKLYELLKFKSHKMWGSRLFDEGESAVGRRSFRSIRRRLERRKLRLKLLEELFADAMAQVDSTFFMRLRESKYHHEDKTTGHSSKHILFIDKDYTDQDYFKEYPTIYHLRAELMKSGTDDIRKLFLAAHHILKYRGNFLYEGATFDSNASTLDDVLKQAIENITFNCFDAKAAISSIGEILMEQGKTKSDKAKAIERLVDTYIATVTEDTSSKTQKEQVKEDKKRLKAFANLALGLSASLTDLFGSVEELDDDLKKLQITGDTYDDKRDELAKAWGDEIHIIDDCKSVYDAIILMSIKEPGLTISESKVKAFNKHKEDLAILKSLLKTDRSIYNAMFKADEKGLHNYVHYIKQGRTEETSCNREDFYKYTKKVVEGLPDSKDKDYILSEIELQTLLPLQRIKDNGVIPYQLHLEELKIILKTCGPKFPFLNEVADGYSVAEKLIKMLEFRIPYYVGPLNSHHNVDKGGFAWAVRKASGRVTPWNFDDKIDREKSAAAFIKNLTNKCTYLLGEDVLPKSSLLYSEFMLLNELNNIRIDGKPLETGVKEHLIEAVFKQDHKKMTKNRIEQFLKDNNYISNKHKPDITGLDGEIKNDLTSYRDMVRILGTNFDKSMAEDIIMDITIFGESKKMLRETLRNKFASHLDDETIKKLAKLRYRDWGRISKKLLNGLEGCDKTGDCEAATIIKFMRNFSYNLMELLGDKFSFMERIQEINNKLTEGQVVNPHDIIDDLALSPAVKRAVWQALRIVDEVVHIKKALPSRIFVEVTRSNKTEKKKKDSRQKRLSDLYAAIKKDDALLNGLKNEEFSGLKSELATYDDAALRSKKLYLYYTQMGRCAYTGESIDIAILNTDNYDIDHIYPRSLTKDDSFDNLVLCKRTANAQKSDTYPIAEEIQKAQKPFWTFLKQQGLISERKYERLTRNTPLTADDLSGFIARQLVETNQSVKAATTLLRRLYPEIDVVFVKAENVTDFRHDNNFIKVRSLNHHHHAKDAYLNIVVGNVYHEKFTRNFRVFFKKNGANRTYNLAKMFNYDVKCTNAKDGKAWDVKTSMDIVKKMMASNDVRVTKRLLEQSGALADATVYKATVAGKAKDGAYIGMKTKSSVFADVSKYGGMTKIKNAYSIIVQYVGKKDEIVKEIVPLPIYLTNSNTIDQDLIDYVASITPEAKDISIIYRKLCINQLVKINGFYYYLGGKTSNSICIDNAIQVLLSNEFLIYAKLLDKVNTLRKSDPSINIQNISTLSPLAKEQISITINDNLKFYDYLVEKLNSNIYKKMKGNKARDLIDIGREKFKGIDVSSQCILLLEILNMLTNMKTTYDIKLLGFSTSRTKIALKVSTLDEFKIINESITGLYSNEITIV

SEQ ID NO: 4524 - protein, 1407 aa, unidentified
  REGION 1..1407: note = Description of Unknown: Cas Enzyme sequence
MSIINFRRRGLMEMQTAKQLISSHLKGYPIKDYFVGLDIGAGSVGWAVTNKLYELLKFRSHKMWGSRLFDEGESAVGRRSFRSIRRRLERRKLRLKLLEELFADAMAQVDSTFFMRLRESKYHYEDKTTGHSSKHILFIDKDYTDQDYFKEYPTIYHLRAELMKSGTDDIRKLFLAVHHILKYRGNFLYEGATFDSNASTLDDVLKQALENITFNCFDCNSAISSIGQILMDAGKTKSDKAKAIERLVDTYIATDTEGISSKTQKEQVKEDKKRLKAFASLVLGLSASLTDLFGSVEELEDDLKKLQITGDTYDDKRDELAKAWGDKIHIIDDCKSVYDAIILMSIKEPGLTISESKVKAFNKHKEDLVILKSLLKTDRSIYNAMFKADEKGLHNYVHYIKRGRTEETSCNREDFYKYTKKVVEGLPDSKNKEYILSEIELQTLLPLQRIKDNGVIPYQLHLEELKTILKTCVAKFPFLNEVADGYSVAEKLIKMLEFRIPYYVGPLNTYHNVDKGGFAWAVRKASGRITPWNFDDKIDREKSAAAFIKNLTNKCTYLLGEDVLPKSSLLYSEFMLLNELNNIRIDGKPLETAVKEHLIEAVFKQDHKKMTKNRIEQFLKDNNYIHNMHKPDITGLDGEIKNDLTSYRDMVRILGTKFDRSMAEDIIMDITIFGESKKMLRETLRNKFASHLDDETIKKLSKLRYRDWGRLSKKLLNGIQGCDKAGDGTPETIIELMRNFSYNLMELLGDKFSFMERIQEINDKLTEGQVVDPQDIIDELALSPAVKRAVWQALRIVDEVIHIKKALPSRIFVEVTRSNKTEKKKKDSRQKRLSDLYAAIKKEDALMNGLKETEFSGLKSGLANYDDAALRSKKLYLYYTQMGRCAYTGNIIDLNLLNTDNYDIDHIYPRSLTKDDSFDNLVLCERTANAKKSDTYPIDNTIQTNQKVFWSFLKHQGLISERKYARLTRTAPLTEDDLSGFIARQLVETNQSVKAATTLLRRLYPGVDVVFVKAENVTDFRHDNNFIKVRSLNHHHHAKDAYLNIVVGNVYHEKFTRNFRAFFKKNGANRTYNLAKMFNYDVKCTNAKDGKAWDVKTSMGIVKKMMDSNDVRVTKRLLEQSGALADATVYKATVAGKAKDGAYIGMKTKSSVFADVSKYGGMTKIKNAYSIIVQYVGKKGEVIKEIVPLPIYLTNRNITDQDLIDYVTSITPEAKDISIIYRKLCINQLVKVNGFYYYLGGKTSNSICIDNAIQVLLSNEFLIYAKLLDKVNTLRKSDPSINVQKLSTFSPIAKEQISITINDNLKFYDYLVEKLNSNIYKKMKGNKASDLIDIGREKFKGIDVSSQCILLLEILNMLTNMKTTYDIKLLGFSTSRTKIALKVSTLDEFKIINQSITGLYSSEITIV

SEQ ID NO: 4525 - protein, 1409 aa, unidentified
  REGION 1..1409: note = Description of Unknown: Cas Enzyme sequence
MSIINFRRRGLMEMQTSKQLISSHLKEYPIKDYFVGLDIGTSSVGWAVTNKLYELLKFRSHKMWGSRLFDEGESAVGRRSFRSIRRRLERRKLRLKLLEELFADAMAQVDPTFFIRLHESKHHYEDKTTSHSSKHILFIDKNYTDQDYFKEYPTIYHLRAELMKSGTDDIRKLFLAVHHILKYRGNFLYEGATFDSNASTLDDVLKQALENITFNCFDCNSAISSIGQILMETGKTKSDKAKAIERLVDTYITTDTEDSSSKIQKEQVKEDKKRLKAFANLVLGLSASLTDLFGSVEELDDDLKKLQITGDTYDDKRDELAKAWGDEIHIIDDCKSVYDAIILMSIKEPGLTISESKIKAFNKHKEDLVILKSLLKTDRSIYNAMFKADEKGLHNYVHYIKQGRKEETSCNREDFYKYTKKIVEGLPDSKDKAYILSEIELQTLLPLQRIKDNGVIPYQLHLEELKTILDTCKSKFPFLNEVADGYSVAEKLIKMLEFRIPYYVGPLNTYHNVNNGGFAWAVRKASGRVTPWNFDDKIDREKSAAAFIKNLTNKCTYLLGEDVLPKSSLLYSEFMLLNELNNIRIDGKPLETAVKEHLIEAVFKQDHKKMTKNRIEQFLKDNNYIPKKHKPDITGLDGEIKNDLTSYRDMVRILGIDFDRSMAEDIIMDITIFGESKKMLRETLRNKFASRLDNEAIKKLSKLRYRDWGRLSKKLLNGIEGCDKAGDGTPKTIIKLMRNFSYNLMELLGDKFSFMERIQELNDELTRGQVVDPHDIIDELGLSSAVKRAVWQALRIVDEVIHIKKALPSRIFVEVTRSNKAEKKKKDSRQKRLSDLYAAIKKDEALLSGLKDTEFDGLKLGLANYDDAALRSKKLYLYYTQMGRCAYTGNIIDLNLLNTDNYDIDHIYPRSLTKDDSFDNLVLCERTANAKKSDTYPIDNTIQTNQKVFWSFLKHQGLISERKYERLTRIVPLTEDDLSGFIARQLVETNQSVKAATTLLRRLYPGVDVVFVKAENVTDFRHDNNFIKVRSLNHHHHAKDAYLNIVVGNVYHEKFTRNFRAFFKKNGANRTYNLAKMFNYDVKCTNAKDGKAWDIKTSMDIVKKMMDSNDVRVTKRLLEQSGALADATVYKATVAAKANDGAYIGMKTKSSVFADVTKYGGMTKIKNAYSIIVQYIGKKGEVVKEIVPLPIYLTNRNITDQDLIDYVASITPDAKNISIIYRKLCINQLVKVNGFYYYLGGKTNSKIYIDNAVEVVVPTNIAVYIKVLEKFDLLRKDNKALKASTVTTRIYSESSTEIVSITDNDGLIVYDYLMSKLRTPLYMKMKGNKVDELSTVGRSKFTKMTLEEQSIYLLEVLNLLTNSKTTFDVKPLGITASRSTIGVKIHTLDEFKIINQSITGLYSNEITIV

SEQ ID NO: 4526 - protein, 1409 aa, unidentified
  REGION 1..1409: note = Description of Unknown: Cas Enzyme sequence
MSIINFQRRGLMETQASNQLISSHLKGYPIKDYFVGLDIGTSSVGWAVTNKAYELLKFRSHKMWGSRLFDEGESAVARRGFRSMRRRLERRKLRLKLLEELFADAMAQVDPTFFMRLRESKYHYEDKTTGHSSKHILFIDKNYTDQDYYKAYPTIYHLRAELMKDGTDDIRKLFLAVHHILKYRGNFLYEGATFDSNASTLDDVIKQALENITFNCFDCNSAISSIGQILMEAGKTKSDKAKAIEHLVDTYIATDTVDTSSKTQKDQVKEDKKRLKAFANLVLGLNASLIDLFGSVEELEEDLKKLQITGDTYDDKRDELAKAWSDEIYIIDDCKSVYDAIILLSIKEPGLTISESKVKAFNKHKDDLAILKSLLKADRSIYNEMFKADEKGLHNYVHYIKQGRKEETSCNREEFYKYTKKVVEGLPDSKDKEYILSEIELQTLLPLQRIKDNGVIPYQLHLEELKTILDTCKSKFPFLNVVADGYSVADKLIKMLEFRIPYYVGPLNTHHNVDNGGFAWAVRKASGRVTPWNFDDKIDREKSAAAFIKNLTNKCTYLLGEDVLPKSSLLYSEFMLLNELNNVRIDGKPLEKAVKEHLIEAVFKQDHKKMTKNRIEQFLKDNGYISETHKHEITGLDGEIKNDLASYRDMVRILGDGFDRSMAEEIITDITIFGESKKMLRETLRNKFSSRLDDEAIKKLSKLRYRDWGRLSKKLLNGIDGCDKAGDGTSVTIIEEMRDFSYNLMELLGDRFSFMERIQEINDKLTEGQIVNPHDIIDDLALSPAVKRAVWQALRIVDEIVHIKKALPARIFVEVTRSNKAEKKKKDSRQKRLSDLYAAIKKDDVLLSGLTNEEFGGLKSELAKYDDAALRSKKLYLYYTQMGRCAYTGEVIDLSQLNTDNYDIDHIYPRSLTKDDSFDNLVLCKRTANAQKSDTYPISKEIQKAQKPFWTFLKQQGLISERKYERLTRITPLTADDLSGFIARQLVETNQSVKAATTLLRRLYPGVDVVFVKAENVTDFRHDNNFIKVRSLNHHHHAKDAYLNIVVGNVYHERFTRNFRAFFKKNGANRTYNLAKMFNYDVNCTNAKDGKAWDVKTSMDTVKKMMDSNDVRVTKRLLEQTGALADATIYKATVAGKAKDGAYIGMKTKSSVFADVSKYGGMTKIKNAYSIIVQYTGKKGEVIKEIVPLPIYLTNRNTTDQDLINYVASIIPQAKDISIIYGKLCINQLVKVNGFYYYLGGKTNSKFCIDNAIQVIVSNEWIPYLKVLEKFNNMRKDNKDLKANVVSTRALDNKHTIEVRIVEEKNIEFFDYLVSKLKMPIYQKMKGNKAAELSEKGYGLFKKMSLEEQSIHLIELLNLLTNQKTTFEVKPLGITASRSTVGSKISNQDEFKVINESITGLYSNEVTIV

SEQ ID NO: 4527 - protein, 1410 aa, unidentified
  REGION 1..1410: note = Description of Unknown: Cas Enzyme sequence
MSIINFQRSRLMETQTSNQLITSHLKDYPKQDYFVGLDIGTNSVGWAVTNTSYELLKFHSHKMWGSRLFEEGESAVTRRGFRSMRRRLERRKLRLKLLEELFADAMAQVDSTFFIRLHESKYHYEDKTTGHSSKHILFIDEDYTDQDYFTEYPTIYHLRKDLMENGTDDIRKLFLAVHHILKYRGNFLYEGATFNSNAFTFEDVLKRALVNITFNCFDTNSAISSISNILMESGKTKSDKAKVIERLVDTYTVFDEVNTPDKPQKEQVKEDKKTLKAFANLVLGLSANLIDLFGSVEDIDDDLKKLQIVGDTYDEKRDELAKVWGDEIHIIDDCKSVYDAIILMSIKEPGLTISQSKVKAFDKHKEDLVILKSLLKLDRNVYNEMFKSDKKGLHNYVHYIKQGRTEETSCSREDFYKYTKKIVEGLADSKDKEYILNEIELQTLLPLQRIKDNGVIPYQLHLEELKVILDKCGPKFPFLHTVSDGFSVTEKLIKMLEFRIPYYVGPLNTHHNIDNGGFSWAVRKQAGRVTPWNFEEKIDREKSAAAFIKNLTNKCTYLFGEDVLPKSSLLYSEFMLLNELNNVRIDGKALAQGVKQHLIDSIFKQDHKKMTKNRIELFLKDNNYITKKHKPEITGLDGEIKNDLTSYRDMVRILGNNFDVSMAEDIITDITIFGESKKMLRQTLRNKFGSQLNDETIKKLSKLRYRDWGRLSKKLLKGIAGCDKAGNCAPKTIIELMRNDSYNLMELLGDKFSFMECIEEENAKLTQGQVVNPHDIIDELALSPAVKRAVWQALRIIDEVVHIKKALPSRIFVEVARTNKSEKKKKDSRQKRLSDLYSAIKKDDVLQSGLQDKEFGALKSGLANYDDAALRSKKLYLYYTQMGRCAYTGNIIDLNQLNTDNYDIDHIYPRSLTKDDSFDNLVLCERTANAKKSDTYPIDNTIQMKQKSFWGFLKHQGLISERKYERLTRILPLTADDLSGFIARQLVETNQSVKATTTLLRRLYPDIDVVFVKAENVSDFRHDNNFIKVRSLNHHHHAKDAYLNIVVGNVYHEKFTRNFRLFFKKNGANRTYNLAKMFNYDVICTNAQDGKAWNKDTSMDTVKKMMASNDVRVTRRLLEQSGALADATVYKASVAVKAKDGAYIGMKTKSSVFADVSKYGGMTKIKNAYSIIVQYNTGKRDEEIKEIVPLPIYLTNRNTTDSDLIDYVKSVIPKAKDISIKYRKLCINQLVKVNGFYYYLGGKTNSNFCIDNAVQLVVSHDWISYFKVLEKFNNIKKTNKDLKANSVSTRIHSNMGTVEINIDKNKNLDCFDYLMTKFKMPLYQKMKGNKVAELSTKGRSFFEKMSLEEQCVYLMAILNLLTNQKTTFDVKALGITASRSTVGSKVSTQEEFKIINESITGLFSNEVTIV

SEQ ID NO: 4528 - protein, 1406 aa, unidentified
  REGION 1..1406: note = Description of Unknown: Cas Enzyme sequence
MSIINFQRSRLMETQTSNQLITSHLKDYPKQDYFVGLDIGTNSVGWAVTNKSYELLKFHSHKMWGSRLFEEGESAVTRRGFRSMRRRLERRKLRLKLLEELFADAMAQVDSTFFIRLHESKYHYEDKTTGHSSKHILFIDEDYTDQDYFTEYPTIYHLRKDLMANGTDDIRKLFLAVHHILKYRGNFLYEGATFNSNAFTFEDVLKQALVNITFNCFDTNSAISSISNILMESGKTKSDKAKAIERLIDTYTVFDEVNTPDKPQKEQVKEDKKTLKAFANLVLGLSANLIDLFGSVEDIDDDLKKLQIVGDTYDEKRDELAKVWGDEIHIIDDCKSVYDAIILMSIKEPGLTISQSKVKAFDKHKEDLVILKSLLKLDRNVYNEMFKFDKKGLHNYVHYIKQGRTEETSCSREDFYKYTKKIVEGLADSKDKEYILNEIELQTLLPLQRIKDNGVIPYQLHLEELKVILDKCGPKFPFLHTVSDGFSVTEKLIKMLEFRIPYYVGPLNTHHNIANGGFSWAVRKQAGRVTPWNFEEKIDREKSAAAFIKNLTNKCTYLFGEDVLPKSSLLYSEFMLLNELNNVRIDGKALAQGVKQHLIDSIFKQDHKKMTKNRIELFLKDNNYITKKHKPEITGLDGEIKNDLTSYRDMVRILGNNFDVSMAEDIITDITIFGESKKMLRQTLRNKFGSQLNDDTIKKLSKLRYRDWGRLSKKLLKGIDGCDKAGNGAPKTIIELMRNDSYNLMEILGDKFSFMECIEEENAKLTQGQVVNPHDIIDELALSPAVKRAVWQALRIVDEVAHIKKALPSRIFVEVARTNKSEKKKKDSRQKRLSDLYSAIKKDDVLQSGLQDKEFGALKSGLANYDDAALRSKKLYLYYTQMGRCAYTGNIIDLNQLNTDNYDIDHIYPRSLTKDDSFDNLVLCERTANAKKSDIYPIDNTIQMKQRSFWAFLKHQGLISERKYERLTRIAPLTADDLSGFIARQLVETNQSVKATTTLLRRLYPDIDVVFVKAENVTDFRHDNNFIKVRSLNHHHHAKDAYLNIVVGNVYHEKFTRNFRLFFKKNGANRTYNLAKMFNYDVICTNAQDGKAWDVKTSMNTVKKMMASNDVRVTRRVYEQKGQLADINLTKASKVKADIYLPIKGNDLIMSQNTKYGGYSDIKNAYYTIIEYSDKKNNSIKSFLPIPIFIATKNLTNQALLEYINTILPKANNIRIIYKKVYNDQLLKIDGFNYYLGGRSNDRFCIDNAIQLIAPLEMQFYIKLVEKFTAIISENKNIKLKASSVKSRNPINNQVENITLEYSQKLFDYLVSKFNEPIYTKMRGNKSTDIDSVGRRQFTKLSLEERCKTLAEMLNIITNMNKKLSLSNINVSASRKVVNFKISSLNEFKIINESITGLYSNEVTIV

SEQ ID NO: 4529 - protein, 1409 aa, unidentified
  REGION 1..1409: note = Description of Unknown: Cas Enzyme sequence
MSIINFQRSRLMETQTSNQLITSHLKDYPKQDYFVGLDIGTNSVGWAVTNKSYELLKFHSHKMWGSRLFEEGESAVTRRGFRSMRRRLERRKLRLKLLEELFADAMAQVDSTFFIRLHESKYHYEDKTTGHSSKHILFIDEDYTDQDYFSEYPTIYHLRKDLMENGTDDIRKLFLAVHHILKYRGNFLYEGATFNSNAFTFEDVLIQALVNITFNCFDTNSAISSISNILMESGKTKSDKAKAIERLVDTYTVFDEVNTPDKPQKEQVKEDKKTLKAFANLVLGLSANLIDLFGSVEDIDDDLKKLQIVGDTYDEKRDELAKVWGDEIHIIDDCKSVYDAIILMSIKEPGLTISQSKVKAFDKHKEDLVILKSLLKSDRSVYYEMFKSDKKGLHNYVHYIKQGRTEETSCSREDFYKYTKKIVEGLADSKDKEYILNEIELQTLLPLQRIKDNGVIPYQLHLEELKVILNKCGSRFPFLHTVSDGFSVTEKLIKMLEFRIPYYVGPLNTHHNVDNGGFAWAVRKQAGRVTPWNFEEKIDREKSAAAFIKNLTNKCTYLFGEDVLPKSSLLYSEFMLLNELNNVRIDGKPLAQGVKQHLIDSIFKQDHKKMTKNRIELFLKDNNYITKKHKPEITGLDGEIKNDLTSYRDMVRILGNNFDVSMAEEIITDITIFGESKKMLRETLRNKFGSQLNDETIKKLSKLRYRDWGRLSKKLLNGIDGCDKGGNGIPETIIELMRNDSYNLMELLGDKFSFMECIEEENAKLTQGQVVNPHDIIDELALSPAVKRAVWQALRIVDEVAHIKKALPSRIFVEVARTNKSEKKKKDSRQKRLSDLYSAIKKDDVLQSGLQDKEFGALKSGLSNYDDAALRSKKLYLYYTQMGRCAYTGNIIDLNQLNTDNYDIDHIYPRSLTKDDSFDNLVLCERTANAKKSDTYPIDNTIQTKQKSFWAFLKHQGLISERKYERLTRIAPLTVDDLSGFIARQLVETNQSVKATTTLLRRLYPDIDVVFVKAENVTDFRHDNNFIKVRSLNHHHHAKDAYLNIVVGNVYHEKFTRNFRLFFKKNGANRTYNLAKMFNYDVKCTNAQDGKAWDKQTSMDTVKKMMASNDVRVTRRLLEQSGALADATVYKASVAAKAKDGAYIGMKTKSSVFADVSKYGGMTKIKNAYSIIVQYTGKKNEVIKEIVPLPIYLTNRNTTDSDLLDYVKSVIPKSKDITIIYRKLCINQLVKVNGFYYYLGGKTNSKFCIDNAVEVVVSNDRIPYFKVIEKFNNMRKDDKDLKANSISTRTYNNMGTVIIKIDKDKNLDCFDYLMTKFKMPIYQKMKGNKGIELSTTGYALFEKMSLEEQCIYLMEILNLLTNQKTIFDVKALGITASRTTVGSKVSNQEEFKIINESITGLYSNEVTIV

SEQ ID NO: 4530 - protein, 1387 aa, unidentified
  REGION 1..1387: note = Description of Unknown: Cas Enzyme sequence
MEKNYYIGLDIGTNSVGWAVTDEKYSVVKKKGKRLWGVRLFDTAATAKKRRLKRTARRRYLRRRQRIDLLQELFAPLILERDENFFRRLDESFFFEEDKKVDGKYSLFSDKNYTDKDFYKEYKTAYHLRNRLIKGDIPDDPRIVYLACHHIIKKRGHFLFNGEINGNNISCVNEIRGLQKFVTDGNDHDVPMFGGDNFKDFSLDEFVKIITLTDTRRESIEKTTELFGVSDGKYLKNAVRVMFGYKQKVKTLFASEYYGDCDIEIDFTSEQYEETSEALKIELGDDYSYVDTLKNLYDFVVLKRLLKEHSSISEAMVSKYERHAVELRMLKNIVRKYGKTSDYNEIFKETVSDASYAKYIGMNKKGGVKQVTERESAYSYETFYKALLGKLDSIVTDKSDADYLCIKNRIENKDFLIRYASSVNASIPNQLHRDELNRILDNASVKFPYLLEKDGDGLSVKDKIMSIMTYKIPYYVGPIPNDENSEAIGKYSWLVRKESGKVLPWNFEKKVDMNASMEKFIKSLINRCSYLNTENVLPKQSLIYQEYEVLNELNGIKFNGKRIDNETKLKIFEGLFKNSGKKKITEKILKAFLVNENVVSKSDINALKIDGYQKDKEFSTCLSSYVNIVKALGNDFDRGYVDNNIDTFERIIELSTVYADNKSLFVEKLKQEFPALDERVIAKVKGLTFTKWGRLSKRLLVGVVASNTATGEVSNILSLMRNTNANFMEIIFDKEWNFNALIEEENKSVSRQIDKIKYSDIAELYCSPSVKRAIWQSIKIVREIVEIMGYPPTKFFVEVTRSDEDKKRTSSRKSVLQKLYKGVDDSGDIKAIKEALEKENENSLKDERLYLYYSQQGKCMYTGKPINIDDLLNTKLYDIDHIYPQSMTTDESVHRNKVLVCRSANKDKSDVYPLNIEVQNKMAGFWKSLRDKEFITPEKYIRLTRKEPLTDKELGDFIARQLVFTSQSVKEVINLLKIEYPNSETCYVKAEVVKDFRSRNNYLKIRTLNDLHHAKDAYLNVVAGNILSTANKNNFRMQRINKGNEIDTDIIKNYSISNIFSRGYVVSTAKNLAWNCDLFDNVEKQYYRNDILVTKMQTVGKGAFYDETVRKSLANAKYAKAARKASIPLKKVEGNRYSIERYGGVTTVSPRWFALIGCSDKKNNQIYRIEPITIYDYAKMDKSRIKDEMASLLERQGHKNVDIIAILKKNTLLSIDGNRYYLTGTSGESLTLDNAKQLTVGREYELAVNRILKYTENPKRNKDVTEVAIRSKSKEDYNIDEKAVFVMLVDKLKTEFPQFRVVASKFDDESIKAFDTASKSRQCEIITNIINMMGCNSTRGKLDGEPFNANFKASEGALTANKKVSYELTVIDQSVTGVYEYSKSIKK

SEQ ID NO: 4531 - protein, 1375 aa, unidentified
  REGION 1..1375: note = Description of Unknown: Cas Enzyme sequence
MIKNKRDYYLGLDLGTSSVGWAVTDEEYNILRFNKKDMWGSRLFDEAKTAKERRIFRANRRRLERRARRLELLNEIFEEEIKKVDENFFRRLYESNLHKEDKSIDFEYPLFNDENYTDKDYHKEFPTIYHLRNALCKENKKFDIRLVYLAIHHILKNRGHFIFEGQKFSDIKNFENLFKETSEFLEKYGISTEDIDIKELEKAICNNKSKNEKENNIKNILKKNLNKEFLEVFLTCAIGSKVSINKVLGIEKELNIELSKVVYENERSEYEDVLGDDIELIDYCKKIYDFIILKNILKDSENISEFKVRQYEIHKEELKNLKYLFRKYLTKKDYFNFFTSRNEKENYAAYVNSTMYHGNKDIKEKICTIEKFNEKIKGYIKKIKDNEDSDKNIFDDINKKLKENKFLDKLRIRDNGVLPYQLNEIELRKILENQGQFYQFLLNKTNGKEYDILKLLTFRIPYYVGTTKGKFSWLSEEDIKNKEKITPWNFNEKIDIENAGMKFISHMTNKCSYLKSEDVLPKQSLIYQEYILLNELNKIRVDRKYLSLQLKNEIVNELFKKVQKVTLNKFKSFLLKKQAIIDKDSIEGIDNEFNSTLSSYVKLYRIMNDKLETNEGENFVERLIYLKTIYGKTTKFILKVLRQEFKEYIEKNIGEEKLNKIVKIEFDGWGRLSRKLLLDISFEDIRDGKKQRFENVLEALRTTNYNFMELMSNNFNLIEKIEEFNKKDNSNEKFNIYDYVNELYVSPSIKRPIIQAYKLAIEIKKINCADPKKVFIEMARGGGEKGKKTEKRQEKIKKYYEEFKKDENYKLIIEKLNKELENYNDNRLRQKKLFLYFMQLGKSMYTGEKIDLDELLNSNKYDIDHIIPQSKIKDDSFNNIVLVEKEINSHKNDSDFIDESIRNRMKGFWYVLLTKEMITKEKYNRLMRNTMFSTEELSGFVARQLVVTRQSTLEIKKLFESIFPNTEIICVKAGLVSDFREQFEIIKVRELNDTHHAQDAYLNIVVGNVYDAKFKDFWKLIQSKQRGEINESLNLKKIFDYNVYQESKQVWNKETDKNKVKTMCERKTVNVTKMLCEDKGKLFNLTIEKKCKNDNIVPNTPKALKGKNINSSEIAEKYGYYSNLNAAYYVIFKYTKIIKKKSKEILEIKPVYIYENNKKLSDSDIIKKLENLGYNNPILVTRIKKNQKILLNGYPYRVSGGTKKDQKYNLELKNDFDLYVDGEYLKYAKDLSNFCKDNDKNDGKNENIRYFVRFKKKKNIDEKNETYDECILRLNDEFNKLFCHLCIEKSNFGIYVNYLNIDKIKKFYKKNENEFEKSSLKEKSNKLKGILQVYNRKTSGILSTRLNNRNILGDKNLKIINESITGLIINEMEIK

SEQ ID NO: 4532 - protein, 1393 aa, unidentified
  REGION 1..1393: note = Description of Unknown: Cas Enzyme sequence
MKKTSDYFLGFDVGTGSVGWAVTDESYNLMHFKGKDLWGMRMFETAQTAEQRRIQRTSRRRLERRRKRLLLLQELFAEEITKVDPAFFQRLKESPFYAEDKHIVQRNSLFNDADFNDKTFHSLYPTVYHLIKALIEDKAAHDIRLLYLACHTIIKKRGHFLFEGDLDSDNRMDDAVKELFEYLREDMEIDFGSDIQAITRILKDNALSLSIKQSRLKETLNIDAKEVQKKAVISLITGGALELSNFFYREEFKDAEQKKIALSKDDFDSVEDKLGSLLNEDFELIRKAKAVYDSSILSAIIGDEQYLSDAKIKIYEKHKNDLALLKKTVKKYHPDSYVKLFKSETEKDNYCAYIGSCKKNGKKVAIEKKSDQEAFYSYLKKILTKKDIQDTEYKSILRDIELQGFLPKQTDKKNAHIPYQLREIELKKILEIQSAYFPFLEKKDVQGMRVRDKILSLLTFRIPYYIGPVNDAHKERFPDRCWVVKKENTKKEKISPWNFDNYIDEDKTAEAFITTRTNKCSYLIGEDVLPRHSLLYSEYTVLNEINNLKIHLHGNNILNIALKQKIYTGLFKKYKTVSKKSIEKFLITEGICSKNDAHDLVITGIDDLCTSSLNSYISLKNIIGEKIEEHSVRMMMEEIIRWLSIYDEGEGKKIIKEKIKQSYSDALTETEIKSILKLKFSGWGRLSKKVLEGIKCDFEGFSEKINIITALRETNYNLMELLSNKNAFGKEIDSLNAGFEDTKAEFSYKSLVKDLYLSPSVKRMLWQTLRVAGEIKKVLKIPPKKIFIEMARGEEAEKGRTQSRQSMIKNLYEECRKDAGKWENDVLTLFSKIEKEDNLKLRSDKLYLYYTQLGRCMYSGESINLETLLTSNVYDIDHIYPQSKIKDDSLTNRVLVKKDVNQNKEDKYPLSLEIQDKQRAFWMFLHSKGFINSEKLSRLTRKTPLSGDELADFIARQLVETRQATKEAGKVLKRLFPDTQIVYVKARDVSDFRQKFDLIKCRDINDFHHAHDAYLNIAVGNVYHTKFTSNPRNFIKESRAEDGDSSYNLNTLFEHDVSVNNRIAWKKNESIACIKKMLAKNTPLYVRHSFCQRGSLFDLTIMKKGKGQFSLKKEGALSSITKYGGYNKVAVSYYVLVEYREKDKIIKSLETVPLYLAADIEKNKDILFDHLNKVLNDKAFKILIPKIKVNTLVYINGFPCHITGKTGERFVVRNAVQFCCNQETTLFLKRILKFNNVKSVYERIKKPFYAYDDYTLRTYVKNEVYGKKAIAVISETEFFKNLDKKLMHLYDYFVDKHKNSIYRKRPNSAVLDVLENGRGRFISLTIEDKLKTIEEILRLFRTVNENCDLENIGGEKKSGKTTMGKNVSNLECCVIVYQSVTGIFERRVDVLAL

SEQ ID NO: 4533 - protein, 1316 aa, unidentified
  REGION 1..1316: note = Description of Unknown: Cas Enzyme sequence
MKPYYIGLDIGTNSVGWAVANMEYRIPKYRGNAMWGIRLFEESDTAEERRTFRAGRRRTERRKERLKLLEILFDKEISSIDPAFFRRLRESNLYMQDKTEEVPYALFADRLYTDKEFHKEFPSIYHLRKSILENKKKYDVRIVFLALHHIIKNRGHFLFENLTIGEISSFEKVFYELVGYLADNYDLELHCTDEKELSDVLLNKLLGKKKKTDAILQLCEIKKKTNPQMAAILSLMAGSSVKLADIFQEDTWNDTEYKSISFSDKFEEKAAELQNLLGEKFELLEKLKVIYDWAVLADILQGEQYISYAKVKTYETHQADLRWLKKFVALHCPEKKSEIFRKSKSGLNNYVAYAGKIKKNGKTGVLENRCTQEDFCGYLKKILPVSDDPEDQKMRERIENATFMPKQITKDNGVIPMQIHRAELVAILKNAEAYLPFLQEKDEEGMTVSEKIIAIFDYRIPYYVGPLNQHSNKAWIVRQTGKIYPWNFHQKVDIEASAEAFIQNLTSKCTYLPQEDVLPKQSILYSRYMVLNELNNLKINGEKISVACKQDIFNTLFLTHKKVTRKMLADYFKAKGIQAETITGFDGDFKANMKSYLDLEPFELTLEEKEDVIAAITIFGDDRRLLQKRLTAKYGEKLDTDEIRSISRLKYTGWSALSKAFLTNVESVDPESGEIFNIITALWETNDNLMMLLGSKYGFGKRLKEMTVSEESQSMREMVENLYVSPKIKRPIYQAMQIVQELVKIQGDAPKKIFVEVTRGPQEKKRTDSRRNKLLALYESCKKEAPELYESLQKTYTSDEDFRRDALYLYFTQMGKCMYTGDDIPLEQLFDRNVYDIDHIFPQSKVKDDSLDNRVLVKKEVNAKKDNIYPLPEDVRTKQMGFWHILLEKGLISKKKFERLTRPYPLTDEELSDFIQRQVVETGQSVKAVATLLRQIYERFGTEIVYVKAGQVSDFRHEYDMLKCREVNDFHHAKDAYLNIVVGNVYNEKFTHNRANFIKGLQTGKVSLNRMFQYNIENAWVADNDMSMGIVKKTMAKNNIRYTRYAFCQKGGLFDQNPLKKGKGQVSLKKGVRGDTEKYGAYNRPSSTFFALLEYEEKKGKAGRKLVPVDLYLLREYEEDPVAYMKKYAELKNPRIMIPCIKYGACLSFDGFRAHISSKISGGRQIGFKPGVQLILSYHQEVYIKRLLKVIEKHKEPNSFDKITLEENLNLYHSLCEKMVYTIFGKKFAPLGEKMMKNQEKFEKLTLLQQGYVIAEILKILHANVMTGDLRLVGESGQTGATTYGANLLGIKGVSSICLIHQSVTGLYEKEIDLLH

SEQ ID NO: 4534 - protein, 1345 aa, unidentified
  REGION 1..1345: note = Description of Unknown: Cas Enzyme sequence
MGNKLRNVDDYYLGLDIGTESVGWAVTDKYYVIPKFKGNAMWGVHLFDEGETSVKRRGFRSARRRTQRKRERLALLEALFDEEICKKDCTFFRRLHESDLWPEDKSGDDKYAVFADENYTDKDFHKEYPTIYHLRYELIKNKEPHDVRLVFLALHHIIKNRGHFLFDSLSSAEDFNSAYETMCSYLSDNEIQLNCSDIEQFKAILKDRRQGKIEKTKNLASLFGITKKSDPVSYAVMAVLSGSTVKMCDLFGDDELKTVEKNNISFASGYEENEEIYASVLGDRFELVKILKAVYDWAVLADILDGKKYISEAKVAVYEKHKNDLKTLKKYVKTYLPEKYNEIFKISDGKKDNYVAYSGHIKESGKTGELKKTCNSENFCAYLKKTLGKNADLSYKEMFDEIENKTFMPKQVTKSNGVVPMQVNEEELKAILDNAKDYLSFLNSCDENGVSVYDKIIKIFEYRIPYYVGPLNTHTENSWLKRKDGVKIYPWNFDDVVDIDSSAEKFINNLTSKCTYLPECDVIPKCSLLYSKFTVLNEINNLKLNGEDIPVELKQGIYKDLFMTRRKVTVKQIKDYLKARGCYDNNDVLSGIDTTVKSSLKSYFDFKGFESLTFDDKESIIASSVIFGDDKKLLKKRLKKLFPEKLTDEDIKKICKLKYTGWSRLSKEFLCDVEFTYKKTGEVMNVITALWETNYNLMQILYSEDFCCDGDEKKNLNDKLDELSYTGDQHSLRKAVDALYVSPKVKRPILRALLIAKEIEKIQERPPKKIFVEVARGIDNREERHRDSRKNRLMELYKNCKKEAEKFCPYFDALSKKLSDEDESKLRRDKLYFYYIQLGKCMYTGEEISLGELMNGNGRFDIDHIYPRSKIKDDSLTNKVLVNKTVNNNKTNVYPIDAAIQSKMSPYWQMLRSSGLISEETYKRLTRKTPLTDDELSAFVSRQLTETQQSTKAVAHILEQLYPKPKTEIVYVKAALVHAFRQSNDMLKCREVNDLHHAKDAYLNIVVGNAYNVKVTHNKVNFIKGLQNNDKGYTVNPEKFFSHDIPGAWSVKDSMNTVRRFMNKNNIRYTRFPRKKQGGLFKINPLKKGNGQVPLKASGARSCIEKYGGYDKATSAYFSYVEYTDKKGKAVRQMFPVNLYEVKEYEADMQGFVTSRIAEASNVKILIPCVKYDACISFDGCRMFITKKTGNRIGYKPGMQLVLGYKYEKYIRNIENYLTKHKDREIIPRDNISAEENIELYDILTGKMLNTVLSVKFSGIGKKLEKRREKFVLCSPEEQCCVLNEILKILHANVLSGDLSLIGESPNTGTMKTNAKFSEIKDVHSIKLINQSVTGLFEQEIDLLK

SEQ ID NO: 4535 - protein, 1320 aa, unidentified
  REGION 1..1320: note = Description of Unknown: Cas Enzyme sequence
LSRGNIMENYYLGLDLGTDSIGWAVTDKNYNIPKFKGNSMWGIRLLEGGNTAVERREFRSSRRRLERNKYRLNCLEMLFNEEISKKDIAFFQRLKDSALYDGDKNVSGKYSLFNDPDYTDKDYYKKYPTIYHLRKELIESVEPHDVRLVFLALHHIIKNRGHFLFDNDDLGKNGNFDFTAIFTELNEYIKSNSNYESEGFSCNDLKPVEDIIKNSSLTSSKKKEALIKEFALNKKVDVFEVAIVTLLSGATAKAKDLFNTDKYDDTEGKSICFKSGYDDKATTYESVFGENFELIEKLKAIYDWAILADILNGKEYISYAKVDTYEKHKRDLKLLKEYVKAYVPEKYSHIFNENSDKVSNYLSYSGYSSKNPVMKKCDQETFCDFLRKQLPKELLDEKYAQMYKEIETSSFMPKAVTKDNSVIPMQLNRAELEAILSNAKNYLPFLADRDSSGKTVSEKIIDIFKYRIPYYVGPLNKHSEKSWLVRTGEKIYPWNFENVVDADNSAEKFINNLTSKCTYLPKEDVIPKNSLLYSAFTVLNEINNIKIDGEEISVELKQGIYKDLFEKSNKVKVFDLKKYLASNGYMNIEITGIDTTIKGSLKPFIDLQNIDLSYSDKEEIIKSVTIFGDDKKLLKNRLKRLYGDRLTADDIKKISKLKYTGWSRLSEKLLTGIEAVLPSTGEYTNIIHALWETNDNLMQLLSSNYDFRKKIDEENGDSTFTSLRKEIDNLYVSPKIKRPIYQAMQIVEEIVKIQGHDPKKIFIEVARDEGEKKRTVSRKQKLIELYKYCKKDEQKLYEQLCNTDENDFRRDALYLYYTQLGKCMYTGKPIELSEIYNNNIYDIDHIFPRSKIKDDSFNNRVLVLKAENAKKGNIYPINSSIRNNMLPFWKTLFDKGLISKEKFERLVRNQPLTDEELSSFVSRQLVETRQSTKAVAQLLKKRYHDTAVEYIKASLVSDFRQENDFVKSRDVNDFHHAKDAYLNIVVGNVYTVRSHLAHFIDNVQSGKWSVNKMFDYTTNGAWIVENNKSINIVKSNMAKNNIRFTRYAFKQTGGLFDQNPLKKGLGQVPRKKDMDIDKYGGYNKPSSAYFAFVEYKNSKGEIVRSFEPVDLYAEKEYIRNPQEFIKRKLGVDYVKIIIPCVKYNALISINGFRMHISSKSSGGANLICKPAVQLVVSQEQEKYIKKISSYLAKCAELRKEKEITSFDGITEKDNADLYEALKHKTNHTIYNVKFSKLANILIDKQCEFEGLSLYEQCYILMQIINILHANVMSGDLSAIGEAKKSGVTTISNKMQPSYKTVKLINQSISGLFEQEIDLLK

SEQ ID NO: 4536 - protein, 1332 aa, unidentified
  REGION 1..1332: note = Description of Unknown: Cas Enzyme sequence
MGKYYLGIDGGTDSIGWAVTDEEYKILKNHGKAMWGIRLMDGGETAQERRKFRSNRRRTDRDKFRQACLEMLFNEEISKIDIAFFQRLKDSALYDGDKKVEGKYSIFNDADYNDMSYHKDYPTIYHLRKELIESQERHDVRLVYLAISHIIKNRGHFLFDSDELGNNDNSDFQTIWQELAQYSEDNEYCDKESNRLLNCNNFSDIEEILKNRALTSTKKKDLLTKELSLNKKEDLFEIAVITLLSGGTVKAKDIFSSEEYEDTEAKSITFKSKYDEKASVYENTFLEKFELIEKIKAIYDWTILADILNGKDYVSYAKVDTYEKHKRDLKLLKNYVKDYVPQKYDLIFNENSKDVSNYLAYSGYSKKSSVVKKCSQEDFCEFLKKQLPEEPSDEKYQNMYNEIASHSFMPKAVTKDNAVIPMQLNRQELKKILANAEKYLPFLSEKDDTGKTVSTKIMDIFDFKIPYYVGPLNSHSDKAWVARTNEKIYPWNFEQVVDVDKSAENFIEKLTSKCTYLPCEDVIPKCSLLYSAYMVLNELNNLKIDGEPLSVPKKQEIYEKLFLKRNKVTVSGLKKYLLSAGDGKDIQITGINEDFKANLKSFQDLQFIDLPDSQKEEIIKAITIFGDDKKLLKKRLKNQYSSLSDDDIATIAKLKYTGWGRFSKEFLTNIKAMIPNGTGEDTSIIRALWETNDNLIQLLSDRYKFREKIEEENKNIESISLEQEVMDLYVSPKIKRPILQTMQIVEEIVKIQGEAPAKIFIEVARGDEEKKRTVTRKKRLLDLYEKCQKEEGELYEQLKNTSDKEFKRDALYLYYTQFGRCMYTNQPIDISEIYNKNLYDIDHIYPRSKIKDDSLDNRVLVTKESNQKKGNNYPIDETVRGNINIQSHWKLLRSKGLISEEKFNRLTRKDELTDEDISAFLARQIVETRQSTKAIYQLLQKYYPETKIECIKAGLVSDFRKGNMNDENVPDDKKYEFIKCRDVNDFHHAKDAYLNIVVGNVYTTKARQDYFIKNIQSGKWSLNKMFDYSTEGAWEVENNKSLNIVKSTMAKNNILFTRYAFMRKGSLFDQKPSKKGSGQVPIKKGMDISKYGGYDKPLATYFAFVEYMDNKGKNIRSFEPIDLYIEKEYLNNPKEFISKRLGVDDVRIIIPCVKYNTLISIDGFRMHISSKSSGGSKLVCKPAIQLVVSQKQESYIKKISNYLAKCTELKKEKEITPFDKLSAEENLDLFDTLVSKMCNTIFRVKFDKLGKKLTNKRDKFKSLSPYEQCDTLMQIMNILHANGLSGDLTALDQAKQSGITTINNELQSSYKSTKIIHQSITGLFEQEIDLLK

SEQ ID NO: 4537 - protein, 1355 aa, unidentified
  REGION 1..1355: note = Description of Unknown: Cas Enzyme sequence
MENKNYYLGLDIGTDSVGYAVTDENYNLLRFHGEHAWGVTLFDEAALCTDRRAHRTARRRLDRRKQRVDLLQELFAVEIGKVDPRFFIRLQESALYREDAGDAYSFFNDENYTDIDYHKQYPTIHHLIVDLMTSSKPHDVRLVYLACAWLVAHRGHFLSDVNKENISELTDFTKVYDNLLAYFAENELPAPWGDCDRAAFADVLKRKTGLSYKQKLLAGILYADGKLPKTAEDDPYAKDVLIKAICGSKVKCSDLFNNTEYEELDTNGFCLGADEETLAGVMANLSDADADLFARLKATYDWAVLVDALNGQDCISLSKVAVYDQHKKDLATLKYFIRKYANEKYAEVFRKSAETNYVAYSYHNKNKNITLPKKKANKEDFCKYVKGIIAAFKGKVEEKDAAAYADMVDRLDLLTFLPKQRDTDNRVIPYQLYWYELKKIMEKAGTYLPFLSASDADGIRTDEKIMDVFTFRVPYFVGPLNKHSNRGWIERQPGKIYPWNFEKMVDLDKCEEAFIKKLINYCTYIPGEKVLPKESLTYAKFMVLNEINNLKIDEQPISVELKQIIYYELFCKKRRVTRKALEEYLLSNNHMAKGQHVSGIDEQIKSSLKAYHDFKRLLANKVLTEEQVEAIIERITYVENPARVRAWLKKNYAFLSDADVTYIAKLKYKDFGRLSYAYLNGLEGCETDSATGEAATILSAMWNTNNNQMELMSDRFTYRQSVLDLQEQYYATHSKTLAERLDDMYLSNAVKRPVIRALEITKDVVKAFGGAPAKVFVEMTRGATEDQKNKRTKTRLQQLRELYEKCKQDARDLNAQLDAMGDNADNCLQSDALFLYYLQIGKCLYTGNTIDITALKSGRYNIEHIYPQSLVKDDSIINNEILVESNANGAKSDSYPVAVDIQNKQGALWSMLHHAGLMSDEKYKRLTRTTPFSADEKMGFINRQLTETSQSTKAVATLLKELYHTEIVYVKARLTSEFRQEYGLLKSRTVNDLHHAKDAYLNIVTGNVYSMRFTKQFFRIDEQYSLNTWALFGHSVICGGKTVWTPAMLDTVKKTAVMDTAHLTRYAYCKHGPLFDLMPLKAGQGQIEQKAGKSVEKYGGYNKAAISFCLIVGYKTDKAKDVMIMPVELLFADRVLASADFAATYAQDKIGRMLNKPVHDITFPCGMRMIRINTVFALDGFRGYYTGITATNWCFSSFMPLSLKGEWQNYIKHLESFAEKTKKNPGLTYQKTYDKISCEKNIELYDVLCDKLANSIYQKRPGNPVDTIGKGKSKFATLDVKVQVQQLLSLLQVFGPTSGGIDLTQIGGAAKAATTRIGLSITTLSHSFTHSIVIIDQSPSGLWESQSINLLDLIK

SEQ ID NO: 4538 - protein, 1255 aa, unidentified
  REGION 1..1255: note = Description of Unknown: Cas Enzyme sequence
MSKKYYLGLDIGTNSVGWAVTDEEYNLCKFRGKDMWGIRLFESANTAAERRLKRNSRRRLKRRAQRIKLLQEIFAGEISKTDNSFFIRLNESRLHIEDKSVKEKHPLFIDENYSDINYYAQYPTIYHLRKELIENEKPHDPRLVYLALHHIIKARGHFLIEGNLGESKDFNLVFDRLCYTLKEELDWIADAENNKEEIKNILTNNGKAKSEKAKEIKELIKVTDDTISKDEEKRQNVITEIVFKLIAGNKGDIEKLFNLEKKSLTKGSFSFAESSYDENIRPDMENEIPNLIHIIDLIKAVYDWRVLVEILQEEKYISNAKVKQYEKHKNNLKELKSIIYKNFGREVYKHFFVDKNEKSYSSYIGAANKNGRKINVNKNQNDDFFKEIKKKLEEIKEDGYGYEIARRFLEIEKMEDLLPLQRNKSNGVVPNQINKVELIKILDNAERYLPFLKEKDSDGISNKDKIISIFEFRIPYFVGPLSDRHREQGSNNWMVRQEGQNGRIYPWNIKNIVDYEKSNEAFIKRMTNKCTYLVGEDVLPKNSLLYSRYMVLNELNNLKVRGNKIPEKTKQDIFRDLFQNKIKVTGKAVLEYLRKEIPDLQKEDLSGFDNDFHTSLKSYMDFKKQIFGEEMEKAEVQNMVEDIIKWITIYGDDDKMIKNVIEKEYPNRLTEEQLKKVCRLRYSGWGNFSKKFLKGIEGTDRETGETFTLIEAMWQTNNNLMQLLSGKFTFTEEIEKENSKVTEKIERVSYEELVDSMYVSPATKRAIWQTVQISEEIKKIMGCPPEKIFVEMARGGGEKNKRTISRKKTLEELYKSCKEDVRYLADQLNDFDERALNSMKLYLYFTQMGRCMYTGESIDLDDLMQKNSKWDRDHIYPQSKIKDDSIDNLVLVNKTVNSRKSNEVLSNEIQNNMNGFWRVLLNKGFISKKKYDRLAKKGDFSDEELAGFISRQIVETRQSSKAVAELLKRINEDTEIVYVKASLASEFRKKPLNMLKSRRINDYHHGKDAYLNIVVGDVYNAKFTSNPVQWFKRNRDTQYSLNKIFNFDVKRGDRVVWKKCTEDENGIGYGGTIDTVRKTMKKDNLLYTEYTYCGKGELFNATIQRKGKKNVNINLKSGLDIDKYGGYQGAGTSYFAQVEFEGKKGERVKNIMGVPIYVANQLDHNPRAFEDYCRDIKGMRDVKILVPKIKKNTLMVVNGFPMRIRSENENQLMFKGAMQLILDEESVDTLRAIEKYILKSMEDKSYSIDTKIDKI

SEQ ID NO: 4539 - protein, 1397 aa, unidentified
  REGION 1..1397: note = Description of Unknown: Cas Enzyme sequence
MWNPKKGDYENSLFEPCSVISYGNQLRYFYYKQIDFFCQEWRGTKMNKKYYLGLDIGTNSVGWAVTDENYNLFKYAGKRMWGIRLFEAADTAAERRTKRSNRRRLSRKKQRIDLLQELFSKEIAKKDPTFFIRLNESGLHLEDKSTGEKYPLFVDKEYTDIDYHKEYPTMYHLRKELIENPEPHDIRLVYLVCHHILKNRGHFLINGSISDVKNLSFVCGEMIKEFNSVSEYEISLTDIRELERILSDKKTAKSVKAKQVAQLFECTPAEDKEQQKCAKAIITNLSKLIVGLKGDISKMFHQPLEEISTKSFKFTEAKYEDEIMPAIEENYPDYASVIDRIKGVYDWSVLVEILDGEDYLSFAKVKAYEKHGKNLHILKNVMKKYCKDEVYQAFFNGINEKNGYGNYIGAIRKNGHTYKMDRCKSEEDFYKGLQKILSTIVPDQEDEELLEKLKAEVENQTLLPLERSKENGTIPNQVHLQELMKILDNAKEYLDFLKKEDEYGTIAEKIISIAKFRIPYYVGPLSRRHKEEGSNSWMIRKEEGRIYPWNFGDKVDVEQSNKEFIERMTNKCTYLIGEDVLPKNSLLYSKYMVLNELNNLKIRGNKISVELKQRIYKDLFCTMAKVTGKRILEYLKMEDPEIVQEDISGFDIDFKSALTSYLDFKKQVVGNEIEKDHYKEIIEEIIKWKTIYDDDSKMMRRMIEREYPEVFDKEQIKKICQLKYSGWGNFSDRFLNGVRGADKETGESYTIIEALWKTNYNLMQLLSKQFSFKEEIDQINAEKAGDIGKINYENTVKDLIVSPSNKRAIWQTIQIAEEIKKVMKCEPERIFIEMARGGEKEKKRTVSRKTRLQELYAGCKDDTRNWMKEIGDREEREFNSRKLYLYYTQMGKCMYTGDEIDVDALMQGNSNWDIDHIYPQSRIKDDSLDNMVLVRKDVNNKKRNKILSPKIREDMKGYWTMLCQKGLISKRKYDRLTRTTDFTDEELSGFIERQLVETRQSSKAVAELLNRLYKDSEVIYVKAGLVSDFRHDNDLLKSRRVNDYHHAKDAFLNIVVGNVYHARFTSNPRKWIKDNRDSNYSIRRVFNYDVKQGDKIVWHGSENGGHSIDQIKKIMSRNDILYTEYTYCEKGQLFNETLAKKGNEKAVALKKNLDPVKYGGYTTPKTSAFAFVEFDGKKKERKNHIVEIPVYVVNIAKREPDAVIKYLEERKGYANVVVKKYPIKKNSLIKIDGYLARLRGANEKNVRLKNSIQLVLNGKAYETVRRIEKYLEYNVRYEVDSKFEGFTDEDLNNVYDELYLKLKESVYNKRPAQQLSTLEKGREKFRTIEKLSEKAKLINDMLVMFRCDATMVANLKLIGGSISAGNMEVNKNTLTSKSLKLVHQSITGLFETEEELV

SEQ ID NO: 4540 - protein, 1361 aa, unidentified
  REGION 1..1361: note = Description of Unknown: Cas Enzyme sequence
MNVNDYYVGLDIGTNSVGWAVTDTKYNILRKKGKSMWGVRLFEEGKTAAERRSARTNRRRLQRRNQRIELLQEIFREEIAKVDNKFFDRLKDSAFYPEDKKENQSNTIFNDSYYQDADYHKDFKTIYHLRRDLIMGEKEYDVRLVYLAIHHMMKNRGHFLFDSNITNITSFDTTFNTFRVCMNDEFGFDLDEVDKNKFEEILKNTSLSRTEKSKKLLDLCGIDGSKQFAEIIKLIIGLNCKISTIFDSAELEEIENNKISFASAKYDETRLTLEDEIQEKTGVLDICQAVYNWTILSEILDGGAYNGKSFISIAKVKKYEKHHEDLIRLKNLIKQYCGKKVYDEFFTSDKINNYCAYVGTYKKNKKVNKKCTQEDLYKTINGLLKKMPEDDENVIKIKSDMDNKTFLPKQVSKDNGVIPYQVNKVELECILENAQKYLPFLCEVDDSCNLTASEKIIKLFEFRIPYYVGPLNTAKGENCWMVRNDGYEGEKITPWNFNEVVDIDKSAEKFIRRMTNKCTYLHREDVLPKYSLLYSEYAVRNELNNIKLKGNPLPDKLRDGIYNDLFKKEKRVSKKRIAEYIKSFGYDVSKEDITGVDNILTTSLSSYIDMKKIFGNDIEVYSTKQMVEEIIRFLTIYGDDKKMLQRVIEKNYGNVITKEQLKQISSLKLQGWGRLSNRLLTELEGVNKDTGECTTVINELRNTSKNFMQIVASNDYTFSDCIEDENAGYKIQGDITYDNLVKDIVASPAIKRAVWQTIQIIEDIKKVMGKAPAKIFIEMARGGEEKKQKDSRKDKLIECYKAIDKECKTEWVNELTEITDSRLKSIKLFLYYTQMGMCMYTGTKIDLSQLDNATIWDRDHIYPQSKVKDDSLDNLVLVARSANAEKSDGMISTKIQTRMYDKWKYLKDKGLISEKKFNKLTRTEPFTDDELAGFINRQLVETRQSSKVVATLLKRIYEKTEIVYVKAGITADFKNHKNDKTGERDYVEDIKVRSINDYHHAKDAYLNIVVGNVYNTKFTNNPYKWIKKNCNNRNYSLNDIFKKDLLNDGNVVWKSGKEGTLKTVNSMLSKNDILYTRYSYCNKGLLFNQQLIKAPHDNEKAEIMVPAKAHMDVNKYGGYDSVKSSHFMLVESKDKSGKLIRTIEAVPIYLKEKFQKGNEKLEEYCATRYKLKNPRIVLPIIKKGSLLSINGFLMNLNGSTGKQLLLQGAVQLCVSNADAEYIKKLEKYESDSNMRTDKKTVLQIDEYRGITHSQNEHIYELFISKLKNKIYSKRPANPVEKLVNAKEKYINLSLEEQSLFLMQILNLFKCKYGVTNAKVIGEGESMGKIQISKNVTSCKEIKLINQSPTGLYENVIDLLTI

SEQ ID NO: 4541 - protein, 1365 aa, unidentified
  REGION 1..1365: note = Description of Unknown: Cas Enzyme sequence
MNINDYYVGLDIGTNSVGWAVTDTQYNILRKKGKSMWGVRLFEEAKTAAERRTARTNRRRLQRRKQRIDFLQDIFREEISKVDDKFFDRLKDGSFYPEDKKEKQNNTVFNDANYNDIDYHNEFKTIYHLRKALIMGEKKYDIRLVYLAIHHIMKNRGHFLFDSNITNVTSFDTTFNTFKTCMIDEFEFDLDEVDKDEFERILKDKSLSKTKKREQLLSICNIDKSDKKQIIEVIKLIIGLKCKISTIFDSPEFEDIEHNDICFAGSTYEETRLALEDEIQEKIGVIDICQKVYNWTVLSEILDGGEYNGQSFISIAKIKKYEKHGDDLRKLKLLVRKYCEKKDYDDFFSLNNDNNYCAYVGKWTKNITEGKKCGQEVLYKSINALLKKMPSDDEDVKKIKADMENKTFLPKQVSKDNGVIPYQINEIELKRILENAEKYLPFLNQVDDSCGLTNSEKIIKIFEFRIPYYVGPLNTAVGENCWMVKRDGQEGRRITPWNFNDIVDTDKSAEKFIVRMTNKCKFLQNEDVLPKYSLLYSEYTVRNELNNIKLKGNSLPDDLRNGIYNDLFKKERSISKKRIVEYIKSLGNEITKEDITGVDDKLTTSLKSYIEMKKIFGDEIDSYSIRDMIEKIIRYLTIYGDDKKMLQNVIETKYGNSITEEQLKQILSLKLQGWGHLSKKLLTELEGTNKETGEITTIINELRNTSNNFMQVVASNNYTFSESIELENAGYKLQGEITYEKLVKDIVASPAIKRAIWQTVQIVEEIKRVMGKTPAKIFIEMARGAEEKKRKASRKNKLIELYKEIDKEAKTDWVKELEKIPDSRLKSIKLFLYYTQMGKCMYTGKKIDLSQLENATIWDRDHIYPQSKVKDDSLDNLVLVDRRENAKKSDGMITPEIQAKMYNTWKYLKNKGLISEKKFNRLTRKEPFTDDELAGFINRQLVETRQSTKVIATLLKRIYDGTKIVYVKAGVTSDFKNHKDSRTGKRDYIEDVKVRSLNDYHHAKDAYLNIVVGNVYNAKFTDNPYNWIKEKNKDKDRKYSLNRMFDFDLSNGENVIWKSGKDGTLKTINAMLNKNDILYTRYSYCNKGLLFNQQLIKAPHNEEKARIMIPAKAGIDTNKYGGYDSVKPSYFMLVESEDKKGKLIRTIESVPIYLKEMFQEDNQKLVEYCISRYGLKKPRILLPVIKKGCLISVNGFPMNLNGSTGSQLILQGAVQLCVSNTEAEYIKRLEKYESDNQTRTDKKIELKIDEYRGITNSQNEEIYDLFIRKLKNGIYSRRPANPVKKLEESKTKFVDLSLEKQSLLLMQLLNLFKCKPLGANAEAIGEGNNMGKIKINKNITSFKEIKLINQSPTGLYENVIDLLKV

SEQ ID NO: 4542 - protein, 1334 aa, unidentified
  REGION 1..1334: note = Description of Unknown: Cas Enzyme sequence
MNQTKKAQDYFVGLDAGTDSLGWAVTDTQYNLLKCNGKAMWGVHLFESGKTAEERRLFRTARRRTERSRQRIELLRELFSEEICKVDENFFARLDESKFYQEDKRVAGKFCLFNDNGYTDKEYHRQFPTVYHLRSALIHNKEKTDIRLLYLAVEHIIKNRGHFLFEGQSLESATDFKPIFSDLLLTLEEAGFSLDCRDTAEAEALLKDKSVTVTDKKRALYAVLGAQAKPEKAVCDALAGGSVKLSVLFEDEALEDCEVPKFDFKSGIEEKEAQLEEILQEKMGILLKLKAVYDWSVLADVLKGEAYLSDAKIKNYEKHKSDLQVLRAAFRKYAPTEYNCMFRSDTESYNYCTYTGHPSKKGGVLKHGVCLQEDFCKYALKLLGDFPAETSEEQQLKADLQAGTALPKQVTKDNSVVPYQLHLRELKAILDNAKPHYAFLNMAEDGISVSEKIIKLMTFRIPYYVGPLNEHSSHGWLVRKEAGKIYPWNFDEKVDKIKSAEGFIQRMTNYCTYLVGEKVLPKESVLYSKFVIYNQLNTICIDGQKLPVDLKNALFADLFLHTDRPTTVKSARILKYLVSKGYCDKTAELTGLDGEVRGTMKAYIELHRILGEKADDLQMAEALIYQITVLGESKSLLRTFIERTFGERLTHAEIQKLLKLKYSGWARLSETFLTGLYHTDKSTGEAMSIMTALENTDENLMQLLSGKYGFTDAVNAFNADKNGERTAENIGTAVDELAVSPAVKRSVRRTLAVVKEITKIMGHAPKRIFVEMARGATEEQKNKRTVSRKQQLLACYDACKKGEPQLYAMLSGAKEDELRGDKLYLYYTQLGRCMYSGEPIDLADLFDKTKYDIDHIYPQSKTKDDSLKNRVLVKRELNEKKSNIYPLPSYLRTPQTVALWKHLFKLGLIREEKYHRLMRTLPLSQEELAGFIARQIVETQQSTKATAHLLSEFYPDTEIVYSKAKNVSEFRHEYAFPKCRCVNDYHHAKDAYLNIVVGNVYHLKFTRNPLDFLESGEEYSLNQVFNYSVQRRGEVAWLADGTYIATVRKTMEKNNILFTRYATEQKGAFFDQQPVKKGNGQMPLKTSDARLADFSKYGGYNKVKGAYFALVGHTEKGKRVKSFEPVPVYLAKEFEAHPEKLLPYFASQLQDAEILLPKVKINTLFSVDGFKMHLSGRTGKQLVFKNANQLVLPKAQYAYFHKIEKWVERNKKYKSVQPLPVAVNKETNAEIYESLYLKLRDTVYNRRLSAQVETFEKCREKFLSLSLEDQCIFLSNALKMFQCNPSSADLSLAGGVNRAGVLCLNNTASDKVDIKLIFQSVTGIFENELDLAKL

SEQ ID NO: 4543 - protein, 1359 aa, unidentified
  REGION 1..1359: note = Description of Unknown: Cas Enzyme sequence
MGYYLGLDVGSASVGWAVSDENYNLCKFKGKDMWGIRLFETAQTAAERRSKRANRRRLERRKQRIDLLQEIFADEMSKVDDTFFIRLNESRLYLEDKTEKFKYPLFKNKDYTDPDYYKEYPTIFHLRKELIEKNKEHDIRLVYLALHHIIKYRGHFLIQGDLDSAKDFYNTFNTMTQGLFEELEADITISDENKSEFQRILKEKHLSKSEKAKELSSLFDTSDNGEDKLSAKEKKGIVEQICKFIVGNKGDLTKLFLMDKENFENSSFTFAEKNYEETIRGNLDSELQEKAYLIDLIKSLYDWNILTDILHDEKFISFAKVRQYEKHSENLQELRKIILKYCDKNTYNDFFNSPKKEGNYSSFVGNLKKNGKKYNVGRCTGEEFYKALKGILSKIKPDEEDEEILNSLIKGCEAGDLLPLQRSKENGVVPYQVNEVEINAILDNAEKYLNFLNKKDSSGISNKDKIKSVFTFRIPYFVGPLSDRHKDKGANVWIVRKEGQTGRIYPWNFDTIVDLEKSNQKFIERMTNKCTYLIGEDVLPKNSLLYTKYMVLNELNNLKVRGNKVSEELKKAIYNDLFKQSAKVTGKKLLDYLRKDMPELSKEDLSGFDIDFKSSLNSYLDFKKKVFGDRIKDKKVQSMVEDIIRWITIYGDDKKMLKNVISKAYPDDISDEEIKNICKLNYSGWGNFSRKFLKDIEGTDKDTGECFNIIDALWETNNNLMQILSQRFTFREEIDEINNDKVGTIGKITYENTVEKLYASPAVKRAIWQSIQIAEEIKKVMGEEPEKIFLEMARGEEEKKKKVRTVSRKEWLKSLYKNCEKDIREKFLKEIEDIEERDFNSRKLFLYYTQMGRCMYTDESIDLDSLMHKNSKWDKDHIYPKSKIKDDSIDNLVLVNKKVNSKKDNDVLKIEIQNKMHPFWKSLLEKGFISKKKYDRLMKKGDFTEEELTGFISRQLVETRQSTKILADTFKLIYENSELVYVKANLVSDFRHDTIKMLKSRRLNDYHHAKDAYLNIVVGNVYNAKFTSNPIKWLRDNKNKDYSLNTVFDYDVIKGSKKVWDADKVKGSIQTVKKVMESDRILYTEISYCAKGLLFKEGIKRKGKNSSIAIKSNLDISKYGGYNTPTSSYFVLLEFDQKKGKKVNKNRNIIPVPLYVDNMLEHDPEAFMNYCKKVKGLENVKIIYPKIKYNALLIVDGFPMRIRGESGIDLVLKNNLQLRLDSKDAEIIRLIEKFLNKESDYEPDAKIDKIDHEKLNKIYDVLTDKLKTIYLKRPANQYKVLESGREEFIKSEDVCGKMKFINNVLNLLRCDATTIADLTFIGGSKNAGSMVKNKNTVCNNKIVLVNQSITGLFENRIEL

SEQ ID NO: 4544 - protein, 1358 aa, unidentified
  REGION 1..1358: note = Description of Unknown: Cas Enzyme sequence
MKKYYLGLDIGTNSVGWAVTDEKYNICKFNGKSMWGIRLFDGAETAAERRVKRSTRRRLQRQRERIDLLQELFADEIAKVDETFFLRLNESRLNVLDKSLKEKHPLFINNDYSEKEYYKQYPTIFHLRKELVENKEKHDIRLVYLAIHNILKNRGHFLIDGDIGNAKSFNFVFDQLINTIKDELGFEIIVENIDEFESILRNKEISKSEKAKKLSGLLNFEKDEIEEVKIKKIKAVIDNICKLIVGNKADITKIFEEDIIGLEKNSFSFSDSAYDEAIRPNLEDCMAERCFVIDRIKALYDWSILVHVLDGEEFLSFAKVKSYNCHCDDLKKLKRLINKYCTKEEYKKFFSDIDEKVSYTAYIGSTKINNKKVSVEKKCSEEDFYKKLKELLNKMEVFEEDEEVYRYVYNKVELKTILPLQRNKDNGTIPNQVHKIELEKILENASVYFDFLNKKDREGFTVSQKILSLFSFRIPYYVGPLSDRHKLQGSNAWAIRKQQGRIYPWNFDEMIDKEKSNEVFIKRMTNKCTYLVGEDVIAKNSLLYSRFMVLNEINNIKIRGKNIEVYLKKEIYNNLFRKNTKVTGKMLLNYLKQYDKDLKYEDLSGFDVNFKANIASYVDFERQIFGERMAEDSVRRMSEDIIRWKTIYGDDNKMLEDIIIKQYGDAIDEKQLKMIRKLRYSGWGRLSEKFLVGIEGVDKETGKSFNIINALWETNNNLMQLLSERFTFKEEIDKVNSEMVYDIKEINYNLIFKDINISPAVKRSVWQTIQITEEIKKVMGGAADKIFVEMARGHQKKAIKTKSRQTHLVELYSSCEKDVREWTEEIKKREEREFNSIKLYLYYKQMGKCMYSGEVIDLDSLMSTNSDWDRDHIYLQSKIKDDSLDNLVLVKKDYNAKKSNGMLSSEIQEQQKDWWKYLLQNNFISKKKYDRLMRREPFSIDELAGFISRQLVETQQSSKVVVDLLKRIYSETSIVTVKASMVSQFRKDDLNMLKSRMVNDYHHAKDAYLNIVVGNVYDAKFTSNYRSWVEENKDKGYSINKIFDYDVKRGSTYVWKGTKENGKEKSEKSGGTIDRIRKTMKKNDILYTEYSYCDKGKLFDETIAKKTKNVKIRLKKNLDTAKYGGYTSANTSYFALVEFDGKNGERVKNIIEVPIYIANMLSHNPDAYLEYCTNIKGLKNVNVLRSCIKKNSLISVDGFLMRIRGANEKNLLFKCGMQPVLSNHEHTIRHIEKYLDKNKDFDVSEKFDKITDQDLINLYDDIIYKLRTVYKERPSNRSDVLEEKRNVFLTLSLEKKVRLVAQIINMIRCDNNTTANLESIGGSKYAGNMAKNKNELSKKELKLINQSVTGLFEDHIKL

SEQ ID NO: 4545 - protein, 1352 aa, unidentified
  REGION 1..1352: note = Description of Unknown: Cas Enzyme sequence
MEKYYLGLDIGTNSVGWAVTDPSYRLERFHKKDMWGIRLFEQADTAADRRVKRTNRRRLQRRHQRIQLLQELFAEEMARVDDTFFLRLNESKLHLEDKSVQEKYPLFIEKGYTDIDFYQEYPTIYHLRKDLMESDQPHDIRLVYLAIHHLLKYRGHFLIDGSLNSAKSFSTVFEQMMRSVQDGLKIDFTVSHPERVEEILRNRTMARSSKSKLLEKEFVIDPGEDDPKILKTVVKQICTFIAGNKGDLKKVFREDLDELEKTGFKFSDPGFDEEILPDLENKIPDLLNVVQAMKAVYDWSVLVDILDGEEYLSFAKVKQFDEHKHNLHQLRQVMKKYCEKKTWVDFFDDPTGKSNYAAYIGHVKKNGKKYSVKRCSEEDFYKNLKGILGNISPNEEDTILINELKEKADAQILLPLQRSKDNGVVPHQVHQIELQMILERAETYLPFLKQRDDRGISVLEKILKIFEFRIPYYVGPLSDRHVENGANAWIVRKEAGRIYPWNYEEKIDLEKSNEAFIRRMTNKCTYLLGEDVLPKNSLLYQKFMVLNELNNLKIRGKGISVALKQQIYEDLFCSHTKVTGKKLLTYLRAHEDSELSSEDLSGFDQNFKASLSAQLDFEKQIFKENFKKDSVKKIAEDIIRWKTIYGDDNRMVQNMVRQQYTEVFSEEQLKKLNRLHYSGWGNFCAKFLTGIEGIHKDTGQQFTILQALWETNCNLMQLLSKQYTFQNAIEECNALNAGEIKSVDYDSLVRDLYTSPANKRAIWQTIQITEEIKKVMKGVPDKIFIEMARGEEKEKKRTQSRKDRLMELYAACESDVREWTKDLDRWNDRDFNSMKLYLYYTQMGRCMYTGEPIDLDALMSGNSKWDRDHIYPQSKIKDDSIDNLVLVNKTENAKKSNGLLSLEVQKKQREFWKELLEGGFISKKKYDRLTRNSDFSEEELAGFISRQLVETRQSSKAVAELLKRIYPDSQIVYVKASLASQFRKNNLHMLKSRRVNDYHHAKDAYLNIVVGDVYDAKFTSNPIAWMKKNYKSNYSINRVFDYDVYRGTELVWKAIDKDAKKQGSIEIVRKTMLQNNILYTEYTYCGKGQLFNETIAKKGAGASIALKKGLDPEKYGGYTSPNTAYFAFVEFDGKKGQRVKQILEIPVYVANRIPQDKNILIEYFENVKGLKNVKILREKIKKNALISVDGFPMRIRGATEKQLSLKGNVQLVVNDKTEELIRKIEKYIERKSDFEPDVRYDGFTSEEMNNIYELLKDKLTDTVYKKRPANQSEFLTKHKENFQSLSLQSKAKTINEIITMLRCDIANTANLTAINGSANAGNIAMSKSTIGKSKLILINQSVTGLFENRIEL

SEQ ID NO: 4546 - protein, 1354 aa, unidentified
  REGION 1..1354: note = Description of Unknown: Cas Enzyme sequence
MEKYYLGLDIGTNSVGWAVTDPSYRLERFHKKDMWGIRLFEQADTAADRRTKRTNRRRLQRRHQRIQLLQELFAEEMAKVDDTFFLRLNESKLHLEDKSVQEKYPLFIEKGYTDIDFYQEYPTIYHLRKDLMESDQPHDIRLVYLAIHHLLKYRGHFLIDGSLNSAKSFSTVFEQMMRSVQDGLKIDFTVSHPERVEEILRNRTMARSSKSKLLEKEFIVDPGEDDPKILKTVVKQICTFIAGNKGDLKKVFREDLDELEKTGFKFSDPGFDEEILPDLENKIPDLLNVVQAMKAVYDWSVLVDILDGEEYLSFAKVKQFDEHKHNLHQLRQVMKKYCEKKTWVDFFDDPTGKSNYAAYIGHVKKNGKKYSVKRCSEEDFYKNLKGILGNISPNEEDTILINELKEKADAQILLPLQRSKDNGVVPHQVHQIELQMILERAETYLPFLKQRDDRGISVLEKILKIFEFRIPYYVGPLSDRHVENGANAWIVRKEAGRIYPWNYEEKIDLEKSNEAFIRRMTNKCTYLLGEDVLPKNSLLYQKFMVLNELNNLKIRGKGISVALKQQIYEDLFCSHTKVTGKKLLTYLRAHEDSELSSEDLSGFDQNFKASLSAQLDFEKQIFKEDFKKDSVKKIAEDIIRWKTIYGDDNRMVQNMVRQQYPEVFSEEQLKKLNRLHYSGWGNFCAKFLTGIEGVHKDTGQQFTILQALWETNCNLMQLLSKQYTFQNAIEECNALNAGEIKSVDYDSLVRDLYTSPANKRAIWQTIQITEEIKKVMKSAPDKIFIEMARGEEKEKKRTQSRKDRLMELYAACESDVREWTKELDRWNERDFNSMKLYLYYTQMGRCMYTGEPIDLDALMSGNSKWDRDHIYPQSKIKDDSIDNLVLVNKTENAKKSNGLLSLEVQKKQREFWKELLEGGFISKKKYDRLTRTGDFSEEELAGFISRQLVETRQSSKAVAELLKRIYPDSQIVYVKAALASQFRKNNLHMLKSRRVNDYHHAKDAYLNIVVGDVYDAKFTSNPIAWMKKNYKSNYSINRVFDYDVYRGKDLVWKAFDKDTKDQGSMETVRKTMLQNNILYTEYTYCEKGKLFDETIAKKNSGPSIPLKKGLDPQKYGGYKSAQTAYFALVEFDGKKGQRVKQILEIPIYIANRIPQDKNILMEYFEDIKGLKNVKILREKIKKNALISVNGFPMRAVGISGKNDILLKSNVQLVVDVNAQETIRKIEKYVEKNKDLDVSEKYDGFTSRDCSLLYQVILDKLTNTVYCKRPAINNIIKILDDQNDFAKLDLKNQAELLYELLTLLRCDSETKVNLQVIGGKSNVGTITVNKNTLGKSKLILINQSVTGLFENRIEL

SEQ ID NO: 4547 - protein, 1352 aa, unidentified
  REGION 1..1352: note = Description of Unknown: Cas Enzyme sequence
MEKYYLGLDIGTNSVGWAVTDPSYRLERFHKKDMWGIRLFEQADTAADRRAKRTNRRRLQRRHQRIQLLQELFAEEMAKVDDTFFLRLNESKLHLEDKSVQEKYPLFIEKGYTDIDFYQEYPTIYHLRKDLMESDQPHDTRLVYLAIHHLLKYRGHFLIDGSLNSAKSFSTVFEQMMRSVQDGLKIDFTVSHPERVEEILRNRTMARSSKSKLLEKEFVVDPGEDDPKILKTVVKQICAFIAGNKGDLKKVFREDLDELEKTEFKFSDPGFDEEILPDLENKIPDLLNVIQAMKAVYDWSVLVDILDGEEYLSFAKVKQFDEHKHNLHQLRQVMKKYCEKKTWVDFFDDPTGKNNYAAYIGHVKKNGKKYSVKRCSEEDFYKNLKGILGNPSPNEEDAILINELKEKADAQILLPLQRSKDNGVVPHQVHQIELQVILEHAETYLPFLKQRDDRGISVSEKILKIFEFRIPYYVGPLSDRHMENGANAWIVRKEAGRIYPWNYEEKIDLEKSNEAFIRRMTNKCTYLLGEDVLPKNSLLYQKFMVLNELNNLKIRGKGISVALKQQIYEDLFCSHTKVTGKKLLTYLRAHEDSELSSEDLSGFDQNFKASLSAQLDFEKQIFKEDFKKDSVKKIAEDIIRWKTIYGDDNRMVQNMVRQQYPEVFSEEQLKKLNRLHYSGWGNFCAKFLTGIEGVHEDTGQQFTILQALWETNCNLMQLLSKQYTFQNAIEECNALNAGEIKSVDYDSLVRDLYTSPANKRAIWQTIQITEEIKKVMKGAPDKIFIEMARGEEKEKKRTQSRKDRLMELYAACESDVREWTKELDRWNERDFNSMKLYLYYTQMGRCMYTGEPIDLDALMSGNSKWDRDHIYPQSKIKDDSIDNLVLVNKTENAKKSNGLLSLEVQKKQREFWKELLEGGFISKKKYDRLTRNSDFSEEELAGFISRQLVETRQSSKAVAELLKRIYPDSQIVYVKASLASQFRKNNLHMLKSRRVNDYHHAKDAYLNIVVGDVYDAKFTSNPIAWMKKNYKSNYSINRVFDYDVYRGTELVWKAIDKDAKKQGSIEIVRKTMLQNNILYTEYTYCGKGQLFNETIAKKGAGASIALKKGLDPEKYGGYTSPNTAYFAFVEFDGKKGQRVKQILEIPVYVANRIPEDKNILIEYFENVKGLKNVKILREKIKKNALISVDGFPMRIRGANDITLQFKGNIQLLLEYEEEEIIRKIEKFLEKDFNSEAIENFDGFTDKECIHIYELLADKLILTIYRKRPANQGIKLKENQEVFKRLSLAYKAKLINEIITMLRCDIATTSDLKLINGSKNAGNMAISKNTIGKSKLILINQSVTGLFENRIEL

SEQ ID NO: 4548 - protein, 1361 aa, unidentified
  REGION 1..1361: note = Description of Unknown: Cas Enzyme sequence
MERKNCYYLGLDIGTDSVGYAVTDENYALKKFKGEPMWGATLFEAANAAAERRAYRTARRRLDRKQQRISLLNDLFAEEIGKIDPHFFIRRKESALYGDDPKYGVRLFDGAGMTDREYHKKYPTIHHLILELMNSSEPHDIRLVYMACAWLVANRGHFLFDVPADRVAEVLDFNEVYRNFCEYLTEQGCRLPWSEETKAETILEILQMETGVKKKTEEFKARVFGGKKPGKEVTEEIPFSADAVVNLLAGGKVKPADLFGNEAYAEVDSVSLTMNDEDFARIAAELEEDGELLCRLQAMKNCAQLRTAMKDASCISEGKVAVYERHKADLKTLKYFVKKYCPQKYNEFFRDAVKDNYVFYTRNVKSLTAEKQREVKAIAGKDAFSDFAAKRMKAITVEEKDKSRYDDMMERLEARTFLPKQRDGDNRVIPQQLYRQELAEILTHAKRYCAFLDRADEDGITIEQKILSIFEFKIPYFVGPLRKADEKKNAWIVRKAEGKILPWNFDRMVDLDASERGFIERMTNSCTYLPGEEVLPANSLLYSRFMVLNELNNLKVNDRRISVEAKQGIFRDLFENSLRVTPKKIKDYLIRCGYMEKTDTMSGLDETVKSGLKPYHIFKRLLDGGVLTETDVEEIIKHAAYSEDKPRMRRWLTECCPQLNEEDIAHILRQNLKEFGRLSRKLLTGVYGTEKDSDGEAFTIMEMLWNTNENLMQLLSDRYTFAEQIKQISEEYYAASPQSLNDWLSAMYVSNAVKRPIFRTADIVQEVVKAMGEPPAKIFVEMARGGTPEQKGKRTKTRKNQLLELYKQIKSEDTRHLTEKLEEMGVMADNRLQSDRLFLYYLQLGKCAYTGQPIDLGHLTDGTYNLDHIYPQCYVKDDSIMNNLVLVKSELNGRKSDSYPLPEEIRNAMRPYWQHLKETGLMTEEKYRRLTRQTPFTDDEKQGFINRQLVETRQSTKAVTALLQEWYPTAEVVYVKAGMVSEFRQEFDLLKCRTVNDLHHAKDAYLNIVVGNVYHERFTKKWFSLDSTYNVQVKKIFRKQQKHGETCYWNGEQDIARVKKTMAKNAVHLTRYAFCRRGGLFDRQPVKKGENLIPLKNGLPTEKYGGYNKPTASFFVLARYEAKGKRELMIVPVNLIDANRFMKDAEFAATYTAEMIEHITGKVPENPELLLNGRPLKINTVFSLDGTTVTLSGKSSGGSRVLLSTLGALMLGKESENYVKAMESFLKKRTTNPALLPDKNHDKLSKEGNLALYDQLIEKLGKNPYCNLPGNQRDTLVKGREKFIQAEVIEQLNCLYGLMNLLNAKCNTCDLSLVGGAPKAGTIILSSSLSNWKKKYHDVRIIDRSAAGLFENSSENLLELL

SEQ ID NO: 4549 - protein, 1344 aa, unidentified
  REGION 1..1344: note = Description of Unknown: Cas Enzyme sequence
MGAKNSETNGSKNVGNFFVGLDIGTNSVGWAVTNDQYEVLRSKNHRMWGSRLFEEGNTAAERRGHRGSRRRLNRRNDRLMILEDLFAEEISKVDKAFYQRLHESQYRQEHKNTSGQFFLFNDKCFTDKDYHIDYPTVYHLRAALMKDPAKDIRLLFLALHHIIKYRGNFLHEGESLKTTGGVTEVLQQVLACNEFSGVREHIDNNMLVTLLSEKGVTRSDIAKKISELVTEQQYKKQAKAFASLVLGLKANLDELFNEPEYKELDAEIRSVEFSGTEYWEERDKYEPYLGESLFALDGCKTLYDSLLLSNIKPDGKYLSAAKVETFEAHHDQLEMLKDVLKKKKSLYNLVLRDDVKDLKNYITYIGKSKINKRCSREDFYKFLKQTIKDVPDSEDKSEIIKLMDLDLFLPLLRVRENGVIPYQIHKEELEKILAVSGKKYSFLNQRDALGFTVKEKVLKLLTFRIPYYVGPLNPAHKENGFAWVVRKAQGKVYPWNFEDKVDISASATAFIENLTNKCTYLIGEDVLPKYSLAYSKFSLLNELNNLRYDGKPLSYETKQDFIKDCFEKEHRKMTEKRIKEFLKHLGGTDGKGALTGLDVDIKSDLKSYRDMVRILGDGFDETVAERIIRYVTLFGEAKKVLLSTLETEFGDDLSDTQKKQILKLQYRDWGRLSATFLKGIKGIAGDNPECSILECMEQQPLNLMEVLSSHNTYLAAIEEFNKERTEPTDVVDYKLVDDLYISPAVKRSVWQTLRILDEITKLRDSVPKKVFVEVARTNKAEKKKTTSRKDRLLQLYNSIKDDGRNWSQEIKAQDAGKFNSKKLFLYYTQQGRCMYSGQSIELNDLFSTKYDIDHIYPRSVTKDNSWDNLVLVKAELNREKKDIYPIEIDTQDKQRAFWKQLLDQGFISERKYERLVRTTPLTADELADFVNRQLVETNQSVKAVTNLLKRLYPDTTICYVKAENVSEFRQDRKFVKLRSLNEHHHAKDAYLNIVVGNVYHEKFTNNPRNFIKNARSDKKRPYSLNHMFEKLLQVGSKAIWNPDTDNRTVERMMHNNDVQVTRMLVEQKGALYDATVCKATVAKPESYAPLKSSDSALSDVKKYGGFTKIKNAYYSIFRFYKKNSKEFETHIVPIPVMRVAGLNSEADYVEYAETIMNKGKFDRASLVYKKLCINVLVRVNGQLYYLGGRTDNNICIDSALSLVLDFETVKKIKNIDKYITRVADNGNYEPNSESVNSNLNMEVYKALIEKMKQPIFSSLKTNRSADLEKEETITAFKKLSLLDQCKMLLEALNLLTHKKTTYGLRPIGVVASRSKMSMNITGLSEFTIITQSVTGLQEKEIRII

SEQ ID NO: 4550 - protein, 1361 aa, unidentified
  REGION 1..1361: note = Description of Unknown: Cas Enzyme sequence
MKNNKNYFLGLDIGTDSVGYAVTSETYEMMKFRGEPMWGVTTFEAASLAENRRTNRTARRRLDRRQQRVQLLADIFAPEICKVDPNFFIRRKESALFTDDSQYGVKLFDGGLNDKDYHKRFPTIHHLIVDLMNSTERRDIRLIYLACAWLIANRGHFLFNADVSNIKNFNTPYEEFARYLRQDCECSLPWNESIPAEVILNIMQADVSITKKKTMFIEQVYGGKKPSNKSEDSFPYRRDIIVTLLSGREASPKDLFDDAAYDGIDSVSLGMDEDNFERIISEIGDDGALLRVMRGMYDCALLNKNCDSDCISAAKVSVYDQHAKDLKWLKDFIRKYSPAEYYKVFRRAEAGNYVAYSFNIKNCENGKSLKKANKDVFSDYLKKIVTAKSIADTVDDTDREQYEDMLHRLDLRTFLPKQKDTDNRVIPQQLYRYELSEILSHASSYLPMLNVSDADGITNKDKILSIFDFKIPYYVGPLNQQSPNAWLERKEGKIYPWNFEKMVDLDESEQRFIKKMTNICTYLPGEDVLPYCSLLYSRFTVLNELNNLKINQHSIPVTVKQEIYTKLFKESSKKVTTATIRRYLESCGYMIPSDELSGVDTTLNASLKSYHSFKRLLDSGTLTEEQAEDIINHAAYSEDKIRMAKWLENHYPKLSADDRKYILRLNLKEFGRLSKKLLTEIFGCVTDGDGEAMTVMDALWQTNDNLMQLLSERYTFRDQIAAFSQDYYSVPENKKTLSERLSDMYISNAVKRPIIRTLDIVSDVVKATGNAPTKIFVEMARGGIQEQKGKRTISREQQILDLYKQIRNEDVPRLKQELESMGDMANNRLQSDRLFLYYMQLGRCMYTGKPIDINQLSSKTYDIDHIYPQSKVQDDSILNNKVLVLSSVNGDKSDVYPIDASIRSSMNGFWSLLRENRLITDEKYRRLTRSSGFTDDELHQFINRQLVETRQSTKVVAQLLKERYPNTDVVYVKAGMVSEFRQEFDMLKCRSVNDLHHAKDAYLNVVVGNVYHEKFTRRWFDTSQKYNISVKKIFENVQRPYGNEVWRGSEDLAKVRAIMRKNYAHVTQYALCRHSGQNGGLFNQNPLKAHENLIPLKEGKDTAKYGGYNGSTSTFFLLAGFQSGRKKEIMFFPVDLMYSRKVLENDNEAVSYIQRTLAANKKKVTGIYFPIGKRILKINTLLSLDGFLVCLSSGSIKDGRAGFLPITQFVCKYETERYIKRLERVCEKCKTYSNYKIVKEFDGVSAEENLQLFDLFNDKIRFSVYSKRPGIPTKGFVEQRDIFAALPLEQQCSCLMKMLMLFYRKPDAVDLSDIELSPNSCKPRKSLYLSGWKSDYQDVRIVDVSSSGLFSSRSENLLDLL

SEQ ID NO: 4551 - protein, 1390 aa, unidentified
  REGION 1..1390: note = Description of Unknown: Cas Enzyme sequence
MFAENFSEKSKNGYYLGVDIGTDSVGYAVTDRDYSLCRFKGEPMTGVALFDKADQCADRRAHRTSRRRYARRQMRVNLIQDLFCVEMAKVDPNFFIQMSESRLWQCDKKPETLVGCEWLDREYNRRFPTVHHLIMELINEENSNTDVRHLYLAVAWLVAHRGHFLSDISCDKIRELYDIKPLYSAFIGWFGENGYSAPWECDADALMAAMSRRCGVRAKEAELKKLIYGGKKPVEDESCPLYQEAIIKLLAGGSIEIKKTLKWEEYKGVEGSICLDDAEKLEAVLAELGDDGEVIRLMSQVYDCAALSKMLSGHTYISEAKIEQYETHKADLRELKRLAKKYCSDDEYKNFFVSEKGTYSAYSAYFKCSEKRKGKKITREDFYKGVKKLIAKIKERIGEGDDADLVIANGVLGRIDAGTYMPKQVNPENRLIPYQLYYAELDVILSNAEKRFAFLSERDSDGLSVSDKIRSVFTFRIPYFVGPLEKSPGNKFAWIERKAEGRILPWNFDEKVDLDASEDGFIKRMTNKCTYLPGENVLPKQSLLYCKFTILDEINNINIDGVPISVDLKQQIFHELFEKEKKVTKKKLIDFLVSVKAISKGEAVRISGLGAEIKSSYKPYIDFRRLLAAGTLTAEDVDCIIERITCTEDTARLKKWLLKWSKENGKDLSDDDIKYISHRKYDDFGRLSGKLLNGIEAACTETGEVGTVMHFMWNTNDNLMQIIRGQKYRFEDRISEISKEYFSEHPTTLVERLDELGISNAVKRPVMRTLDIIADIVKAKKCPPEKIFVEMTRGEDKRIDSDKLNRGKRLRELYSKLDLEDAVRPRKELDDLGDEADRKLQREALFLYFCQMAKCAYCGKPLDISAIGTNEYNVDHIWPRAYIKDDSILNNKVLVHSEENGRKTDTYPIESKIRSEMRGFWENLRNAKLINEEKFRRLTREHAFSTDERLGFINRQIVETGQSAKVVTNLLTDLYPKAEIVFVKAGNVSEFRHEYGEICNYALFGRTLTDAEKKSKCLVKSRTASDIHHAHDAYLNIVVGNLFHEKFTKRYYLDTLNDYSPKMHILFGRKCVIDGNVIWNPEKHLPTVDRTMANVHIHLTKYQTKQKGLFFDQQPKSAGSSDSLVPLKKGLDTAKYGGYNKPTISFYVLVRYRIRKKYELTIVPVELLVANKYLSEQGYPAKHVREKLPVNAEDISFPLENRIIKVNTVFSLDGFEACVSGTSDGGSRILMRSLMTPRYTAEQIAYIKNLDNISEKRKKNPQYVIDETFSGISREKNVALFADLVNMMNGSVYSKQPGAKLGISADDQKKFEGLTIDMQYECLKNMILYLKTNRSGACNMNAMGGDQTSGTMRLSTNISNWKKNYSDVRIIDRSSSGLFEHRTGNLLNLI

SEQ ID NO: 4552 - protein, 1381 aa, unidentified
  REGION 1..1381: note = Description of Unknown: Cas Enzyme sequence
VANEKNFLGLDIGSNSVGWAVTDENYKIKKYKGNLMWGVHLFDEAQQSADRRMFRTARRRLDRRQQRIVLLQELFAADILKKDENFFLRLKESALLPEDSENRKHNIFFDDENYGDKEYFNEYPTIHHLIVELMNCDSPHDIRLVYYACAYILAHRGHFLFNVEKDDIEKITEFKPLYKKFYSDLTELCETPAFDENAEIMEEVLKKHISVTAKDKELKQILFGGKVPKDIDTIKYELLTKLICGGTVKMSELFRKEEYSELEKNSICVKSADFSDTLESLERQLDELHFALIASVKAMYDWSLLVDILHGETMISKSKVEVYDQHKADLKELKYFIKTYLDKTDYNAIFRDVSDKANYVSYVYNAPSENDRNKYKKCLQEDFCKFLKPYLEKITPTDDDKERFEELKKKREDNELCPKQVTTDNRVIPYQLYYAELKKILENACKYLPFLNEKDEYGTVAEKILKIMEFRIPYYAGPLVGREKSDNAWLKRKADGRIYPWNFSELVDEDESENEFIRRMTCKCTYLAGEDVIPKYSLLYSKFMVLNEINNIKVNGELISVEAKQKLYQEKFVESKARVTKKRIREFLVSIGEYSGDVEVTGVDDTIKSSLRSYHDFKHLIDCGLLKEFDVEKIIERITVTTDTKRLKNWLKQEYPQLSASDVKYISKLKYKDYGRLSRRFLEEIIPIDADTGEVLGDNNIITALWETNSNLMQLLSMGKGYSKAIEKFNNNYFDQHPDEKSISKRLKNMYVPTAVRRSITRTLDIAKELKTILKKAPDKIFIEMARGEGDTPKGSRTKSRRDQITEYLDNSDAENIGELRERLEKTDDGRLRSEKIFLYFMQLGKCAYTEKNISFDELDDNTKWNIDHIWPQAKIKDDSIDNKVLVDSNANGAKGDKYPISSDIRSKMSGFWHALYKKNMMSEKKYQRLMRSTSFTEEELSGFIARQLVETRQSTKAVATILKEIFPESEIVYVKAGIVSEFRQEMDMMKCREINDLHHAKDAYLNIVMGNVYDTKFTKDPLNFIKSGERYSMKLFKKDQSGKKSGLLTGVVKRGDNIAWDPETSFDIVKHMMSKNSIRYVRYTYRRKGGLFNQMPERKKAGLVPRKKGLDTEKYGGYNNTTVSSFAVIKCKTDVIIIPVELKCYNQFFSDIDFAKKYSYEKLKYILPDKKYKGITKDDIVLPTIDYQNNAGIRTAELKINSIVEVNCYPISLCSKDSKGKYIIVASPVSLIVDKNSENYIKKIIGFFEKEPNRKITSYNNISKEHNLDIYDIIMHKCGEKPFNIWSKFADMADVLQKKRNIFFELSVEEQVKALKEIISILKSGRSVFCNLSYLNESKQSCISKLGAVLTGNKKIKSVVIVDQSPTGLFEKKSVNLLEL

SEQ ID NO: 4553 - protein, 438 aa, unidentified
  REGION 1..438: note = Description of Unknown: Cas Enzyme sequence
MEKEYFLGLDIGTNSLGYAVTDTDYSIKKFNGKSMWGVQVFEEGKQAAERRGFRSARRRLDRRQQRITLLKELMASEISKADVDFLKRISESALYSNDKETKSAFSFFTDNSYTDIEYNKDFPTIHHLIIALMEWNKKYDIRLVYLACSYILSHRGHFLNTADKNNIENVLDFEVVYNDLLNWFINLEVDVPWSCNTIKFSEILKKKLPVSKKEKEFFDLLFDGKKPVAKENYIISKADLIKLLCGGKTTLSKLFRNDEYKELETDSICLNDSEFEDKIENISVSLRDGDIELLREIKKVFDWSLLSDLLGERKENEALSISNSKVKIYEKHKEDLALLKIIIKKYLPNKYIEVFKTADSSKKNNKRIVPNYVAYSGNIKSLAVGTAFDLEKCNIDEFSDYILNIVKDISLDEKDKQIFDNMVTRLKERKKKRSCQNK

SEQ ID NO: 4554 - protein, 940 aa, unidentified
  REGION 1..940: note = Description of Unknown: Cas Enzyme sequence
VTNGNRVIPFQLYWVELKTILEKASIDYPFLLEKDEYGTVKDKILSIMEFRIPYYVGVLNKNQYNKAWIERKAEGKIYPWNFDEIVDHEKSEDAFINGMVGNCTYLVGEKVLPKNSLLYSKFMVLNEINKIKIDRVPITIQDKQQIFNDLFIVKKYNVSHKSIRDWFKSNKGIGVTEVSGVDKTVKSSLNSYHQFKSLIISGSLTENDVEDIINRITITTDKKRFTEWLRDKYKNLSNEDVLYIVKKNFSDYGRLSYKFLDELTTPNVNMTIIQMLWETNYNLMELLSDEFDFKEQVAIYTKNYYTENGHTIEDVLKKMYISNAVKRPIYRTLDIVKEIKHIQKKDPKKIFVEMARGEEAKKRTVSRKDKLLELYKALNKSEYGDLINNLNKEPSDRLNSKKIYLYYRQLGKCMYTNQQIRFDELADNELYNIDHIYPQTRVKDDSFDNMVLVTSKSNGEKGKDYPVKKEVQNVMNSYWGMLADKGLISKEKLYRLSRNTHFADDELSGFINRQLVETRQSTKAVAVLLKQLFPKSEIVYVKAGLISEFRQVFDLVKCRDVNDLHHAKDAYLNIVMGNIYHTRFTSNPIDFINENDKNKEYTLKLSAKDGQGLLSRDVVRNGEVAWRGDGSSIKKVISTMNKNNINYVRYALCRKSGQSGGLFNQNINKAPHKDNDLIPIKNGLDTNIYGGYNNTTASFFTLVKHTIKGKSAISILPVDLLVAEKFKNDDEFAIQYCEEKLKLQNAEFVKKRKLIKINTLIEIDGFRANIASKSSSGKTIVLSSSVPLILNRNYEKYIQKLSAVVSKAKENKTELIIKSYQGITTEKNIQLYDTLINKGAISLFKNVSIIKKMQKAMIDNRDEFEKITLEKQVFTLLQLISLFKTGRTTGCNLKDIGESGQAGTITINSTVTGRNYKSFRIIDQSPTGLFENKSDNLLEL

SEQ ID NO: 4555 - protein, 1393 aa, unidentified
  REGION 1..1393: note = Description of Unknown: Cas Enzyme sequence
VANEKNYLGLDIGSNSVGWAITDEEYKLKKFKGNLMWGVHLFDEAQQSADRRAFRTARRRLDRRQQRIKLLQDFFAVEILKKDEKFFLRLKESALLPEDSENRKNNIFFDDDSYGDKEYFQEYPTIHHLIVELINNKEPHDVRLVYYACAYLLAHRGHFLFNVGKGNIEEITNFKPIYDNFYSALQDIDENPLFDKEAKAKDIEDILKQHIAITSKERELKQRLFGGRIPKTKESDDKDDGAITLAYDKLIKLISGGTVKLSELFYKEDYKELEKNSVCVKNADFDDTLEILTGQIDELHLSLLTRVKAMYDWSLLVDILHDHTMISESKVEIYDKHKKDLEELKYFVRTYLSKADYNEIFRVAGDKANYASYVYNRQNVIDKKVDSNFSHNDASHDRKSQEAFCKFLKPYLVKIESEVKDEDKERLAELKKKCEDNELCPKQVTTDNRVIPYQLYYAELIKILENACKYLDFLNEKDEYGTVADKILSIMGFRIPYYAGPLMTKKDKNKRSNHSWLVRKADGKIYPWNLENMVDEEASENEFIRRMTCKCTYIAGADVLPKYSLLYSKFMVLNEINNIKVNGNPISVDVKQRLYKDKFVDCKAKVTKKRIADYFKSNGIYIGDIEISGIDDNIKSSLKSYHDFRHLMESNQLTENEVEDIIVHITVTTDTNRLKKWLKDKYGKLTSDDIKYISKLKYNDYGRLSRRFLEEVLPIDTKTGEAESDRNIITALWETNENIMQLLSSKYRYSEAIEKINRGYYDQHADENTISKRMEKMYLSPAVRRSVTRTLDIVKELKTILKKAPDKIFIEMARGEGEIPKGKRTESRRDQITKFLDESEADNIDELRSNLGKADDGKLRSEKYFLYFMQLGKCAYTGKSISFDELEDNSKWNIDHIWPQAKIKDDSLDNKVLVDSNANGAKKDIYPIDENIRNKMKGFWYSLREKKLISDKKYQRLIRSTPFTEDELAGFIARQLVETRQSTKAVAELLKELCPESEIVYVKAGLVSEFRQEMDVLKCREINDLHHAKDAYLNIVMGNVYNTKFTNDPRNFIHKHLDNYSIKLTTLLSQKIERNGEVAWDNARSFATVRAMMAKNSIRYVRYTYKRKGGLFNQMPERKKDGLVPRKKGLDTSKYGGYNNKTASYFSLVKVKNDIVFIPVDLIDSIKFLKDIKKSKEIALTALKEFYSPKKLSGITENDIVFPLKRTIIKINTMIEIDGFRINICSKDSKGKYISVSSAVPLTLDSDKKKYIKKIESFKKKYDNDRNYKVNKYSGISETENIELYDYLAEKCLSEPFNKWQKFKEAGEILVNGKALFINQDITIQTLSLLKILAILKTGRSGNCDLSFAGGVANYNTVRFNSTLDSKKNKHVYLIDQSPTGLFEKKSVNLLEL

SEQ ID NO: 4556 - protein, 1371 aa, unidentified
  REGION 1..1371: note = Description of Unknown: Cas Enzyme sequence
MDEKYFIGLDIGTDSVGWAVTDDNYKLKKFRNNLMWGVNLFDEASQSAERRYFRTARRRGDRKKQRLELLKEFFGEDILKTDSHFFHRLKESGLLPEDAENRKKSIFFDDPNYTDKEYYKQYPTIHHLICSLMNDRSPHDVRLVYLACAYILGHRGHFLFEVDKDNISQINDFSEIYSNFYDSISDIVDTVPFDSDSDPVADILRSGRSITKKEEQFFGLFFGGKRPKKDEYEIRIDLMIKMISGGSVKLSELFRKEEYKELEKNTVSVSSADFSDTLEILYGQIEETEFRLIENIKAMYDWSLLVDILGNHSMISEAKVDIYEQHKSDLVKLKRICKKYLTVADYKAIFKDICDKPNYASYVYNASADSRPDKYKKCKDQGEFCKYIQGYISGIKPNVSDKDDLDELLQKCNDKTLCPKQVTTDNRVIPYQLYYVELKKILENAKEYLPFLNEKDQYGTVADKILSIMEFRIPYYVGPLVSSNRSNNAWMIRKADGKIYPWNFNEIVDHEKTENEFIRRMTCKCTYLAGEDVLPKHSLLYSKFNVLNEINNICVEGVMISVDLKQRIYNELFMQKKKVTKKAIEDFLINTGNMTKGQKISGIDDNVKSSLKPYFDFKTMLTVGKLTENDVEAIIERITVTTDTMRLKKWLKSNYNTLSDDDIKYISRLGYKDYGRLSRKFFEEIYAIDADTGEVISDKNIITMLWETNENLMKLLGLKYGYINGVNHFNKVYYEIPENCKTIDERMKEMYIPTSVRRSITRTVDIVKELKGILNKDPDKIFIEMPRGTGDTPKGSRTVSRRDRITDWLKAAGEDDDGRLEGELARTDDGQLRSDKYFLYFMQLGKCMYTGKDIPFDEIADNHRWNIDHIWPQAKTKDDSIDNKVLVNTKVNGAKGDNYPISSEIRNKMNGFWAMLRAKELISEKKYQRLNRNTPFTEEELSGFIARQLVETRQSTKAVAELLKEICPDSDIVYVKAGLVSEFRQEFDMLKCREINDLHHAKDAYLNIVVGNVYDVMFTKNPLKFVRSNTLYTMNLFKSDSEGEPKGMLTKKIQRNGLIAWDPDSSFDIVRKMMGKNSIRYVRYCYRRKHGQNGGFFDQNPLRKGKGMVPLKKNLSIEKYGGYDNATISFFSIVQCSGIGCILIAVELIIADKYVSDLDYAKEYVANKLSNALNKKVDKDMVSFPLNNRIIKINTVFDIDGYRVNIVAKTNSSIKYTSAESLILPPVQEKYYKRISSFLEKSERGKKYLVPSDIITNDDNIALYECLMQKCNTVPFVKMYSDIGKLFIEKEAEFKRLDLLDQLFVLSEMVRLLKTGRKTSVDLLLIGGKKNMGVKALNMNLYKINNIESISIIDQSPTGLFEKRSVNLLDL

SEQ ID NO: 4557 - protein, 1373 aa, unidentified
  REGION 1..1373: note = Description of Unknown: Cas Enzyme sequence
VANEKTYLGLDIGTDSVGWAVTDGEYKLKKFRNNLMWGVHLFDEAQQSAERRGFRTARRRLDRRQQRIKLLQDFFGAEIVKKDEKFFQRLKESALLPEDSENRTHNIFFDDENYGDKEYFKEYPTIHHLICKLMNSSESHDVRLVYYACAYLLAHRGHFLFNVSKDNIDEITDFTEIYKNFFSALMEIDETPPFDQNSEGMEAILKKHISVSAKDKDIKQLLFGGKAPKSEESETIRYDKLTKLISGGTVNLSDLFSKDDYKGLEKNSVCVKNADFADTLEMLTGQIDETHLDLIASIKAMYDWSLLVDILHGKTMISESKAEIYDRHKKDLEELKYFVRKYIKSEYSAIFREISDKANYVSYVYNAPSEDERSKYKKCSQEDFCKFLKPFLTKIAPSDEDKVRYEELKKKCEDGELCPKQVTTDNRVIPYQLYYAELKKLLDNTCKYLPFLNDKDEFGTTADKILSIMEFRIPYYAGPLVSSNRSKNAWLKRKAEGKIYPWNFSKIVDEDASEQEFIRRMTCKCTYLAGEDVLPKYSLLYCKFSVLNEINNIKVNGEPISVELKQRLYQDKFVDSKAKVTKKRIAEYFKSIGAYEGEIEISGVDDNIKSSLKSYHDFERLIGSGMLKESDVEKIIERITVTTDVKRLKKWLKEKYPDLPEDEIKYISKLKYNEYGRLSRRFLEETFCDPVTGEVICEKSIIAALWDTNANLMQLLSSKYSYSNAVEAINNDYYDQHEEEKSISKRLENMYIPTAVRRSITRTLDIVKELKTILKKSPDKIFIEMARGEGETPKGRRTQSRRDQITDYIEKFKNEIDNYNELENSLNKADDGKLRSEKYYLYFMQLGKCAYTGKPIIFEELEDNHKWNIDHIWPQAKIKDDSLDNKVLVDTNANGAKGDSYPISADIRNKMQGFWHSLHKKGLMSEKKYNRLIRSTKFTEDELSGFIARQLVETRQSTKAVAAILKELLPDSEIVYVKAGLVSEFRQEKEMPKCREINDLHHAKDAYLNIVLGNIYHTRFTENPLNYIRRNTNYSIKLTTLISQTIERNGEIAWAPSSSFGIVEKMMSKNSIRYVRYAYKRKGGLFDQMPVRKKSGLVPRKKGLDTGKYGGYNKATASFFTLIKLKNDIIFVPINLLNANDFISSEKCRSQIIIEAMKGFVAANKMKNITEADVKYLSVINGEEDDNFRIIRINSTLEIDGMRFNLKGKNDNYMSVALATSLVLDREFEIYVKRIESFYKKYKDKIISSVSPYSGINKEMNEKLYKCIAEKCISGPFARWDKFKEAGETLIKGFDMFTKMDLTEQILALIKCLSILKTGRSSNADLSFAGGQKNFHTERFGMILNKKKNSEVYVIDQSPTGLYEKKSVNLLEL

SEQ ID NO: 4558 - protein, 1424 aa, unidentified
  REGION 1..1424: note = Description of Unknown: Cas Enzyme sequence
MDKSKDKYYIGLDIGTASVGWAATDTQYKPLRIKGENALGVRLFDEAKTAEERRIRRAQKVRMKRSRQRLKWLRTLLEDEISSKDPKFFARLESSSYWRNEKQLHGLPTLDSLFADSSFSDKEYFKLFKNTYYLRSYLMDEKSWRGSPPDIRLVYLSIAHILKNRGHFLYEFETNESNGADTQQWGYELFNALNLYLSNEQSEDDRDPIAFDISNFEELLNIIMDNKMNRTVKSVELGKLLLAKNKIENIKHGQKMVDTLVGRKVAIKDIIEGYEEGEMTHVEFAKKWEDEAPRLKAALGDDYNLVELLKNIYDWFVLIRVLQGKSSISTSMVEKDKLHKQQLLFLKQLVKEKSLHKYETIFRCNNTQNNYASWIGTNLRRGKKYVATKNAPGGRKEFFKSATSYDDFIKFLKKELGDIYNLPEAENMRNEIDNKNFLVKLRTTDNSTIPYQLHKRELDIILANAEKYDIFSADICEKIKSIMTFRVPYYVGRLNTYKGDNEKRHVWASRTPKGEKLTVDINGKSYRESITPWNFDEMIDHHSSNKAFMERMIKTCTYIDGARVLPRYSMLYSKFAVLNELNGLRINGDRVSVKTKQDIYNELFKKHKRVSIKLLIDFLKADKNYGYENIKKENISGIDIHGNGFNNNLASYIELYKIFGEDIETRETMNIVERIIELHALNENKKMVRELIVREYDYLSPIIQQALGRLTFNGFGNLSADFLDDVDIPIIRIMWENNLNLMEILHSREFGVREWLDDLNGLEKNKTDDEILSKSYASPSIKRAVNQAIQVVSEISELTGKPPGKIFIEVTRSNTQEKKRTISRKNRLMDLYKGISRTNQEILKELDGIDEKQLKGKHVYLYFLQCGRCAYSGDPINISDILAGKTSLYNIDHIIPQAYKKDDSISNLVLSKQNINARKSSTYPLSLIEEINSNRSKLVNMWEGWHKNGFMSTEKLANLKRVTPLSESEKYEFIARQLVSTAQSTTIVAKILKQRFPDTEVLYSKAENVSDFRNKFEILKCRDVNDHHHAHDAYLNVVVGNVYHTKFNKSFWKKGVDDQRLSANRVFDLDVDGVWIAPNNQNRTGTIEMVDKAIGIKSILVTKKLHSGDGEFYNQTIYPAHARQKEIDDGRKAVDILEKESLLIKRKGDFNPLSKSSQYGGFKKENTAYFMIIEFDDKKGNRMKRFEQISTMNKKHWQTLTKAEQELELSKDYPNTKIIDDKILINSLFEIGPMRIRITGCNESNIYFHNYNQWLPEDKFRKHIRIVSEYITKISKKVLNPQDYNGKEEFVLASKNKHKKVRKVENLELFDEICDALNRMYGAYPMLKGKSLGLPDMYDKLIAAREKFIRLNITEQLAMLDCLIKGMGCNAINFDLSAVGGGKDVGKIQPSRSIGALPLTIVRESVTGLKTKRIVIIPKSEVHI

SEQ ID NO: 4559 - protein, 1383 aa, unidentified
  REGION 1..1383: note = Description of Unknown: Cas Enzyme sequence
GRESFKMSKYYVGLDVGTDSVGWAATDEDYNLLRLKGKDAFGANLFSMASTAKARRLLRTSKRRTARRKYRIQLLNEILAEPISRKDPDFFPRLANSNLHWEDKKGVKGHAVVFPTKKEEAQFYKDFPTIWHLRKALVAGDQKAYKDIRLVYMGIHHIVKYRGNFLKEGDFSVKKFDYETLFDNLNRNIASLREGDNSGPTIAKENYGKAFDIIQERKGTNDKVRALKELLNNPYDSAVWEAFSKLVSGGTFDSSKLVEDATKKINLKKGIADEDYEAALDELKNYGFILEDAKAITDYLSLKQLLGDHTYLCDSMVEIYQKHKSDLRLIKDTLHSVDEKKGQRDKEGSTYFQFFKEKGKDNYLALTHNDSAVRKTPEEVLKFLKGIFEANKDFIDEKTYQTLTDGCCDYSLLPLISVHSTSVIPHQLHHMELKEILRHAANAYPSVFTKEVVEKIDKLFLFRVPYYYGPLNPNSPRSNIVYKAGTDPKEKISPWNYDSLVDEDETRKRFIAKLTKSCMYLIGEPVMPKSSLKYEEFILRDQLNTLHVNGHRFSEEEKEKVFDFLHSRAKTDLPQLKEYLEKLTGIKAAEIVFSGLSEKHEFNSASFAFFERFKAKFHKEISERDAEKIILLSTIYTKEKDDLRKYIRKEYPSFSKNEVNFLLGLNCTKWATVSEKFVDGITGMDENDVAGLTILGYLRTTDRNFQQILNDPKYRFREVIDDENKRHGKDRTDKERIEEILDATPAPFRRSVIRTMAVLDDVVRAKGSAPDKIFIEVTREDNDADTRKAKTKDSRYSELKKMLRSIQKDGKEYSEFVSKNRIDELDSELEEEDIKNAQINGKHVYLYFRQLGYDLYTGEKIDLYDVLHSDRYDTDHIIPQSLIKDDSLDNLVLVDRTYNQRIKQDFYPIPTSIRNEERKKLWHFLHERKLISDKKYNNLIRSTELTEDEINAFVSAQINALNYSNIALRDALATRYPDTKLVFSKAQYPSYIRDQYHISKIRELNNAHHAVDAYLNILCGNILSMTFQNLHVIYAKKKEAAERKASGQEKKENDDKTFNMTHVLRYHLNNDEGLLQRVTFTCMKHSALITYASSDSAGAFYNMNISPVKDTAGELYPIHKGMDPKKYGGYDSTTTSYFYLVSYVKKGKTKKRLLNVKTVEAAECKTDEELKKRLIADNRLNNAEISDIRFLTKIKPNQKVLYHGGIYSLRPSNLFRCNLVNAYQFYLEDSYRYDNDVSYLKFALNHLSLLESDKDSIELFTDRKKEHKIVISKERNYSIFKKLVDLAERKSNGKHPGFESCTFLSNFGKLGSKEEFMKFKPVQQIQIIDEGLKLFTDSIHSKINEYYPSVGKDFAYKPSLNLDGPITLINESPSGLYVRKVTY

SEQ ID NO: 4560 - protein, 1361 aa, unidentified
  REGION 1..1361: note = Description of Unknown: Cas Enzyme sequence
MAGKYYLGLDIGTNSVGWAVTDEDYNLCRFRGKDMWGIRLFESADTAEERRLKRGNRRRLHRRTQRIKLLQEIFAREIEKTDESFFIRLNESRLHMEDKTIKEKHPLFIGKDYNDIDYYKQYPTIYHLRKELIENKQPHDIRLVYLAIHHILKNRGHFLIEGNIGEAKDFNIVFDKLHSALEEELHWQVDVDAHKGEVKSVLTDKNKPRTEKVRAIRELLKITDAGLSKEEIKRQNSITEIVFKLIAGNKGDIEKLFDLEKKTLTKGSFSFVESNYEEDVRPDMENEISDFIHIIDLIKGVYDWRVLVEILQEENYISNAKVKQYEKHRSNLRALKRVVYENFGREVYKSFFVDESKESYSSYIGASNKNGKKRNVAKTQGDDFFKKLKKKLQEVKENGYGYETAKQFLEVESLEDLLPIQRNKSNGVIPNQIHKAELNMILENAEAYLPFLQEKDSADISNKDKIIKIFDFRIPYFVGPLSDRHREEGSHNWMVRQEGKNGKIYPWNIDEIVDYEKSNEAFIRRMTNKCTYLVGEDVIPKNSLLYSKYMVLDELNNLKIRGNKVSERIKQDIYNDLFKKKVKVTGNILLNYLRRDLPDLQKEDLSGFDKDFRASLKSYLDFEKQIFPDRMDKPDVRNMVEDIIKWITIYGDDSKMIKKVIEKEYPDRLTEKQLGEICRFRYRGWGNFSKRFLKGIEGIDLETGETFTLIDAMWQTNNNLMQLLSGRFTFGEAVEKENNKATEKIERVSYEELVDTMNVAPAIKRAIWQTVQISEEIKKVMSDPPEKIFVEMARGGGEKNKRTKSRKKLLEELYKSCEKDVLYLKEELEQFEDKDLNSMKLYLYFTQMGKCMYTGEKIELDDLMNKNSEWDRDHIYPQSKIKDDSIDNLVLVNKTVNSRKSNNMLSSEIQSDMNGHWKTLLRKGFISKAKYDRLTKKGGFSEEELAGFISRQIVETRQSSKVVAELLKRINENTEIVYVKAALASDFRRKPLNMLKSRRINDYHHGKDAYLNIVVGDVYNAKFTSNPVQWFKNNKNVEYSLNKIFSFDVRRGNKLVWEKCIEDENGIGYGGTIDRIRKIMRQDNLLYTEYTYCDKGKLFDETIQKKGKKNVNIRLKSGLDIAKYGGYKSANTSYFVQIEFDGKKGERVKNIIGVPIYVANQLSRNPNAFEDYCRNIKKMENLKVIIPKIKKNTLIMVNGFPMRIRGENDKNIEFKGGKQLYLNLEQAEVVRLIEKFWNKKRDNKIGSEIDKLTHEEVNGIYDIILNKLKNPYKCRPANPSLLLEKNKDKFYTEDDMEKKFGTIYEMLNLLRCDATNTADLTMIGGGKTAGSLAVNKNTVCKNNIVIINQSVTGLFENRKEI

SEQ ID NO: 4561 - protein, 1373 aa, unidentified
  REGION 1..1373: note = Description of Unknown: Cas Enzyme sequence
  MOD_RES 1183: note = Any amino acid
MKKEFGEYYLGLDIGTDSIGWAVTDLDYVVPKLNGKSLWGVRLFDAAETAQARRTFRSTRRRYKRRKKRIKLLQEIFAEEICKVDPGFYHRMQESNLYPEDKESNQPYALFSDSEFTDRDYHRKYPTIHHLISAIIERPDEKFDIRLIYLAVHHIIKYRGHFLFEGQDIRTVPSFDEVFRQFVLLAESEVDWQIQCDPVAVENILRDKDKKVRARQTALNRVLGADTKQKKAVVSLLAGGTARLSDVFPVEVSEDVECNSISFAKGAFEDNRSQIEDILNEKMVLVDMLKAIYDWALLEDLLSKADADKRYLASAKVNIYEEHRRDLSDLKYVLRTYYGQDDYDKVFRDSNVKNNYCAYVGLNKTGNRKRVVQSRQRVVQSRQRVVQSRPTQDDFCRFLRSIVDEPKEGFNTYKEDKVYQRVVKKIQDGTLLPKQVEYRNSIIPYQLRHYELERILENSSRHYPFLNEKDSRGLTPADKIKMLHTFRIPYYVGPINDAHRNTEKDYDVCWVVKKSPTPPGPVTPWNFEEVIDLEKTAEAFIRTRTNKCTYLIGEDVLPKASLLYSKYMVLNELNNLRINGEPISVDLKQKIYNNLFKRYKTVTGKRLRDYLLAEGEIEHTDLISGIDTDFRSSLSSYLDFKRVFGESIDEPQVQDMVEDLILWILLYGEDKGLLRNKISQEYGGRISEEQMRTILGLKYAQWGRFSKTFLTELCCTIDGDEPQSILSAMWNTNNNLMELLSTRFGYFKKIDEFNGGKQVIERLSYEVVDALYVSPPVKRMLWQTLTVVDEIKKIMGREPKKVFIEMTRGKEDRPTRKESRKDALMALYQTCRDEERDLYNEICERAEADFRSDRLYLYFTQLGRCMYTGERIRLNELYSRTYDIDHIFPRSRVKDDSIENRVLVTAEANRAKGDNYPLSPSIQANQRGFWKTLRDKNLIGALKYERLTRTTPFDDKELGDFIARQIVETGQATKATADVLKRLLPNTEIVYVKARNVSDFRQKFGIVKVREANDYHHAHDAYLNIVVGNVYHTKFTSDPWNFIKQRADNRSYNMYKLFENNVKRGEICAWIADENRSITQVKKSLSNNNIQFTRYAYCNKGQLFRQNPLKKGEGQFPIKQNSKRSDIGKYGGYGWVSGSYFMLVEHKKGRKRVRSLEHVPVYLANQITDRKEHDLISRYCKEXLGLIEFEVLVPKVKVDSLIKVDGFFMHLRGRTGDSLIVRGANQLLIDDRYMRYLKKIVNFNNRKRENKKATVSGFDEITLEENLELYDLFIDKHENTLYRHRPNPQIELLKEGRNAFATLSLEDQCYVIGQVLRLFWCGSPTEGDLSLIGGRPHSGKITISKNISKYSEFKLIHQSPTGVFTQEVDLLRI

SEQ ID NO: 4562 - protein, 919 aa, unidentified
  REGION 1..919: note = Description of Unknown: Cas Enzyme sequence
YLPFLSESDEYGSVADKIESIFAFRVPYFVGPLVDADSPNGRGKFAWMKRKSGGIIRPWNFKELVDLDASEDEFIKRMTNACMYVPGEDVLPAESLLYKEFALLNEINPLKIGGARLTADAKRRIIDGLYRSKRRVSRKALERFMLDEGITKRGDEISGIDEELKSNLSSYHDFKCWIEKGMLTESEVETIILRSTCTEDSRRFALWLGKAPFAANMNESDIRKIARLKYGEFGRLSRRLLDGVVFTCKESGATGTVIEFLRNENVVLMELLSDRYTLREKLDEIAKAYFADSPVTLGERLDEMYVSSAVKRQIYRALDIVKAVTKAMGGVPLKVFVEMARGGSPEQKGKRTRTRHQQLVDLYRGVRDDEVKQVNAELESMGAGVDNRLQSDALFLWHLQLGRCAYCGKPLPIEHLKNVANVDHIHPQSKVKDDSVMNNKVLCCSGCNGQKEDVYPVPAAQRQPEMWSKWHDLGLMTDEKYRRLMRTESLTDDDLQGFINRQLVETRQTTKAILTLLTEALPETEVVAVKAGNVSDFRHEFGLVKCRAVNDLHHAKDAYLNIVVGNVYHERFSRQFFRLSDGYTMKVGVLFGEHTCVQNEHGLAWDGAKSMARVKATMLRNDIHLTKYAFYSKGALFDLMPVGVDGAEIPRKAGLDVKKYGGYRKPAAAGYLPVGFVSGKKRDVLIVPVNLMDMPTIVGEDEAVAMILVKKITEQLNGKPISDVTLPFGRKLLKVNTVLSLDGFPFVLRGKSGGGKMYLMSSMRSLRLEPKYEAYVKRLESISEKMRDNKALTIDSQYDKVSAQDNVALYDVLCEIAESPAFESIPASQAKTLKAGRGAFCALGMKEQVSCLLSIVLLLKTNRAGGCDLTGVGGVAKAGVVTLSSRVSNWKKSYDDARFVFSDFAGLHRHQTSNLLELL

SEQ ID NO: 4563 - protein, 1398 aa, unidentified
  REGION 1..1398: note = Description of Unknown: Cas Enzyme sequence
MSDFDKPKGSTGEHKGVKKNHFDKHKDQICKHKGVKQGNYFVGFDIGTNSVGWAVTNENYELLKFKSHKMWGSRLFTEAQTAVDTRMKRSARRRLQRRKFRLLLLESIFAEEINAIDETFFMRLHESKYHVEDKTNPVKYTLFMDKDYTDVDYYKEFPTIYHLRHHLMTKGTKDVRLLFLAIHHILKYRGNFLYGKKEFSVDGEINDVVKSTLSELGFAATVEEEHILSTIVAILLDRGIVRSDKLKQLGSIIAKGEKLSSVDKKRFEAWTKLILGLKGNLVELFTEADIDLDIPEEKDLKGLNLGEVIYDEVRDSYEEVWGDRWSIVDQCKVLHDIIVISSIIKPGQALSEAKIESYEQHKEDLLLLKSVLKEDRKLYDDMFVVDIDKGTNYVKYIKQGITGNTSITEETFHKYVKKVVSALPPSKDTITVLQKIEEGNFLPLQRISKNGVVPYQLHKEELVRILDKAKVNFPFLNEVEDGLTVADKIISILEFRIPYYMGPLNPAHSIENGGYAWVVRKEAGQVLPWNFEEKIDVQASAVNFIENLTNKCTYLIDQDVLPKYSLLYAEFSLLNELNNIRINGKPLPVDVKQAFIRDHFMSLQDTKTATKKAVAKYLVDNNYVSQSPIITGMDQQIATKLTSHRDMARILGENFDYSMAEDIIRYITIFGESKDMLRQVMKNNYGERLTEEQIKKLGKLKYVGWGRLSKRFLSDIRGIKKNDDDSEEGTIIEHMRQGPENLMQLLSSSYSFIENVQKYVKNVLGAKEKTAFEMLEDLSLSPMVKRSVWQTLRILDELVSIRKELPKKIFVEVTRTNKADKKRTQSRKGILVDLYKQIKDGEIERLRDELNAFNESDLDSKKLYLYFTQLGRCMYSGERIDIRDLATGQYDKDHIFPRSKTKDDSFDNLVLVDKTLNMRKQDSYPIDETIQKQRRDFWKMLLDKGLISQKKFERLIRAEPLTDEELNHFINRQLVSTNQSVKAVTTLLRQLYPDTEIVFSKAENISDFRQKFGFVKVRSVNPHHHAKDAYLNIVVGNVYHEKFTKNFLLFAKNNGVDRTYNLTRMFDKEIPSSGNKETIIWAPNKSMDIVSTMMKSNDVCVTRRAVADKGKLFKKEGLKKANEAIKSSEEKYLPIKESDSKIGNIGKYGGRTDIKVAEYVILKVVDIKNKERIEIFPVPVYLFDRDEYLSESICNLFIKHYKGRVALKNVDMIYRGLYNGTLVNVDGVKVYLGGKTNKQIYVSNAIPLILDNESNVYIKLLEKIQYKIDKKIPFNINTIKTTYLENEVKIDEKKNFSLYKKLIEKLDTLLFWEIPKDKFAVLQNIEIGDFLKLPVEKQVTTLMEVLNVLTNFIDNRNVTGLSLQIARGTIGVDITKKSSFSIITTSITGLYENEIKIK

SEQ ID NO: 4564 - protein, 1347 aa, unidentified
  REGION 1..1347: note = Description of Unknown: Cas Enzyme sequence
MKNKVYVGFDIGTNTVGYSVTNQVYDILKYKGEPAWGTSKFDEGSLNTKRRGYRCNRRRVDRKKQRIVLLQQLFAEEIHKKDPDFFKRIKASALLKTEQENRDSIFSDIDYKDKDYHKAYPTIHHLIVELMNSDVEHDVRLVYLACAWLLTHRGHFLSNISVDNLDKIKNLENIYEQFLQFFDQNGYDRPWNVSYNDDLGNLLKKKVGVREKEKDLNKFFYPDSKPETEGSEQFPFSKKAIVSLLAGGTVKLADLFCKEEYSEFGSVSLGMDDKKLLEIYGNIADDCEFIIALRKIWDWAILNDVLGEEGKTISEAKVKQYITHKEDLKQLKYLVKKYCPTKYNELFRKNGTGKYGLYAKSDKKKNDIDTFSKYVLGIIKNIEVDDEDVSIYEDMKNRLELRSFLPKQINTDNRVIPCQLYEYELRKILNNAAKYLDFLNETDGEISTKDKIVSIFTFKIPYFVGPLNSHSKYAWIQRKQEGKIYPWNFEEMVDLDMSEQKFIERMTNTCTYLPGENVLPKCSLLYQKFIVLNEINNIRVNQEKISVEIKQKMYNEIFLKYKKVTKKKIVDFLTVENIISKGEENLVTGIDMNINGTLSSHIAFERLLHGKVLTETQVERIIERSTYSEEKSRFKRWLMENYNFLSSEDITYICNLRLKDFGRLSKCFLAELEGCVCETGEVTSIIGALWNTQDNLNEIICTDRYTFKTEIEEFRKEYYSVYPKTLEERMDEMYISNAVRRPIYRTLALMKDIKKAFGTPDKIFIEMARGKSDKPQRTVSRKEQILDLYEKCDQEDVKILKKQLEDMGEYANNKLQSEKLFLYYMQLGKCMYTGKPITLEELASERYDVDHIWPQAYIKDDSILNNKVLVLSKANGEKSDTYPIKQEIRQNMHVFWSTLKDKKLITETKYKRLVRSTPFTEDEKMGFINRQFVETTQATKAVATILQEKYPETEIVYCKARLASEFRKEFEIYKSRTFNELHHAVDAYLNVVTGNVYNMKFTKRWFDVNQRYSIKTKTIFTHEVKCGDEVVWNGADMLEKVKKQAVKNNAHFVKYAFFKRGGLFDQMPVKAKEGLIPRKKELEDTAQYGGYNKSSAEFFIPVRYCVKKKFEVMIMSVELMYGKRFLVDTSFAEEYAYKRVKEITGNNVSEVSFPMGMKPWKVNTVLSLDGFLMCITGISGGGKCLSMQNIMQFSESNTWKDYIKKLERLCEKKKENDDYIFDKEYDIVNETDNLKLYDLYIEKYKKSIYSKRLNNPLDILMNGRERFMKLNIFEQAKTLLNIHETFGAGATGGTDLSYLGAGTKAGATVNFSAKINNWTNKYQTVVKCDYSPSGIWVKKSGNLLELL

SEQ ID NO: 4565 - protein, 1409 aa, unidentified
  REGION 1..1409: note = Description of Unknown: Cas Enzyme sequence
MDKKFYLGLDIGTASVGWALTDENYELVHLRGKSAWGVHLFEEAKTAEKRRLFRSARRRKARTKRRINLLQELFSEEIAKIDPLFFIRLNNSTFFADDKDTALLGKKDTLFSDRNFTDKDFHKLYKTIYHLQKELIDDKNTKFDIRFIYLALHHLIKYRGHFYLEESLNMDEFGIHQIKEGFEKLQVFFEDEEEIKNLFNKANRDGFYSIVEKVRGVNNTKKALKDLFATKNKIVNNTLEFIASGSSTVGRLFPLLEFGEEDEKKKINFGDEEFENQYYEIEGMVGEENIILIDAAKQLYDYIIIARLMDGEKFIAHSMVKKYNKHRDDLKRLKKIIKKACGQEEYNAFFKDNVKTVNNKPKRVTDNYPAYIGMTKIKGVKQSVKKITKADEINKFYNRIKKLISNVHTPEADKIREEIEKGVFLPKITSVDNAKIPNQFFEYQVSKILDNAAKHYPFLNKVDGELSIKDKILKILTFRIPYYVGPLSDINNLNSKEGGFSWVVRKTNETVLPWNLDKVIDLDKTAEQFILNMTNKCSYLLGEDVIPKQSLLYEEYNMLNHLNVIKVNEKFLSKNEKDELIENVAKKRVTVTQKAINDYFATRRLKKDVTISGFDIDAKFSLSSYHKLNRIFPGRINNEPQNARLIRNLERVILLGTIYSSPTDFAKRVTTNKQFREFFTEEELKKLSRLRFSGWGNFSRLLLAGYDSTSKKERLNQSLTYKDEKTGNELSIIEIMREEPLNFNQALFDEKYNFNEIIKRFNDNKDETLDVDELIDSYYLSPAVKRSIKRTIKIVDEVIQVNEGIVPDKIFVEVTRENEAKTKGKGRTISRLNKLRDIYKKAIKDADEFRELAKELENENLDDSYLSPKKVYLYYLQNGKCAYSGEPLDLLSSDIDIDHIVPRCLVKDDSFDNLVLVKKEENNKKGDHYPIRTDVIRRQKPFWKQLKKLGLMSNAKYEKLTRTRELTAEDFQGFINRQLVITNQANKAVAEILKKLYGNATIVYSKASNVTNFRNQFNITKCREINNVHHAHDAYLNVVVGNYFHTLFGSRYYFSKDNDEEPWSPKTAFKYTVKGCWDKDRSLVTVMKMLKRQDVLFTRMPEIRSGEFYDQTASKAAENLLPIKESGPLTNTARYGGYSGKNAAYFTIIEHTNKKNKRERIFISMPIIINQKIKQGQTTFKEYLKNDLKLVKPKVIYPLIPFNTVIKRGKSLQFLSGYQGEFNKVYLRNMIEPYFDNFTYEYLTLIYKYFEQKSLKGKKKKKDETSEVINSEDQENQEEVQQIKEIQVIFSKDEERLRFINFKKNKKVFEKLIEKIKKPIYEKSHTVRRIKIINNKNEFYKLSLERQTEIIISLHKLLKTGVPGRNDIDLAEFGVKTGGLTASYKIEDMSIVKQSITGLYQKEIIIKQV

SEQ ID NO: 4566 - protein, 1329 aa, unidentified
  REGION 1..1329: note = Description of Unknown: Cas Enzyme sequence
MKENGNDQRQGNYYIGLDVGTNSVGWAVTDENYQVKKFHGNAMWGVRLFEKAQPAADRRISRVARRRLARKKQRLMLLEFLFAEEIHKVDPNFFQRLHESDRWEEDKTTRCPYSIFHDAGFTDIDYHRNYPTVYHLRSELLQSTQPHDVRLVFLAIHHIIKTRGHFLYETGEDGDAILTVEQAFDQLNQYLQDEYDQMLEPKDRDAFLAILQNTSMGLSAKKKALHGACGSVDEISGLKLGELIDLLAGAKIKPNELFNDQTLKELTSINLKNGLDELEQCRDVLGDRFALLEFSKSLFDAARLSQIRKGYTYISQAKVAQYQENGSDLRKLKQYIRARIPKKYHLIFSEKKKGLDNYAAYSQYKLTQQDYHCDQEKFCKFLLGEQVELPEPDESEREMCEIYRKIKDGVFLPKLRSSENGVIPYQLNRQELVQILKQASRYLPFLNDVDSDGFSVSEKIIKTFEFRVPYYVGPVSDRAGHHWAVRFQGKENEKIYPWNFEQVVDLERSAAGFMEKLVGRCTYTGEPVLPKDSLLYSEFMLLNEVNLIKINGKSLPVDVKKQLVQDLFYHSSKKVTKKGIVHYLTSKGLMTQSDELTGVDDRIKSTLRSYHDFKDILKRTGDRDMVENIIRSILVFGNDLTMLRRWLKNNTHDLTEEEIRRICNLRSKYKEWGRLSRTFLTEIYSPDESGEAKTIMDYLRDTNCNLMQLLSNQYQFADQAKAHFDALMGNGQTLSQRLDDLYVAPAVRRSIRQTLRIVDEIVDIEHSVPKKIFIEMARDNAQEVKKSRTESRKDKLIALYRACHEDSGELFQQLEQEEDSHLRSDKLFLYYTQFGKCMYSGEPIDLESLMRGELFDIDHIFPQSKVKDNSLDNRVVVINTLNREKGNIYPIQGEIRRKMQPFWAMLKSKGMISEKKYDRLAKLTEEELFSFVARQLVETRQSTKALATILQEIYGEPVRLVYSKAGNVSDFRQQFDLVKCRDVNDLHHAKDAYLNIVVGNVYDTKFTEQFFHNIKKERYSLKKIFEFDTPGAWDKTESIKTVKKYMAKNNVLVTWMPHEVTGALFDLQLVSAGKGQLSKKQGMEISKYGGYNKLTGAYFCVVEHTDKKKKRVRTIEPVFLYQKATYERDPIAYCKNVLGLCDPIMIVPKVHIDALVEVNGSRLLVTSRSSNQIILKHTYQLTIGAEMEQYIKAISKYHERCLAKKEELPITKFDGVSEEKNLELYRLFADKCDTGAYQSCFSVFSTIGTELRKYESKFVGMSMWEQIKILLEALKAFRCNAVYGNFEPLSGKKTRGRVEMNKKISALSSAYLINQSVTGLYEHKIDLLK

SEQ ID NO: 4567 - protein, 1353 aa, unidentified
  REGION 1..1353: note = Description of Unknown: Cas Enzyme sequence
MADKKLYIGLDVGSDSVGWAATDQDFKLRRIKGKTAWGARLFDKASDAKTRRMKRSARRRSARRKYRIFLLNQLFAEALEKKDPNFLIRLANSNLHLEDKAESIKTKTPVFPTREEEISFYQQYPTIWHLRKAMLDPSCPAYDDVRLVYLAIHHIIKYRGNFLKMGTFEVNKFDDEIIYDLNAALNSVYERVASLDESETEQITFFEISNKNAMIKILEDRDLNVRLRKKKLIELFDNPGNPDFTPYLDLFAALVSGGKYDLAKLDDEHESLSFCFDNHFEDNESAVAASMGDDFKIVLCAKRVFDYIQLKDLLRGKASLSEAFVSIYECHKEALAYLKKICKEIDKRHGLVGEDSLFFKIFKSKENENNYASFVHVDSLKKRADIHSFNLFVVKSLEPYCGEYEKDANFRKIIFLAENDQLLLSISNVSTSIIPHQLHQLELDKILENAAKRHPFIEKISAKIKELFLFRVPYYFGPLNDRSRYSYVSRRQNVTITPWNIDEVIDRSKTREKFINSLVSTCSYLIGDTSVLPLDSIVYQKYVILNRLNGIRINGQLVLQEVKSALYQFILRRKKTTTEQVKRFLERNFDIYRKDHASISGLNETDPFISDSYHLFMQFYNTDELNGQQLTQAEEIVRLLALYADCPNDALDYIDELIVPLNKEGRSILKTKQFKGWGKLSKTLLVDMKACDDFGVYRSIIETLEENVLTFNAIINDKTLGFGEEIERRNRELIGEKTPDEVVNEIIDELPPDRRRSTIQAVRIVDEIVALAKQKPDYISIEVTRQDEKNKKQKDSRYNELMGFLGSLQKDKDSFIAEQAKHSKACLEEEFSDDQRKLKLKGTALYLYFKQAGIDLYTGRPIDIMDVLNSDKYDIDHIVPQSLMKDDSLDNKVLVERYYNQNVKKSIYPVPEQIRCNPAVLQIWKILHSHKMISDKKYNSFIRSSEITEEELNGFVNAQINIVNASNISIKKILKLKYPETTLIFSKAAYPSEIRREYEIPKMRELNDTHHAVDAYLNVVAGVTLYKEYSLDYVLGRNPGKQEIDKTYNMSKRMLDLLLHRHQKETVIAACKRHDFLLTYRYSYNDNAFYNETINKKGNNDSLIPIHTKGPMSDTRKYGGYSGLSGCYFVVAEIQGKDKRRVLVDIKTLWDKLYDNDEMLAAIKDRLNLKKGETFTVNFDKKILLGQKVFIDGCTYLLKNSNEQLVSLYPVSPLFLDELTAKYLSFAFKHIDDLKGIAGEYTFVLDKKEQHTISISTERNLEIVRSIIDLSRHPKYKSYTLVNKLESEVELDGFAQKTLDRQVAFIISLLRYFNRNVGLIKAPMRKTKTGFLSLKPVAIYESITGLLSFKKEL

SEQ ID NO: 4568 - protein, 1466 aa, unidentified
  REGION 1..1466: note = Description of Unknown: Cas Enzyme sequence
MENENSNAQKKYFLGLDIGTDSVGWCVTDRDYNIIRKQGKHLWGSRLFTEASDASSRRAARESRRRLERRRWRILLLQDIFKEDINKVDPSFFDRLNNSALHEEDKPEAAKAPCLLFNGKGYTDKDYYKEYPTIYHLRKAMIEQPEKKFDIRMIYLAMEHMIKYRGNFLREGTMSNIGNDPQTLVDSFNKIDSLFDELSSADEDTPHSVPKFNCSLDMAKSLIDLFKSNAGKSLLLEQATDILKLAKGKIGINALLAIICGSTRRMKDIFPPDEDSDSDDETGDTKVDFTSSSFVDETMLQLPSLIGDNEAALIKAAKDIYDYRILANVLQGEKYVSEAMVNIYDTHKDQLKALKDLVKRYAPDKYNSFFRKVFDKNGKPLINYSTYIGFCRVKGKDVCVAKTTNKDSLYKEIKTMLPFDKVSDPTYIWKANGDKEALNKISNDMDSQKYLPRQNAKDNGVLPYQLNEIELIKIIDNQKQYYPFLGEMDKDFSNPKVQSYKIDSILKFKIPYYVGPLSNDVDPKTGKKIDTHWAIKSDSNTKITPWNFHDVIDKEKTEEAFIERMKNSCTYLIGEPTLPKYSLLYSEFTVLNEINNWLINGQPITIEDKDYLFNHVYLVTKKPSLTTIQAALKEKYKEKVELYTRTGKELDKNDIHANLSSWIDMSKPAAFGPNFFKDKEKYDLAEKIVYAITIFEDSKVVSERLDKLPLTPEQKRYFSSLTYSGWGKLSRKLIDGITIDKVDTSTGEVKPYSIIDLMRITTMNFMEIYETGADTNGFKKQVIALNQKDNPTVDDIIENEYTAPGMKRALRQTMKIVEELKHILHIDSFDSYFVECTRSPNDKNKKVRTQSRKSQLEQAYKAAKGFADEKLKANLETMTDDKLRSKKYFLYFMQLGRSVYSGEPIDIDEIDKNYDIDHIIPQAKVKDDSFTNTVLVERGLNNTKSDTYPIPTNCITDKGREWVTTLSKIPYGKTFLMPKEKMNRIMRPVTKPLTEDEEVGFVNRQLTMTDQSVKAVCDVLTRTDQKAHVVYSKANLVSDFRKDFDFPKCRDVNDFHHANDAYLNIVVGNVYNKTFSSVFNKQLLERNKAYFESLKMNVENFFEHDHNIFLSDTKVWVAKHYDYDEKGNKIEDPNSKGTLDIVRKYMSHNDPMVTQMMFTQTGKQGFFNKISIHPVYDQGALMPLKATGPFASDGWEKKYGGYNDLTAPYFMLVRSEIVKGKNKGKHQYSLENIPAVYKSKFDDKEFVNNYLTKELGLVNPELKLPKVLIRSIIEFHSKDENGKDIKCRIGITGKSTNRILGINMSELAIDKCHSNYIRAISKLLGTNLPANAIKPNLESYSNLETINSSNVEICKNKNMDLFDFLINKQLSKECYRLLPGYSSCIIDLKNSFINFSSLSTINQCRVLSQIILLFQCKPRSIDLSLLGLSSHAAIIQPSKLLSPGDKIIITSVTGLSEKVLFTVPED

SEQ ID NO: 4569 - protein, 1483 aa, unidentified
  REGION 1..1483: note = Description of Unknown: Cas Enzyme sequence
MKKLKIQKKIIGVDIGTRFSGYAMTDENYRIEKIYGKNVIGIVNFDEAKTADKRRGFRTVARRLTRRKYRLSLLQELFNEEIMKKDPNFFRRLEYSDLTFEDKGSIQITERYTLFNDKKYTDVNFHAEYPTIFHLRDTLMNQSIPDVRLLYLAIRHIMKHRGHFLMEGDLTDVDKINIIPQIEILNSAIEKRNSVCHEEIADGIVKSIGTLADDEDTIQHLQTLLATKKENGVSLKGSSFSKAIENLLGKGQKSSNDLVALLDKGSKKAYQLFGSCYKGTDEIVINLDAFDEKSSEIESVLSEEDFEIVKACLEIRSWILLIRLLKREKSLSKAMIKAYETHKKDLKELKDLLSTYADEKTYQRVFGKKAEKAKREKEDTDKAKTECNYSVYIGGGTILSDGKIDRTKYADKGNSEDFYIFLKGILSTITAPEAQVTIQSILSRMETNDYMPRISSKNNSNIPYQLHLLELEKILNVAEQSGNFDFLREISDGMSVKNKILALFKFRIPYYVGPIKNYKPNDSTNKHAWATHTNPDDYSRITPWNFETKINLTQCHKDFIKRMTGKCTYLKICDTLPKCSPTNEMLVALNELNGLKINGDPIEQSLKRDIFETIYLDPDKKVGIRSIHEYLKTRGMDVSIGGYDEKLKGEMKTYKRFKKIFGEKCEKYPKAMEEIALILTIDTDSKIIARQLTERFGDILSDEEIKKIKGDRYNGWSSLSGEFIRGTLFDKDENGDSFGFFVDDEKRVDLLELLENTNIVLNQILFSREYCLQDKLLQYYQEHGLIENGNVTYADIEKLYCSPSVKKSVWQTFRTIKDICETTDSLPEKIFIECTRENNSKKKTTSRKNIMLRLYDEARSFLEEDRELTEDYDNCKQRLIDIEPDLLKKEKIFHYFLQLGKSVYSGDPISLDKLDDYDIDHIIPQSKTKDDSIDNKVLVEKIINNERKGDQYPIPQSCRQKALWEKLLKMGLMSREKFDRLSRVRPLFLEEEEKFINRQLVETAQTVLLVRDILKKWFLYVSEDGSIPEIVLVKGGNVSDFRKKYNLTKSRDVNDFHHAYDAYFNIVVGNVLNEYFNHNKKYSQGNLERNMEVKTENPKENSSEDKEEKDSDLFMKVFNRKVYSYRENGKPIWIPTYRGNKNSTLNVVKKQCQLIPNFVREVTTNKGELYNQMIKKAKKGLIPLKFSGFKSDIDKYGGYITSGTAYFWIVDSVDKKGKPVRSIESVSIYQDSLLKAGKITEEDIFRSFGLIHPRKAQIDGIPNAVLKKNSLLRFNNEYSLFLTGCTGNQITFDNANQLFVPDKINAYVKEMRIIHDKVMNATATANKETVDQQQEIECNKLLVEKRKQVERNCHKSFVVLSKEQNEEIYEFLLRKISEKPYKNIPTHASLCNIMQKGKAYFLDCDIFMQVRILLNLLVTFQCNPQKTDASLIKYCDEKGEMRVGGTSQCAIKMNKEITKHNIDLITYSRSGLREKIICINKTK

SEQ ID NO: 4570 - protein, 942 aa, unidentified
  REGION 1..942: note = Description of Unknown: Cas Enzyme sequence
FPSFGEEVSGENEKYNTKAKKIEYIHSFRIPYYCGPIKQKDSVACWATEEIKQIVYPWNFKELVDLGARADGFIGRMTNECTYVIGADVLPKSSLAYQKYMVLNELNNLKINGKRIDNETKQKIFEYGYLNGELNGKGLTLRELTKRMHSAALLDDNDELGGTNDVKVLPKLSTHEDFKKILGDDYSKKYSQAKLEKVIRLITILNNERGMLAQKIEEELGCDKEQAKRLSKLNYKDWGKFSSEFLNNIRKDIDGVSMSILDALWNTSANLMELLGAEYGFGVELEKYNEVSKPKAGGNITYEMVKKLYCSPAVKRTVWQAIKIVKEIEQVMGEAPAKVFLEVTRGEEKGEKKIKLARRKELQEKYKAIHSPEAKELLAELENREDRDLQSKKLFLYFSQMGRCAYSGERIELDDLFTRAYDIDHIFPRSRTKDDSITRNLVLVKAELNREKTNTYPISEDIRAKMHGTWQIWQRTNNLITKEKYERLVRACPLSDEELAGFISRQLVETSQSVKAIRDLIQQNMTQTKVVMVKAENVSDFRRYYASGEKFRDSDEYKEGMGPRPEFIKLRELNDLHHAKDAYLNIVVGNVLNSTFTDNPISFIRRKKNSNYNYSIKTERIFRNSERYYLEKNVVATEPKVEAWDFGESVKTVSDTLKRNDVSWTRMNFEQSGELYNSQIVGKSENMDGILPIKEDVRLQKTDKYGGYNSVKGSFFCLIEMNDGNRKIVQIPILAKKKIDEYIAKKYDNAKVIISKINFGSLIKINGCPLHLTGRDSDKKLSFYSAKQLTINEYKYADTLKKIARVNQKLVSDNKYELDEEKDELNHEKINELFNYLLERYSAFEKMPEIGKKINEIRGSSENFMELTLKEKVKTISELLKVVSCNAAKGNLSAFVNGASEVGKIRVSNDITKQNDVRLILQSPTGLFEKEIDLKTTKACKI

SEQ ID NO: 4571 - protein, 1412 aa, unidentified
  REGION 1..1412: note = Description of Unknown: Cas Enzyme sequence
MKQRQEYYIGLDCGTSSVGWAVTDEKYDLLKTKRKVKKNDKTKSKQCTLWGVRLFDEAETAATRRIARSTRRRNARAKERLKLLRLLFRDEIAKVDPEFYNRLRESFYYEEDKNLVSKSKNTLFNDPDFTDKDYYNLYPTIWHLRQAIIKADDNVHFDIRLYFLAIQHILAHRGHFLLEGDIGKGQASFQPIFDVFYDACEDYYRLNNSAASSVERIIEDKSKSKIDKKKELKEILFIEDDGDEEALKGQTELAGLLIGSKVSLTKIFGIESDEDFKYSFAEGVFEDKIPDIEMAIGAENMDLIRAAKQVYDYAILHNLLNGREYISDAMVANYDQHKKDLSALKLAFKPLPESYNKLFKEKIYDASKTPNKDFPIYQAYIGKARSAKGKPALVGQDIFNAQLVNLMESRGITGELLDRAQKGELLPKQRGQAKGTIPQQLHHNELKIILNKLTQDYPSFGVENQSESEKYNTLAKKIASIHSFCIPYYCGPIVKQKYDEQGKLIPGGKSQFSWADEEITELVRPWNFDRLVNKDQRATNFIRRMTNECTYLLGENVLPKSSLLYQEYMLLNELNNLRINGQRIDNELKKTIFEQGYLAGELNGNITIHSLERWLKNGFIRPDDELSGASETKYLPKLQTYQDFRKILGEDFEKKYSNKQLERVIEAITILGDEKQMLTRRIRSELNCSEEVAKKLAKRSYKDWGKFSAKFLNGITVNNQTILDWLWDDNKNLMELLGQEVGFGKVVEEYNNLSGKKPEAGAKIHYSNIQDLYCSPAVKRSVWQTVKIVDELAKSQKHAPTKIFIEVTRDEDMKAKGKYTLARKKDLEAKLKSIKSEEAQEILNELSTKEDRELQSKKLFLYFSQMGKCAYSGEPINLDEINNSSLYDIDHIYPRSKTKDDSITRNLVLVKAELDREKTNIYPISGEIRGKMSRTWQLWYRFGLITKEKYERLTRATELTTDELGGFIARQIIETSQTVKAIRNLLQSAYPDTKVISVKAGQVSDFRHLFANGIKFRNSDQYKVQPRPEFIKVRELNDFHHAKDAYLNIVVGNVMSSTFTDDPYSWIKKREGKEYSVRPELLFRASEEYQKSDGRITHYPEVQNWDFANSINLVSSTMARNDILWTRMNYVESSEISDLQIVPHSDKTDGILPIKRDSRLAQINKYGGYNSIKGAFFALIECNNKKGELERRIVSIPQIYKDKVDQFVKNKYQGGKVILSPIKYKSKLKINGFPVHLAGKSSSGLVLYNGLQLLLEPDEQRYLKRVLKAISKRQQIRGGRQKDQSKDGISRENNSMIMEAICRKLALFNAMPGFGEKANTIRACAGDFSKLALDQQTDAICNMVKILRCNAETGNISSFVPKASFLGKGTMPEDITQRYENIFLISQSPAGLYEEQIDLKTIHPQNLKKKAD

SEQ ID NO: 4572 - protein, 1099 aa, unidentified
  REGION 1..1099: note = Description of Unknown: Cas Enzyme sequence
LGEHKMVSDAMVANYDLHQSDLKKLKQVFKPHKEIYTKLFKNDLFDDKNPSYSAYIGNAYVEDKSGRRSSKNINQEDFNKYLHKLLEEIKPEATIEDSGVINELLNRTDTSEKSVSPLLLPKQRSQAKGTIPMQLHANELKIILEKLQQDFPSFAEVVSGEDESYNTKAKKITKIHEFRIPYYCGPLVSDRKSQFSWVDEEISELIYPWNFDIIMKKTGQRDKRANNFIRRMTNECTYLVGEDVLPKCSLLYQKYMVLNELNNLKVNGYRIDNNLKQEIFERGYKNGEFKGNITLKKLEDWCRSNGFIAASDELSGTSEVKVLPKYQTYQDLRRVLGGDFEKHYSSKQLEEIIEAITILGEEKPMLERKIAQILNFDINDHKVKDLAKLSYKDWGRMSAKFLNGITLNNRTVLDYLWEDNKNLMELLGQEIGFGKVVEEYNSAKFPVSAKVSYSDVKNLYCSPAVKRSVWQTIKIVNELVKTLGYAPKKIFLEVTREENEKTQKGYTLARKKDLEAKLKAIRTEDARAILSEFDGYEDRDLQRKKLFLYFSQMGKCAYSGEPIDLEELNNSQLYDIDHIYPRSKTKDDSITRNLVLVKASLNREKTNTYPISEDVRNRMHGMWSSWYNDGQGTITKEKYERLIRGAPLTNDELGDFIARQLVETSQSVKAIRDLLKRAYPETKIIMVKAGQVSDFRHLMGSDKKDRDGNIYEKGKYEFIKVRDINDLHHAKDAYLNIVVGNVMNSTFTDNPQEWIKRREGKEYSIRPELLFRESYEYTKKDGGSSHFPETQAWNFADSIKIVSDTMKRNDVIWTRMNYIESKEISDLQLVGKGENSDGLLRIKQQRRLDPKKYGGYNSLKGAHFSLIECKDKKGNLQRRIVQIPIIAKYEAAKYVAENYEDAKVILPVIKIKSLLKINQLPLYISNKDSENKNGYQHAIQAVFSPEDYEYMKIIYNINVKDKGTKGKYEIDPGTDKVDTENNLNLFDMLCRKFRIYFEFPEMGSTAKKVVESRENFASLSLKEQCLVLNQIFFMFACKAQNAKLNILGCGDNAGRIRISNDKLFSYDNLLLINQSPTGLYEEIIDLKTVQPKIQKQKEN

SEQ ID NO: 4573 - protein, 1208 aa, unidentified
  REGION 1..1208: note = Description of Unknown: Cas Enzyme sequence
VEGILIKKASKTDKKRELKELLYREGDDLGESAPEGQTELAGLLVGSKVNLKKIFPTGDDEKYPYSFAEGVFEDKLPDIEQAIGVDNLDLIFAAKKIYDYVILRNLLGEHKMISDAMVANYNQHEDDLQKLKQVFRPHKELYRQLFKTEPYDEKLPSYNAYIGKAYTEDKSGRRSSKNISQEDFNKYLHKLLVDIRPQTSPELLPLIDELISRSETGEKSISPLLLPKQRGQSKGTIPQQLHHNELKIIAEKLGRDYPSFTIEVAGEDESYNTKVKKILKIHEFRIPYYCGPIVKRKFNDKGEPVPGGKSQFSWADEEISELVYPWNFDKIVDKDLRANNFIRRMTNECTYLVGEDVLPKCSLLYQKFMVLNELNNLKINSNRIDSNLKKQIFEHGYKGGELKGNITLKKLEKWCQNNGFMRHDDELSGTSEVKILPKYQTYQDFRRILGADFEKKYAQNKLEKVVELITILGDEKIILKKSIQKELSCSEEEADRLSKLSYKDWGRMSAKFLNGLTVGNHTIINYLWEDNKNLMELLEQEVGFSKEVDKYNSIKRPRTTKVSYSDVDRLYCSPAVKRSVWQTIKIVNELVKNLGHAPAKIFLEVTRSEDEKSKGKYTLTRRKDLEAKLKAVRTEDARAILKELDGYEDRDLQSKKLFLYFSQMGKCAYSGEPINLEELNNSQLYDIDHIFPRSKTKDDSITHNLVLVKAKLNREKTNTYPISDSIRSKMSRMWYAWKQAKLISPEKYERLVRSTPLTNDELSGFIARQLVETSQSVKAIRDLLRRAYPDTKVIMVKAGQVSEFRHLMSSDKKDKDGCIYEPGKYEFIKVRDINDLHHAKDAYLNIVVGNVMNSTFTDNPAQWIKNRNGREYSIRPERIFRNAKTYRKANGEETCCPEVLGWDYAGSIKIISDTMKRNDVIWTRMNYIESKEISDLQLVGKSDNSEGLLRIKQRRRLDPKRYGGYNSLKGAHFALIECRDKKGNLQRCIVQIPIIAKDNVEKYVADSYCDAKVILPVIKVKSLLKIDKLPLLIANKDSDTKNGYQHAVQVVFPTDICDYLKKIYNVNSKDKATKTKYEIDPEKDGIDRGLNIKVYDTFCDKLELYSKYPEISNTVENIRQSRDIFSNLDLKQQCLTLCQMFFIFACKAQNAKLGAIGCGDSAGRIRISNDKLFSYNSLRLINQSPTGLYEEVIDLKTVQPKTSKQGKN
